United States Patent Application Publication US 2011/0182862 A1 - sequence listing, part 4

SEQ ID NO: 4524 - DNA, 1359 bp, Muscodor strobelii
  misc_feature: SGI cDNA ID NO. 561201
  misc_feature: Elevated expression when VOC is produced
  misc_feature: Encodes the peptide sequence at SEQ ID NO 4525
atgggtccgcattttaactcaggctggaggccactgaatgttggcattgtaggcggtggaatcggtggaatgtccgcagccatagcattgcgacgagccggtcacatagttacgatatacgagagagccaatttcaccggcgaggttggcgcgtccgtttcctgcgctgcgaatggcactagatggctacacgagtggggggttgatgtatcgaaaggcgacactgtaattctgaagaaattgatcaaccgtgattggaagaccggcgaacccgtcagtatctatgatcttgacgactatgagcagcgttggggctacgtatataacatgttccatcgacaatacatgcatcgcatgctcaaggattgcgcgacacaagaggagggtgaaggtatgccagcagtgctccacgtcgaccacaagtgtagagagatcgatattctcaccggcacgatggagttcgaaaacggcgtacgcgcctcgcacgatctaattattggagccgatggaattggttccgcagtacgacgcattctcggaattctgcccgagaagcgaccgtccgaccaggcctgtctgcacacaaatgtgacaacagaagaagccaggaaactcggcctcgtcgactactcgttagacagtgcgctacaatattggggtgggcaagagggtaaatgggacaagatcgtgctttcaccctgtaatggtggcgagctcttatcatactattgcttctttcctaggtcgattggcgactatatgacccagagttggggcgcggaagatcgacccgttgatgagctgctcgagaagtatcctgaacttgaccgtcaggtgttcggacacctcgcgattggaaaggaaatccagccttggagattatgggttcaccagccatacccgtatatcacaaagggagccgtgtgtttgctgggcgatgctggacatccgatgatgccgcatcagagccagggtgcttgcatggcgattgaagacgccgctgctctagggattctcttcggtaaaagatacttccgaggcgacatccaagaatcactggctgtataccaagagattcgactacctcgagttactcgtgtgcaatctgctgccgccaaggctgcctataacatcaatgagcggattggcttctctagcaacactagtatgaagacctacaaggtggaggatgagagcgtgaagctgacaatagaagagatgaatgcttatgatatgtataaggatatcgacgaaaagtttgctaagattcaaggcgtgccatacgcagaagattttacacgcgggttgccaacgggcttgaggatggcggacggtgccgtggttgcaattcaagtctga

SEQ ID NO: 4525 - protein, 452 aa, Muscodor strobelii
  misc_feature: SGI Peptide ID NO. 561201
  misc_feature (11)..(371): Pfam Id: PF01494 Pfam Desc: FAD binding domain
  misc_feature (13)..(52): Pfam Id: PF01266 Pfam Desc: FAD dependent oxidoreductase
  misc_feature (13)..(53): Pfam Id: PF00890 Pfam Desc: FAD binding domain
  misc_feature (1)..(448): NCBI GI: 238491578 Blast Desc: salicylate hydroxylase, [Aspergillus flavus NRRL3357] gi|220697439|gb|EED53780.1| salicylate hydroxylase, [Aspergillus flavus NRRL3357]
  misc_feature (7)..(448): NCBI GI: 255930147 Blast Desc: Pc06g00170 [Penicillium chrysogenum Wisconsin 54-1255] gi|211581246|emb|CAP79010.1| Pc06g00170 [Penicillium chrysogenum Wisconsin 54-1255]
  misc_feature (8)..(448): NCBI GI: 256727963 Blast Desc: [Nectria haematococca mpVI 77-13-4]
  misc_feature (9)..(448): NCBI GI: 46133847 Blast Desc: FG09063.1 [Gibberella zeae PH-1]
  misc_feature (7)..(448): NCBI GI: 145606793 Blast Desc: MGG_03764 [Magnaporthe grisea 70-15] gi|145014443|gb|EDJ99011.1| MGG_03764 [Magnaporthe grisea 70-15]
  misc_feature (7)..(451): NCBI GI: 119495474 Blast Desc: salicylate hydroxylase, [Neosartorya fischeri NRRL 181] gi|119412683|gb|EAW22624.1| salicylate hydroxylase, [Neosartorya fischeri NRRL 181]
  misc_feature (7)..(448): NCBI GI: 67524391 Blast Desc: AN2653.2 [Aspergillus nidulans FGSC A4] gi|40743871|gb|EAA63055.1| AN2653.2 [Aspergillus nidulans FGSC A4] gi|259486437|tpe|CBF84273.1| TPA: salicylate hydroxylase, A4]
  misc_feature (7)..(451): NCBI GI: 159131364 Blast Desc: salicylate hydroxylase, [Aspergillus fumigatus A1163]
  misc_feature (7)..(451): NCBI GI: 70995710 Blast Desc: salicylate hydroxylase [Aspergillus fumigatus Af293] gi|66850245|gb|EAL90572.1| salicylate hydroxylase, [Aspergillus fumigatus Af293]
  misc_feature (7)..(451): NCBI GI: 41581318 Blast Desc: salicylate hydroxylase, [Aspergillus fumigatus]
  misc_feature (24)..(369): SWISSPROT Homolog: EC 1.14.13.24 3-hydroxybenzoate 6-monooxygenase
  misc_feature: Useful for introducing or modulating the production of volatile compounds
MGPHFNSGWRPLNVGIVGGGIGGMSAAIALRRAGHIVTIYERANFTGEVGASVSCAANGTRWLHEWGVDVSKGDTVILKKLINRDWKTGEPVSIYDLDDYEQRWGYVYNMFHRQYMHRMLKDCATQEEGEGMPAVLHVDHKCREIDILTGTMEFENGVRASHDLIIGADGIGSAVRRILGILPEKRPSDQACLHTNVTTEEARKLGLVDYSLDSALQYWGGQEGKWDKIVLSPCNGGELLSYYCFFPRSIGDYMTQSWGAEDRPVDELLEKYPELDRQVFGHLAIGKEIQPWRLWVHQPYPYITKGAVCLLGDAGHPMMPHQSQGACMAIEDAAALGILFGKRYFRGDIQESLAVYQEIRLPRVTRVQSAAAKAAYNINERIGFSSNTSMKTYKVEDESVKLTIEEMNAYDMYKDIDEKFAKIQGVPYAEDFTRGLPTGLRMADGAVVAIQV

SEQ ID NO: 4526 - DNA, 2350 bp, Muscodor strobelii
  misc_feature: SGI EST ID NO. CUFF.11506.0
  misc_feature: Variant of the nucleotide sequence at SEQ ID NO 4524
gaagtcggaagaaaagacggaagatgcagattagaattactagaatgcgacgttgatgttatcatacaccaccggctagatccggatatgaacgagacgtaccacctcacgtcaaatcccatttacaatgcttcgttgagggcatcttgaagctgtactagctgaaatcgaaattcctttcgtaaaacatcgataattctggtatttgctactagttgcttctccgtggttgcgatgctaaatacgtggggttaggaaaaggtttctcgggatctattaaatttcaactcgaccactcgtctcaattgcccgatctgatatcatcattctattatccgctgttgtatttctgtttacttagaatgggtccgcattttaactcaggctggaggccactgaatgttggcattgtaggcggtggaatcggtggaatgtccgcagccatagcattgcgacgagccggtcacatagttacgatatacgagagagccaatttcaccggcgaggttggcgcgtccgtttcctgcgctgcgaatggcactagatggctacacgagtggggggttgatgtatcgaaaggcgacactgtaattctgaagaaattgatcaaccgtgattggaagaccggcgaacccgtcagtatctatgatcttgacgactatgagcagcgttggggctacgtatataacatgttccatcgacaatacatgcatcgcatgctcaaggattgcgcgacacaagaggagggtgaaggtatgccagcagtgctccacgtcgaccacaagtgtagagagatcgatattctcaccggcacgatggagttcgaaaacggcgtacgcgcctcgcacgatctaattattggagccgatggaattggttccgcagtacgacgcattctcggaattctgcccgagaagcgaccgtccgaccaggcctgtctgcacacaaatgtgacaacagaagaagccaggaaactcggcctcgtcgactactcgttagacagtgcgctacaatattggggtgggcaagagggtaaatgggacaagatcgtgctttcaccctgtaatggtggcgagctcttatcatactattgcttctttcctaggtcgattggcgactatatgacccagagttggggcgcggaagatcgacccgttgatgagctgctcgagaagtatcctgaacttgaccgtcaggtgttcggacacctcgcgattggaaaggaaatccagccttggagattatgggttcaccagccatacccgtatatcacaaagggagccgtgtgtttgctgggcgatgctggacatccgatgatgccgcatcagagccagggtgcttgcatggcgattgaagacgccgctgctctagggattctcttcggtaaaagatacttccgaggcgacatccaagaatcactggctgtataccaagagattcgactacctcgagttactcgtgtgcaatctgctgccgccaaggctgcctataacatcaatgagcggattggcttctctagcaacactagtatgaagacctacaaggtggaggatgagagcgtgaagctgacaatagaagagatgaatgcttatgatatgtataaggatatcgacgaaaagtttgctaagattcaaggcgtgccatacgcagaagattttacacgcgggttgccaacgggcttgaggatggcggacggtgccgtggttgcaattcaagtctgatttttgtttctggttacagttatgggacgttccacgcaacagtgttcagtgatcagcaatctcattatatacggtatggaacattatatacaacgatatgctccagttagtctattgccaagtggtgcggttttctaaggattattcgttgccgaggcttctaaatctcagttggactggtactgcgcaacataggcaacttccattgcgctgccgtctccacctaaagttgatgcgtttggctgaccgggctatgttctagtcagtacgaaactaataaaccagcaatagggagttggcatggaaagcgatctccgaagcttgaaggtgaggacattattacatacccagttgccgccaaccgccacatttagaatgaagtaaagagggctgttcacgagcgagttccagacggcttggttgttgattctagccccggttacttgccagtattgttgtccatcacggaaccaagtgatagtctcggccgtccaggccgccggtgtacgatcaatagtcacgcgccactcgtgccatgcattatccccaaagccgatgtttccgccgaggcccgtaccttcattgcagataccacctgggtacacgtcacaatggactgtaccataacc

SEQ ID NO: 4527 - DNA, 1545 bp, Muscodor strobelii
  misc_feature: SGI cDNA ID NO. 561202
  misc_feature: Elevated expression when VOC is produced
  misc_feature: Encodes the peptide sequence at SEQ ID NO 4528
atggcattgaaacgaatcatcagagtcttcatcggtgcagcgattgccctcctctttcttcgctttggaacctcgatactcgctggccctcaatatccggacctcgtactcgctgcggaacacgaccatcctcaaaatcccaccctcgcatcctatctcgactttctcaacgtcgctcacccttcgttcaaaagcctcaaactcaacaataaaggatggaacaatccgcgataccgacgagctatcacggctgtcactcccgaatcgaaacgactagagctcgtgacgcttggccgcgctgaccacgctgctaccaaggacgcacaccaactcgtcgtgtctgccataccgaaatacgaaccgatagtcacatacaaacgaggtacaagagggattgtgacgattgcaggagaagttttcacggcccagacgctcgtttctctgcgcatgttgcgtcgctacaatacggagacaccggttgagattttcctgcccgaggattgcgcccccgaggccagttcccatatttgtacaaagctctttccggaactgaatgcaaaatgtattgttttaccaaacatccctggacattcggtttcacgtttcgcatacaaggcatttgcgctcttacattcaagctttgaagatgtgctatttctagatgccgacaattttcccatcgtggatcccagtagactgttcgagtctacaccatatacgaagactggcctggtcacctggccagatttttgggaatcgatgatgtcccccatctactacgacattgcatcgctaccggtcgatcctatgacgcttcatgctggaagcgaaagtgggcaaattataattaacaaaaaacgacacgcgcgcacactcctgctggctacgtattactccatatttggtgataaacagtactttattctcttcaatcaaggcggccacggcgaaggagacaaggacagttggatacacgcagcgaaagctttatccctgccatattatcaagtgcgagaaattgttggcgagcttggcggcgaagtgatggaatggttctacatcggaattcttcaggctgacccacaagcagactacatggtggaacagattctgtctccgcaggcaacctggcgtaatgaaacaccaggtgttgatcgtgtgctagtacaccattcctgggtaaagctcaacccagaccacattgtacgcgaacgtcacagcgacaagcgagtcggcgaacgcatgtggggtagtcgtgagcaaacggagaagatacatggtttcgatctagaaatggacgtatggaatgaggttctctgggttgcatgtgctgttgaaaagtacctacctgatgagaaggatcgtggtcagtgcgagaaggtcaaggaagtatggtcttggatattagaaaaagaaggtatcagtaaagtcgagatggagaagacgttcacaatggccactaacccagaacgcaaaccctcgagacagagtcgtgggaaggccgcgaagtcggggaaaaatctgttgagtggcggaggggtgtga

SEQ ID NO: 4528 - protein, 514 aa, Muscodor strobelii
  misc_feature: SGI Peptide ID NO. 561202
  misc_feature (81)..(488): NCBI GI: 156061321 Blast Desc: SS1G_02803 [Sclerotinia sclerotiorum 1980] gi|154700207|gb|EDN99945.1| SS1G_02803 [Sclerotinia sclerotiorum 1980]
  misc_feature (81)..(496): NCBI GI: 154319626 Blast Desc: BC1G_02294 [Botryotinia fuckeliana B05.10] gi|150855952|gb|EDN31144.1| BC1G_02294 [Botryotinia fuckeliana B05.10]
  misc_feature (90)..(473): NCBI GI: 240110817 Blast Desc: CPC735_036790 [Coccidioides posadasii C735 delta SOWgp]
  misc_feature (90)..(473): NCBI GI: 119196627 Blast Desc: CIMG_02688 [Coccidioides immitis RS]
  misc_feature (90)..(473): NCBI GI: 258569511 Blast Desc: conserved [Uncinocarpus reesii 1704] gi|237903829|gb|EEP78230.1| conserved [Uncinocarpus reesii 1704]
  misc_feature (91)..(466): NCBI GI: 145250237 Blast Desc: An15g00920 [Aspergillus niger] gi|134082148|emb|CAK42262.1| protein product [Aspergillus niger]
  misc_feature (91)..(469): NCBI GI: 255945831 Blast Desc: Pc20g11970 [Penicillium chrysogenum Wisconsin 54-1255] gi|211588418|emb|CAP86526.1| Pc20g11970 [Penicillium chrysogenum Wisconsin 54-1255]
  misc_feature (91)..(472): NCBI GI: 240111477 Blast Desc: CPC735_073120 [Coccidioides posadasii C735 delta SOWgp]
  misc_feature (106)..(466): NCBI GI: 121703682 Blast Desc: alpha-1,2-mannosyltransferase (Mnn2), [Aspergillus clavatus NRRL 1] gi|119398249|gb|EAW08679.1| alpha-1,2-mannosyltransferase (Mnn2), [Aspergillus clavatus NRRL
  misc_feature (91)..(472): NCBI GI: 119188791 Blast Desc: CIMG_04443 [Coccidioides immitis RS]
  misc_feature: Useful for introducing or modulating the production of volatile compounds
MALKRIIRVFIGAAIALLFLRFGTSILAGPQYPDLVLAAEHDHPQNPTLASYLDFLNVAHPSFKSLKLNNKGWNNPRYRRAITAVTPESKRLELVTLGRADHAATKDAHQLVVSAIPKYEPIVTYKRGTRGIVTIAGEVFTAQTLVSLRMLRRYNTETPVEIFLPEDCAPEASSHICTKLFPELNAKCIVLPNIPGHSVSRFAYKAFALLHSSFEDVLFLDADNFPIVDPSRLFESTPYTKTGLVTWPDFWESMMSPIYYDIASLPVDPMTLHAGSESGQIIINKKRHARTLLLATYYSIFGDKQYFILFNQGGHGEGDKDSWIHAAKALSLPYYQVREIVGELGGEVMEWFYIGILQADPQADYMVEQILSPQATWRNETPGVDRVLVHHSWVKLNPDHIVRERHSDKRVGERMWGSREQTEKIHGFDLEMDVWNEVLWVACAVEKYLPDEKDRGQCEKVKEVWSWILEKEGISKVEMEKTFTMATNPERKPSRQSRGKAAKSGKNLLSGGGV

SEQ ID NO: 4529 - DNA, 2425 bp, Muscodor strobelii
  misc_feature: SGI EST ID NO. CUFF.11511.0
  misc_feature: Variant of the nucleotide sequence at SEQ ID NO 4527
tagacttctttatatcacgattgagagtaaaggtccaaaaggctgttgcgttctaaaagaggctccctaatctattgtcgcagagtacaaactccctggtgggttaattgatccctgggattcatcatcgtcagagatgcattcaaggggcaagaacaggaatgggaacagccagcgacaaaattagcattttaggtgtcttcaattatctgcgtgagagacatggcaccataccgagggcaatctcgaggccgtctgcgaatttccatgaagcatcatgagtgggttgtggaggatgccttccagcccgtcagtcccgtaactctgaatcatggcatctgaatcatgactagggatccacgccaacaatactggggctgagctccaaaagcggttaccacgaacaaacatcatgatgcgctcctctcatttactgggtcagttgttcaaggatttgaggcttggcaggctgtcagcttgtcagctaccgcgccgcgtcgtgtaaaattgagggcgatgcggtctgggtgatcaagcaccatgcgattcgggtcgcaacggaatcaggtaacgtcagtatggcattgaaacgaatcatcagagtcttcatcggtgcagcgattgccctcctctttcttcgctttggaacctcgatactcgctggccctcaatatccggacctcgtactcgctgcggaacacgaccatcctcaaaatcccaccctcgcatcctatctcgactttctcaacgtcgctcacccttcgttcaaaagcctcaaactcaacaataaaggatggaacaatccgcgataccgacgagctatcacggctgtcactcccgaatcgaaacgactagagctcgtgacgcttggccgcgctgaccacgctgctaccaaggacgcacaccaactcgtcgtgtctgccataccgaaatacgaaccgatagtcacatacaaacgaggtacaagagggattgtgacgattgcaggagaagttttcacggcccagacgctcgtttctctgcgcatgttgcgtcgctacaatacggagacaccggttgagattttcctgcccgaggattgcgcccccgaggccagttcccatatttgtacaaagctctttccggaactgaatgcaaaatgtattgttttaccaaacatccctggacattcggtttcacgtttcgcatacaaggcatttgcgctcttacattcaagctttgaagatgtgctatttctagatgccgacaattttcccatcgtggatcccagtagactgttcgagtctacaccatatacgaagactggcctggtcacctggccagatttttgggaatcgatgatgtcccccatctactacgacattgcatcgctaccggtcgatcctatgacgcttcatgctggaagcgaaagtgggcaaattataattaacaaaaaacgacacgcgcgcacactcctgctggctacgtattactccatatttggtgataaacagtactttattctcttcaatcaaggcggccacggcgaaggagacaaggacagttggatacacgcagcgaaagctttatccctgccatattatcaagtgcgagaaattgttggcgagcttggcggcgaagtgatggaatggttctacatcggaattcttcaggctgacccacaagcagactacatggtggaacagattctgtctccgcaggcaacctggcgtaatgaaacaccaggtgttgatcgtgtgctagtacaccattcctgggtaaagctcaacccagaccacattgtacgcgaacgtcacagcgacaagcgagtcggcgaacgcatgtggggtagtcgtgagcaaacggagaagatacatggtttcgatctagaaatggacgtatggaatgaggttctctgggttgcatgtgctgttgaaaagtacctacctgatgagaaggatcgtggtcagtgcgagaaggtcaaggaagtatggtcttggatattagaaaaagaaggtatcagtaaagtcgagatggagaagacgttcacaatggccactaacccagaacgcaaaccctcgagacagagtcgtgggaaggccgcgaagtcggggaaaaatctgttgagtggcggaggggtgtgagcaacacctgccgcgtgttaaggtgatttaatgtggaagatctcaagtacatgtactatcagcgagggttcggcaaggggatcggttgggtattttcgatcatttcctccatttctatacaggtacacaggcgtacaatcaccgaatgatttccgtttggacagtcacgagagtggtaggtttaaaggtatatgggattgtaatgataggttgggagggagggactatccattcgcaacaatatcgttgcggcagcatcctaagtatcgattatagcgctaaaaataaaggttgaagctctt

SEQ ID NO: 4530 - DNA, 732 bp, Muscodor strobelii
  misc_feature: SGI cDNA ID NO. 561203
  misc_feature: Encodes the peptide sequence at SEQ ID NO 4531
atgtctcattcacctttgaacattttcaaaaccccacgtgtcaaagtcaggacgactcggcctcaattgcccatcatccccaacaaagaccgtccaactatccgcactcgacgtgtactgatccgtgcaccccaagcatctgacatcgaggccatctacgagatgcggagacatcccgaggtcatgctgtacactgcacgtgggtcaccagacaaatctgtcgcggaatctcaggtgttcctcgacaagttcttggctccgaacgatgcgcacacctattacttcactgtactctatttaggagaggagggcaacatccccgattccgaagctcccatcatcgggacgtgtggtgttcatgggctagatcagtccggattctggttcggatggcccgagattggctacacaatccgcaaggagtattggaacaaaggattggcgacggaagtgcttcgggcatatctggaggcttactgggcattaccacgtgagtcggtggagatggaggttcatcctgagacgatgggtgaggcggtagatggacaggttcctgaacaggtctctgccttggtcggcgctctcaaccctgctagtcttcgggttctcgagaaggtggggtttcagacattcatgaaatgggaggaaattgacaatcgaacggcttccgaggttgcggggcagatggcagatgtggttggactcatggcgtcgtcgaacacacgcagttag

SEQ ID NO: 4531 - protein, 243 aa, Muscodor strobelii
  misc_feature: SGI Peptide ID NO. 561203
  misc_feature (1)..(237): NCBI GI: 256730795 Blast Desc: NECHADRAFT_29703 [Nectria haematococca mpVI 77-13-4]
  misc_feature (14)..(220): NCBI GI: 85111439 Blast Desc: NCU08390 [Neurospora crassa OR74A] gi|28925688|gb|EAA34701.1| [Neurospora crassa OR74A]
  misc_feature (14)..(224): NCBI GI: 39943148 Blast Desc: MGG_03654 [Magnaporthe grisea 70-15] gi|145009757|gb|EDJ94413.1| MGG_03654 [Magnaporthe grisea 70-15]
  misc_feature (10)..(219): NCBI GI: 171695312 Blast Desc: protein product [Podospora anserina] gi|170947898|emb|CAP60062.1| protein product [Podospora anserina]
  misc_feature (14)..(219): NCBI GI: 261355317 Blast Desc: conserved [Verticillium albo-atrum VaMs.102]
  misc_feature (14)..(208): NCBI GI: 115438332 Blast Desc: [Aspergillus terreus NIH2624] gi|114188854|gb|EAU30554.1| [Aspergillus terreus NIH2624]
  misc_feature (14)..(226): NCBI GI: 255942785 Blast Desc: Pc18g03210 [Penicillium chrysogenum Wisconsin 54-1255] gi|211586894|emb|CAP94545.1| Pc18g03210 [Penicillium chrysogenum Wisconsin 54-1255]
  misc_feature (14)..(224): NCBI GI: 46109264 Blast Desc: FG01514.1 [Gibberella zeae PH-1]
  misc_feature (14)..(214): NCBI GI: 46109746 Blast Desc: FG01755.1 [Gibberella zeae PH-1]
  misc_feature (14)..(152): NCBI GI: 116182376 Blast Desc: CHGG_01816 [Chaetomium globosum CBS 148.51] gi|88186113|gb|EAQ93581.1| CHGG_01816 [Chaetomium globosum CBS 148.51]
MSHSPLNIFKTPRVKVRTTRPQLPIIPNKDRPTIRTRRVLIRAPQASDIEAIYEMRRHPEVMLYTARGSPDKSVAESQVFLDKFLAPNDAHTYYFTVLYLGEEGNIPDSEAPIIGTCGVHGLDQSGFWFGWPEIGYTIRKEYWNKGLATEVLRAYLEAYWALPRESVEMEVHPETMGEAVDGQVPEQVSALVGALNPASLRVLEKVGFQTFMKWEEIDNRTASEVAGQMADVVGLMASSNTRS

SEQ ID NO: 4532 - DNA, 1179 bp, Muscodor strobelii
  misc_feature: SGI EST ID NO. CUFF.11514.0
  misc_feature: Variant of the nucleotide sequence at SEQ ID NO 4530
cacggagtccttccccctaaaagctgaagtgatctgcgcccttccgcactaaacaaggcgccgacaaacgacatgttgacatgcccgctagattatataacgccgggatgagactgttcgattggaccggggaaactcgatcaatccaattgcattgcctctcatcatcagtctaaaccattcgttttcacacggtagaaatgtctcattcacctttgaacattttcaaaaccccacgtgtcaaagtcaggacgactcggcctcaattgcccatcatccccaacaaagaccgtccaactatccgcactcgacgtgtactgatccgtgcaccccaagcatctgacatcgaggccatctacgagatgcggagacatcccgaggtcatgctgtacactgcacgtgggtcaccagacaaatctgtcgcggaatctcaggtgttcctcgacaagttcttggctccgaacgatgcgcacacctattacttcactgtactctatttaggagaggagggcaacatccccgattccgaagctcccatcatcgggacgtgtggtgttcatgggctagatcagtccggattctggttcggatggcccgagattggctacacaatccgcaaggagtattggaacaaaggattggcgacggaagtgcttcgggcatatctggaggcttactgggcattaccacgtgagtcggtggagatggaggttcatcctgagacgatgggtgaggcggtagatggacaggttcctgaacaggtctctgccttggtcggcgctctcaaccctgctagtcttcgggttctcgagaaggtggggtttcagacattcatgaaatgggaggaaattgacaatcgaacggcttccgaggttgcggggcagatggcagatgtggttggactcatggcgtcgtcgaacacacgcagttagtggttgcataaggcattctcgacagaatatacaaacgaaagtcaatagatcttgacataatcctgtgtatgtcgtgtattgagtcagagagcctatagattaccaggaaaattctactgggtgatctaaacttggaggtttgtccatcattgatcacgtagttcgaatagtctatgcattgttccgcatccggctgtaatgtcgacttttgaacaaagcaacatcaattgagtgtactcgaccgtcg

SEQ ID NO: 4533 - DNA, 1134 bp, Muscodor strobelii
  misc_feature: SGI cDNA ID NO. 561204
  misc_feature: Encodes the peptide sequence at SEQ ID NO 4534
atggatctcgtgcgaacaaacgtcttctccaccggctccggcaacatcaagatcgacaaacgatggcacaacaaaatcactaatgccaatctactagagaaatggagagaatccaagtctgttctccgccgtttcaatgcacttcaagtactacagtcaaaacgcgatcaacccgtcctcgcaggagccctaaaagagcctctgagcttcatgttcgactccctcccagtcatggttcaggacgacgtcaatatcttctgtcctgtgaaatacagcgatgatcttgatcgggaaggcacattcgattggctgagtacggaaagacacgatagattgatcgaacaatacggcccggagattcgacgaaagccatatcacttctggcctttcgatgttgaacaggatgaggacaaaccgcctcgatggggtctcatcgtcatgcacatggctcatcgtcctactgtcaagaagaatcgacacagcgacgatgacgatccgtatttgggggatgaagacgtcgcggccatctctcccgatacagcctttgattatttacagtcctgcgccgtcatataccccgatcatggcacctctgcccgagagcgcccctggatcccacccatgaaccctccacatcaggaaggaaaagaatattggagcacgggactccgtgtattcgagatgatgcgcatctggcttgataggatcacagaaagctattgttggaatcccagggtccacgacgacgaagacttctggcgtccgcatccaggctggttcaatcccgacgccgtgcgctcaaatatgattggcatggcagcgacgatggtcaatagagcaatggagagtcagacacggatatcaatcgagccaattaaaaaaggcgtcatgagttttcgacgtggcgatgtactagagtcgtccaagacgaaaaagagaaagactgcgaaatacaagtcgggacaggcgtatgggttcgaggtattcgacactaataccatgatgccaaaccgccaaaatgtcaaggctttcgacccaagtgagcctcaagagagtcctgttgagattgccgaagagtcggaggatgaggacaaggaaggggatgcgatagaggttgcgaatgaagatgcttag

SEQ ID NO: 4534 - protein, 377 aa, Muscodor strobelii
  misc_feature: SGI Peptide ID NO. 561204
MDLVRTNVFSTGSGNIKIDKRWHNKITNANLLEKWRESKSVLRRFNALQVLQSKRDQPVLAGALKEPLSFMFDSLPVMVQDDVNIFCPVKYSDDLDREGTFDWLSTERHDRLIEQYGPEIRRKPYHFWPFDVEQDEDKPPRWGLIVMHMAHRPTVKKNRHSDDDDPYLGDEDVAAISPDTAFDYLQSCAVIYPDHGTSARERPWIPPMNPPHQEGKEYWSTGLRVFEMMRIWLDRITESYCWNPRVHDDEDFWRPHPGWFNPDAVRSNMIGMAATMVNRAMESQTRISIEPIKKGVMSFRRGDVLESSKTKKRKTAKYKSGQAYGFEVFDTNTMMPNRQNVKAFDPSEPQESPVEIAEESEDEDKEGDAIEVANEDA

SEQ ID NO: 4535 - DNA, 1605 bp, Muscodor strobelii
  misc_feature: SGI cDNA ID NO. 561205
  misc_feature: Encodes the peptide sequence at SEQ ID NO 4536
atggcggacgcagcttcgaaattagacccagactccatctcaccagcgacagagattacggatgcagctatctcagtcaatccacttgcagacaaagcagcgaaattcattgctgaacatggcgatgtcgcttttgactatgaagaggaacgaagagtcttgaaacaagtcgatcgacgaatcctgccgctgttacttggcgcctacttctttcaacaactggacaagtcctcgctgtcttatgtctccatctttgggatacttcaagatgccaatcttcagtctcggcaatattcctggcttggatccatcttgtactttggtatactcgcatttcaacctcttgttgcctttgtccttgtgagattcccaactgggaaagtacttgggactgctatcattctatggggagcaagcgaagccattcttgcagcttgtaccgacttcgcttctctggcatccctgcgctttctcctgggggctttcgaggcattcatagccccgtcgtgcatagccataacacagatgtggtggagacggtccgaacagacacttcgcaactcatactggaacgccatgaacggtgtgacacagatagtaggcagtctgttgacatatgggctgggtcacattgttagcgacaaaatttatcgatatcaagtcattttcatcttttgcggggttaccactgtcttgtttggagtgctgttccttacgctgatgcctgactcgccgatggaggccaagtatctgagcgaacgggagcaaatcatagttgtcgagcgactacgtgccaatcagatgggtgtggccagtcggaagtggaagtgggagcatgtgagtgagacattgatggatctcaagacttggatgtggtttttcagcatgttatctgtctcaatcgccagcggtgggatttcgtcatttggtaatctcattgtgaagagttttgggttttcagagttcaacacgattctattcaatattccgtttggtgttattcagtttggcagcatcattgggtctgcggctctagctaccaagtacagtcgaaaggggtttgtgctggctggcgtcagtgtgctaccgactgttggcaccatcctcatgctggctattcacagaaatgataagaataaaggggttttactatttggatactatctcgtgtcgtgtttgggggctatcacacctctgatctacacctggtcggcacagaacacgggaggagacaccaagaaaaagactacgacagcaattatgattgtggccatgtgcacgggcaacatcatcggtccacagctgttcaacacgaaggatgcgccactctaccgacctggtctcatcgcctgtcttgttcaatttgtgtttgtgggtgcattggggctactcatccccatgtacctgatgtacttgaatcgacgacatgcgaagagacgggaagaggtaggaaaggaagtggatgtcatggatgcctcgatgagacgaaagaaggatgctcaagcagacacggaccagaaggaggagttgaagaatattgaagatgatctaggtctccaggacttgtcagatctcaaaaatgaggactttatctatgtgtattga

SEQ ID NO: 4536 - protein, 534 aa, Muscodor strobelii
  misc_feature: SGI Peptide ID NO. 561205
  misc_feature (65)..(433): Pfam Id: PF07690 Pfam Desc: Major Facilitator Superfamily
  misc_feature (19)..(534): NCBI GI: 261354170 Blast Desc: allantoate permease [Verticillium albo-atrum VaMs.102]
  misc_feature (10)..(534): NCBI GI: 171678363 Blast Desc: protein product [Podospora anserina] gi|170937251|emb|CAP61908.1| protein product [Podospora anserina]
  misc_feature (17)..(534): NCBI GI: 169765015 Blast Desc: [Aspergillus oryzae RIB40] gi|83764833|dbj|BAE54977.1| protein product [Aspergillus oryzae]
  misc_feature (31)..(534): NCBI GI: 255946243 Blast Desc: Pc20g14110 [Penicillium chrysogenum Wisconsin 54-1255] gi|211588624|emb|CAP86740.1| Pc20g14110 [Penicillium chrysogenum Wisconsin 54-1255]
  misc_feature (9)..(534): NCBI GI: 169621993 Blast Desc: SNOG_14209 [Phaeosphaeria nodorum SN15] gi|111057326|gb|EAT78446.1| SNOG_14209 [Phaeosphaeria nodorum SN15]
  misc_feature (11)..(534): NCBI GI: 119501667 Blast Desc: allantoate permease [Neosartorya fischeri NRRL 181] gi|119415756|gb|EAW25693.1| allantoate permease [Neosartorya fischeri NRRL 181]
  misc_feature (73)..(534): NCBI GI: 116205890 Blast Desc: CHGG_02238 [Chaetomium globosum CBS 148.51] gi|88182835|gb|EAQ90303.1| CHGG_02238 [Chaetomium globosum CBS 148.51]
  misc_feature (16)..(506): NCBI GI: 145235515 Blast Desc: An03g05250 [Aspergillus niger] gi|134058091|emb|CAK49177.1| protein product [Aspergillus niger]
  misc_feature (17)..(463): NCBI GI: 238503704 Blast Desc: allantoate permease, [Aspergillus flavus NRRL3357] gi|220690555|gb|EED46904.1| allantoate permease, [Aspergillus flavus NRRL3357]
  misc_feature (31)..(534): NCBI GI: 189206588 Blast Desc: allantoate permease [Pyrenophora tritici-repentis Pt-1C-BFP] gi|187975721|gb|EDU42347.1| allantoate permease [Pyrenophora tritici-repentis Pt-1C-BFP]
MADAASKLDPDSISPATEITDAAISVNPLADKAAKFIAEHGDVAFDYEEERRVLKQVDRRILPLLLGAYFFQQLDKSSLSYVSIFGILQDANLQSRQYSWLGSILYFGILAFQPLVAFVLVRFPTGKVLGTAIILWGASEAILAACTDFASLASLRFLLGAFEAFIAPSCIAITQMWWRRSEQTLRNSYWNAMNGVTQIVGSLLTYGLGHIVSDKIYRYQVIFIFCGVTTVLFGVLFLTLMPDSPMEAKYLSEREQIIVVERLRANQMGVASRKWKWEHVSETLMDLKTWMWFFSMLSVSIASGGISSFGNLIVKSFGFSEFNTILFNIPFGVIQFGSIIGSAALATKYSRKGFVLAGVSVLPTVGTILMLAIHRNDKNKGVLLFGYYLVSCLGAITPLIYTWSAQNTGGDTKKKTTTAIMIVAMCTGNIIGPQLFNTKDAPLYRPGLIACLVQFVFVGALGLLIPMYLMYLNRRHAKRREEVGKEVDVMDASMRRKKDAQADTDQKEELKNIEDDLGLQDLSDLKNEDFIYVY

SEQ ID NO: 4537 - DNA, 1443 bp, Muscodor strobelii
  misc_feature: SGI EST ID NO. CUFF.11524.0
  misc_feature: Variant of the nucleotide sequence at SEQ ID NO 4535
gggctttcgaggcattcatagccccgtcgtgcatagccataacacagatgtggtggagacggtccgaacagacacttcgcaactcatactggaacgccatgaacggtgtgacacagatagtaggcagtctgttgacatatgggctgggtcacattgttagcgacaaaatttatcgatatcaagtcattttcatcttttgcggggttaccactgtcttgtttggagtgctgttccttacgctgatgcctgactcgccgatggaggccaagtatctgagcgaacgggagcaaatcatagttgtcgagcgactacgtgccaatcagatgggtgtggccagtcggaagtggaagtgggagcatgtgagtgagacattgatggatctcaagacttggatgtggtttttcagcatgttatctgtctcaatcgccagcggtgggatttcgtcatttggtaatctcattgtgaagagttttgggttttcagagttcaacacgattctattcaatattccgtttggtgttattcagtttggcagcatcattgggtctgcggctctagctaccaagtacagtcgaaaggggtttgtgctggctggcgtcagtgtgctaccgactgttggcaccatcctcatgctggctattcacagaaatgataagaataaaggggttttactatttggatactatctcgtgtcgtgtttgggggctatcacacctctgatctacacctggtcggcacagaacacgggaggagacaccaagaaaaagactacgacagcaattatgattgtggccatgtgcacgggcaacatcatcggtccacagctgttcaacacgaaggatgcgccactctaccgacctggtctcatcgcctgtcttgttcaatttgtgtttgtgggtgcattggggctactcatccccatgtacctgatgtacttgaatcgacgacatgcgaagagacgggaagaggtaggaaaggaagtggatgtcatggatgcctcgatgagacgaaagaaggatgctcaagcagacacggaccagaaggaggagttgaagaatattgaagatgatctaggtctccaggacttgtcagatctcaaaaatgaggactttatctatgtgtattgatatgagggcggtgataggggtgctggagtgtcggagtggaccgcgtcacggtgcgggatacgatgcagcaaggtaccgatgtgggcacggctcgcaattgaggtatttgcctgtgcctgattacatgtatgtacctgggctgttgattagcagtcgaaagcaactgaactggacaggaggacggagagtttcggatacctcgttcataatcaaattccccttatgacgtcgcgtcgctcaaacctcacgactatcagggcccgatgcgggacatgaaaggcacatgcacaatataaacacactacatcgttacccc

SEQ ID NO: 4538 - DNA, 1308 bp, Muscodor strobelii
  misc_feature: SGI cDNA ID NO. 561206
  misc_feature: Encodes the peptide sequence at SEQ ID NO 4539
atgacgagccttctcgcccctaataaaaagcgatatgctatcgtggggactggtggtcgtgccatattcttctacacggccatcgcaagccagtatgccactacatcttgtatcgtcgggatctgtgatacgaacgagactcgaatgaagtatgccaactccaaactcgagtccctaggtcacggagctgtaccgacgttcttggcctcagactttgaaaagatgatttcggagacaaaacccgacgaggtcattgtcaccaccatcgaccgaactcacaacatctacatcgtcaaggccttggagttgggttgcaatgtcatcgccgaaaagcccatgaccatcgacgcaccgcgctgcaacgaaatcttcaacgccgtagagagaacgactaaaaacgtccgggtcaccttcaattaccgctacgcacctcacaatacgaaggttttcgagattctccggtcgggagcaatcggtaaagtgaccagcgtccatttcgaatggatgctcaacacatcgcacggcgccgactatttccgtcgctggcatcgggacaagcgcaacagcgggggattgctggtccacaagagcacacaccactttgaccttgtgaatttctggctacagacaaggccatcaacagtctacgcacaaggcgatctcaaattctacgggcgagagaatgcagagcgacgtggagagacgagattctacacgcgggcgcacgacagcgaagtggccaagacggacccatttgctctacacctcgaaaagcacccacagctcaaagccatgtatctcgatgcggaacacgaggatgcctactatcgcgaccagagcgtgtttggagatggcatcagcatagaggatacgatgaacttacttgtgcgctacaagaacggtgctgtgctgacgtactcgctaacggcgtacgcgccgtgggaagggttccgagtcagcttcaacggaacgggcggacggctagagatggaggtggtggagaacagctacgtgaattcgggaggagaccaggcggccgaaggatcactagagaagaggacgatactcctccgacgactgtttgagaagccagaagagattgagattgatgacgatgccgccggagctcacgggggaggcgacgcggtgttgctgaacgacctgttcggtgagcccatgtcggacgagtacatgcgggcggccagtcatgtcgatggggcattgtcgatcctcacgggtatcgcggccaacaagtcgatggcgacggggcaggttgtgaatgtggacgatatcttgagggtgccgtga

SEQ ID NO: 4539 - protein, 435 aa, Muscodor strobelii
  misc_feature: SGI Peptide ID NO. 561206
  misc_feature (150)..(282): Pfam Id: PF02894 Pfam Desc: Oxidoreductase family, C-terminal alpha/beta domain
  misc_feature (10)..(138): Pfam Id: PF01408 Pfam Desc: Oxidoreductase family, NAD-binding Rossmann fold
  misc_feature (150)..(217): Pfam Id: PF02894 Pfam Desc: Oxidoreductase family, C-terminal alpha/beta domain
  misc_feature (9)..(435): NCBI GI: 46115626 Blast Desc: FG03655.1 [Gibberella zeae PH-1]
  misc_feature (9)..(435): NCBI GI: 145601205 Blast Desc: MGG_08695 [Magnaporthe grisea 70-15] gi|145009238|gb|EDJ93949.1| MGG_08695 [Magnaporthe grisea 70-15]
  misc_feature (6)..(424): NCBI GI: 169621991 Blast Desc: SNOG_14208 [Phaeosphaeria nodorum SN15] gi|111057325|gb|EAT78445.1| SNOG_14208 [Phaeosphaeria nodorum SN15]
  misc_feature (5)..(435): NCBI GI: 261354169 Blast Desc: NAD-binding Rossmann fold oxidoreductase family protein [Verticillium albo-atrum VaMs.102]
  misc_feature (9)..(435): NCBI GI: 171678371 Blast Desc: protein product [Podospora anserina] gi|170937255|emb|CAP61912.1| protein product [Podospora anserina]
  misc_feature (1)..(435): NCBI GI: 255946247 Blast Desc: Pc20g14130 [Penicillium chrysogenum Wisconsin 54-1255] gi|211588626|emb|CAP86742.1| Pc20g14130 [Penicillium chrysogenum Wisconsin 54-1255]
  misc_feature (9)..(435): NCBI GI: 116205892 Blast Desc: conserved [Chaetomium globosum CBS 148.51] gi|88182836|gb|EAQ90304.1| conserved [Chaetomium globosum CBS 148.51]
  misc_feature (10)..(434): NCBI GI: 67541985 Blast Desc: AN7156.2 [Aspergillus nidulans FGSC A4] gi|40742218|gb|EAA61408.1| AN7156.2 [Aspergillus nidulans FGSC A4] gi|259483513|tpe|CBF78965.1| TPA: NAD binding Rossmann fold
  misc_feature (10)..(435): NCBI GI: 119501665 Blast Desc: NAD-binding Rossmann fold oxidoreductase family protein [Neosartorya fischeri NRRL 181] gi|119415755|gb|EAW25692.1| NAD-binding Rossmann fold family NRRL
  misc_feature (10)..(434): NCBI GI: 115396360 Blast Desc: conserved [Aspergillus terreus NIH2624] gi|114193388|gb|EAU35088.1| conserved [Aspergillus terreus NIH2624]
MTSLLAPNKKRYAIVGTGGRAIFFYTAIASQYATTSCIVGICDTNETRMKYANSKLESLGHGAVPTFLASDFEKMISETKPDEVIVTTIDRTHNIYIVKALELGCNVIAEKPMTIDAPRCNEIFNAVERTTKNVRVTFNYRYAPHNTKVFEILRSGAIGKVTSVHFEWMLNTSHGADYFRRWHRDKRNSGGLLVHKSTHHFDLVNFWLQTRPSTVYAQGDLKFYGRENAERRGETRFYTRAHDSEVAKTDPFALHLEKHPQLKAMYLDAEHEDAYYRDQSVFGDGISIEDTMNLLVRYKNGAVLTYSLTAYAPWEGFRVSFNGTGGRLEMEVVENSYVNSGGDQAAEGSLEKRTILLRRLFEKPEEIEIDDDAAGAHGGGDAVLLNDLFGEPMSDEYMRAASHVDGALSILTGIAANKSMATGQVVNVDDILRVP

SEQ ID NO: 4540 - DNA, 439 bp, Muscodor strobelii
  misc_feature: SGI EST ID NO. CUFF.11536.0
  misc_feature: Variant of the nucleotide sequence at SEQ ID NO 4538
tccgtcgctggcatcgggacaagcgcaacagcgggggattgctggtccacaagagcacacaccactttgaccttgtgaatttctggctacagacaaggccatcaacagtctacgcacaaggcgatctcaaattctacgggcgagagaatgcagagcgacgtggagagacgagattctacacgcgggcgcacgacagcgaagtggccaagacggacccatttgctctacacctcgaaaagcacccacagctcaaagccatgtatctcgatgcggaacacgaggatgcctactatcgcgaccagagcgtgtttggagatggcatcagcatagaggatacgatgaacttacttgtgcgctacaagaacggtgctgtgctgacgtactcgctaacggcgtacgcgccgtgggaagggttccgagtcagcttcaacggaacggg

SEQ ID NO: 4541 - DNA, 1020 bp, Muscodor strobelii
  misc_feature: SGI cDNA ID NO. 561207
  misc_feature: Reduced expression when VOC is produced
  misc_feature: Encodes the peptide sequence at SEQ ID NO 4542
atgtgggccagatcggcaatccgggttgctcagcccttgaagcgcagcctcgtctcgacgcccgcccgtcactacgccacggaaccaacatcggcaaagggcggctccaactcggtcgcatacgccgccgccgctgctctcggcctcggcggtgtcggctactacctgctcaactctcagtccgaagccaagatcgccgacaaggccagggatgccctcgccaaggccgcctcgcccccgaaggagaccttcaccggcggcgaccagggcttcgtctccctcctcctgaaggacgtccagatcgtcaacagcaacaccaagaagttcgtcttcaagctgcccgaggacgacatggtctcgggcctgcacgtcgccagtgctctgctcaccaagtttgttcccgagggcgagaagcccgtgttgcggccctacacccccacgagcgacgaagagacccgcggctacatcgagctcatcgtcaagaaataccccgacggccccatgtcgacgcacctccacgacatggtccccggccagcggctcgacttcaagggccccctccccaagtacgcctggcaggccaacaagcacgaccacgtcgccctgctggccggcggcaccggcatcacccccatgtaccagttgatccgcgccatcttcaacaaccccgacgacaagaccaaggtcaccctcgtcttcggcaacgtcaccgagcaggacatcctcctcaagaaggagctcgcccacctcgagaacacctacccccagcggttccgcgccttctacgtcctcgacagccccccgaaggagtgggtcggcaacacgggctacatcaccaaggacctgttgaagacggtgctccccgaacccaaagacggcaacatcaaggtcttcgtctgcggacccccgggtctctacaaggccatctccggccccaaggtcagccccaaggaccagggcgagctgacgggcatcctcgaggaactgggctactccaaggatcaggtctacaagttttga

SEQ ID NO: 4542 - protein, 339 aa, Muscodor strobelii
  misc_feature: SGI Peptide ID NO. 561207
  misc_feature (93)..(192): Pfam Id: PF00970 Pfam Desc: Oxidoreductase FAD-binding domain
  misc_feature (201)..(311): Pfam Id: PF00175 Pfam Desc: Oxidoreductase NAD-binding domain
  misc_feature (197)..(232): Pfam Id: PF08030 Pfam Desc: Ferric reductase NAD binding domain
  misc_feature (1)..(339): NCBI GI: 39943256 Blast Desc: MGG_03708 [Magnaporthe grisea 70-15] gi|187609626|sp|A4QR21.1|MCR1_MAGGR RecName: Full=NADH-cytochrome b5 reductase 2; AltName: Full=Mitochondrial cytochrome b grisea
  misc_feature (1)..(339): NCBI GI: 46108088 Blast Desc: FG00926.1 [Gibberella zeae PH-1]
  misc_feature (1)..(339): NCBI GI: 256735402 Blast Desc: [Nectria haematococca mpVI 77-13-4]
  misc_feature (1)..(339): NCBI GI: 154297211 Blast Desc: NADH-cytochrome b5 reductase [Botryotinia fuckeliana B05.10] gi|187609606|sp|A6SI59.1|MCR1_BOTFB RecName: Full=NADH-cytochrome b5 reductase 2; AltName: Full=Mitochondrial
  misc_feature (4)..(339): NCBI GI: 85115987 Blast Desc: NCU03112 [Neurospora crassa OR74A] gi|74618548|sp|Q7SFY2.1|MCR1_NEUCR RecName: Full=NADH-cytochrome b5 reductase 2; AltName: Full=Mitochondrial cytochrome b NCU03112
  misc_feature (1)..(339): NCBI GI: 156054168 Blast Desc: SS1G_05932 [Sclerotinia sclerotiorum 1980] gi|187609653|sp|A7EKT5.1|MCR1_SCLS1 RecName: Full=NADH-cytochrome b5 reductase 2; AltName: Full=Mitochondrial cytochrome b 1980]
  misc_feature (12)..(339): NCBI GI: 116180448 Blast Desc: CHGG_00852 [Chaetomium globosum CBS 148.51] gi|121791707|sp|Q2HG02.1|MCR1_CHAGB RecName: Full=NADH-cytochrome b5 reductase 2; AltName: Full=Mitochondrial cytochrome b globosum
  misc_feature (1)..(339): NCBI GI: 67516301 Blast Desc: AN0432.2 [Aspergillus nidulans FGSC A4] gi|74598976|sp|Q5BG98.1|MCR1_EMENI RecName: Full=NADH-cytochrome b5 reductase 2; AltName: Full=Mitochondrial cytochrome b AN0432.2
  misc_feature (1)..(339): NCBI GI: 261355251 Blast Desc: NADH-cytochrome b5 reductase [Verticillium albo-atrum VaMs.102]
  misc_feature (3)..(339): NCBI GI: 171687773 Blast Desc: protein product [Podospora anserina] gi|170943848|emb|CAP69500.1| protein product [Podospora anserina]
  misc_feature (4)..(339): SWISSPROT Homolog: EC 1.6.2.2 Cytochrome-b5 reductase
  misc_feature: Useful for introducing or modulating the production of volatile compounds
MWARSAIRVAQPLKRSLVSTPARHYATEPTSAKGGSNSVAYAAAAALGLGGVGYYLLNSQSEAKIADKARDALAKAASPPKETFTGGDQGFVSLLLKDVQIVNSNTKKFVFKLPEDDMVSGLHVASALLTKFVPEGEKPVLRPYTPTSDEETRGYIELIVKKYPDGPMSTHLHDMVPGQRLDFKGPLPKYAWQANKHDHVALLAGGTGITPMYQLIRAIFNNPDDKTKVTLVFGNVTEQDILLKKELAHLENTYPQRFRAFYVLDSPPKEWVGNTGYITKDLLKTVLPEPKDGNIKVFVCGPPGLYKAISGPKVSPKDQGELTGILEELGYSKDQVYKF

SEQ ID NO: 4543 - DNA, 3607 bp, Muscodor strobelii
  misc_feature: SGI EST ID NO. CUFF.11747.0
  misc_feature: Variant of the nucleotide sequence at SEQ ID NO 4541
agctgttttctgtctcccgcgacgtcaatcctttgccagccgctctctcacttccgacgtaatccgtatcttccgtatttccaagtgttgaaccttcattctctcaacagcaacaaagagacgctcttttctattcatttccgactccaattgcggccccttctgcttcacaccctcccaaaaaccatcatgtgggccagatcggcaatccgggttgctcagcccttgaagcgcagcctcgtctcgacgcccgcccgtcactacgccacggaaccaacatcggcaaagggcggctccaactcggtcgcatacgccgccgccgctgctctcggcctcggcggtgtcggctactacctgctcaactctcagtccgaagccaagatcgccgacaaggccagggatgccctcgccaaggccgcctcgcccccgaaggagaccttcaccggcggcgaccagggcttcgtctccctcctcctgaaggacgtccagatcgtcaacagcaacaccaagaagttcgtcttcaagctgcccgaggacgacatggtctcgggcctgcacgtcgccagtgctctgctcaccaagtttgttcccgagggcgagaagcccgtgttgcggccctacacccccacgagcgacgaagagacccgcggctacatcgagctcatcgtcaagaaataccccgacggccccatgtcgacgcacctccacgacatggtccccggccagcggctcgacttcaagggccccctccccaagtacgcctggcaggccaacaagcacgaccacgtcgccctgctggccggcggcaccggcatcacccccatgtaccagttgatccgcgccatcttcaacaaccccgacgacaagaccaaggtcaccctcgtcttcggcaacgtcaccgagcaggacatcctcctcaagaaggagctcgcccacctcgagaacacctacccccagcggttccgcgccttctacgtcctcgacagccccccgaaggagtgggtcggcaacacgggctacatcaccaaggacctgttgaagacggtgctccccgaacccaaagacggcaacatcaaggtcttcgtctgcggacccccgggtctctacaaggccatctccggccccaaggtcagccccaaggaccagggcgagctgacgggcatcctcgaggaactgggctactccaaggatcaggtctacaagttttgatcgcgctgtgtacacggttcatgtataatgagcagatatctgggcacttagatgcgatatgatgggatgccattgccattgccattgccattgccattgccattgccattgcgatagacggcggcgcacatagattcaagctttccagcatctcctaaacgaatcaccaagaacaattcatttgacaaaacgtcccactgtctgaccatcctgttactctgtcaatcggcgcaattttgaaacatgtctaatcaggccacttcaagtcttcgttgactaggtgcacggcaacgcaaatcgtgaaatatcgagggtagagcccaatcggattctcaagaatgctcatgtatcatcacgccttgccagcaacaaccccgattggctcaaaatagtaaaaagttgaattcatgcacgcaatcgtcaataggtagactcatgtaggcaggactaggcgtctttgcaggcagaccgaccggccgaccaaccgaccgacagacagacggtagacgcttttaaccggcatacagatcagtgaccactctccgccccgcaagcgagcatccaatccaactcccgcctcgcttcgctatttaaagtcacatagcacatcctaatattatcgcctaaacttctcgtgcatctccggtcgcgcgtgcgcgtgttcctggcatttccatctcggtggtttggagccgcgtcaaatccatgcatgcacaacccaaactacccggatatccgagtgcctgtcccgcccgaatttatgggccgaagggagcgaggatatttaaacgatgggcatttccattacgtttcgtttcagccatgaccccggactctggagtctttgtgtatacacgatgtcgaggaccggctacggcggcctgtagacgccacatcgagactcggcttattttgtgatatctcacagtaccgctactctgtctacattgggcctgacatcttgaaggatgaaaggggactaacggatgcgattcgagcgcttgacgaagcagagcatgcgtgtattgggattgatgtgcgtctacggattacatggcaacgggacgtcccggctcggcttctcccatttagaatgttccacgtctgaaaatagcttctatcccgatgtttctttttttcattggactatcgatctattgcctcatgtctctaggttatggcgccagttcatcctatagtgaggacgcgtctctgtcacaaggccctccgtgctctgcgagtctccggcacctttctttttccttaggtctatgatcatggttgctgatgccaacatgaagactacgatatgctttctgtcatggacttatcattatttgcccaatccaccccaaccaaggatagaaaacaacaattatcacactcgctggccacccctaagtctatggctggcccaaatcctaaccgtgacccctagccatagcctgcagtatttgcagtattcccggccagcaacagatacttcgacttgatataccagtacactaaccaccctgaccctaacctttttccccattccctggccctgactctagccctaacccaaatcctaaccgctaacccgaatcctaaccacggaccctacgcaatctcgaaattcggatctcgggtgtcggggttcaggttgatttcttagccaaagctcaaccagcaggatgggtacaatagatgcgactcagtgtgtatagcgagcagaaaaaggcaagacgcccaagccggccctaaaccatttctttattgatggctattcgataggactttgtattgagtcgtagagatatctgtatcctcgacatcgatagcaatatgatactttcgaacctcgtaatgaatactcaagtgctaaatggaaaggcggttgaaattaaagatggcacagtctcactagcgccggctctgacgcaactcacacgtttttctctgttttagctgctcgttcaacggtaggatccgagggcttggtcagagtttagcgcatgtcgcccgattcagggggtgatcgacagggctcagtgtcgtttggtacacgatcatgtgaaagagacgagagggattgcgataatcgccatttctagataattgtatgctactcagcgacatcagaaattgtagtatagacgacaagagcctcatcgtcatcaaatttctttccaccacgactgacgatacgcattgtccacttcatccgggtcttgcggacggtcaaggcggctcgcgtggacttcatattacggaatgtcatactcgtaatgatcggttgaactatttgacctggtcggctggtcgcagatggatagaaaatcatctaatagcatcatttcacgtccagtctcgttgatagtatgtcgtattggagccgaggcatcgtggatctaca

SEQ ID NO: 4544 - DNA, 1815 bp, Muscodor strobelii
  misc_feature: SGI cDNA ID NO. 561208
  misc_feature: Reduced expression when VOC is produced
  misc_feature: Encodes the peptide sequence at SEQ ID NO 4545
atggagaatccagacaagcaaagagagaagacgtcgcctcagaagcgcagacgtggtcaggcacctcctcgcacatttcgagagtacttctttcactctctacccgaatattcaggtccctacagcgtcggaaccatggaaatggagatcccagctcgagacccacgcacattctctcacatcaagaggaatcatgagcatatcctacgaatggacactgtcctcctccagatctactatccctgcgatctttcatcgtactccctcctatcggggttgaagaagaagccttcccgtcccacgtggttgcccaggcctcgtgtagcgacatgccacggatttgccaagttcttgaacatcccgcatctgccagtgactgggtatctcgcggcgactaccatgtttacaaagttgccagcttttcgaaatgccaagcttgcccagtctcatcccgatcaacctgtgcaagctgcggcgccacctacaggaacgggaggtacagcggcaggtagcacaatgacaggaggcacagcgacaggaagtgaagagactttgacatccgacgagacgccggatagcccaccgttccccgtcgtcatgtttagtcacgggcttggaggatctcgcacgtattgttccaccgtctgtggtgagatggccagcaatggattcatcgtagtcgcagttgaacaccgtgatggcagtggtgctcgatcttttgtgaatctccctcctcgcggcgatacacccgaagcacatgatacagctgtgattgatgacagtcgctcttacaaagtggattacattttcccagaagacaatgcgcaagatacgtcaccaaataatgctaagggcgttgacaccgaacttaggaacgcccagatcgagatgcgactagctgaaatcgaagaggcatatcatgttctgggtctcatcaatgatggtcatgcacaattggtctacgatgccaacctgaggaagaaaggcaacatcgggtcaagctcaaagggtctggaggatatcgattggtcagattggaaaggtagactacttttatcgaatgtcaccgccatgggtcattcttttggtgccgcaacaactgtgcagatctcacgcgagaaagatcggtttccctgggtcgggcagggtattctactagatgcatggggtcccgcgacgcccgtgctgggagaggcgacgaaagaggcacttcgcaaaccaatcctcgccatcaattccgaagccttcatgcactggcctgacaacttcacacggatgactgctatctgtagagaggcgaggagtaacgatgctccctgctggatgatgacgatcaaaggagcaactcacttgtcccagacagatttcgccatcctatatccacgatggatgtccctcctcggcaagacactggtcaacccgagacgagctgtagaattgactgtgaactcgtctctggagttcctcaagaagattctaccctctgggcagatacacggagcaaacagttggccagacgagggcatactagacaccaagactctgatctccaaagaagtgcccgctggatacagaccatccaagaaatggatcggtgctcgtctcagaatacctcacgagtttcgtctacgggtgatgcgcttctttcgcaagccaaagacgagtgtaccgacggatatagaggggaagccattgcgaggggttgtggactttgcgcggggtgatgaggtttggatgcattgtagtccgaatcatcaagaagacttggatcgctctgaaatggtgcagtcaacgacgacgacgacgacgggctga

SEQ ID NO: 4545 - protein, 604 aa, Muscodor strobelii
  misc_feature: SGI Peptide ID NO. 561208
  misc_feature (29)..(509): Pfam Id: PF03403 Pfam Desc: Platelet-activating factor acetylhydrolase, plasma/intracellular isoform II
  misc_feature (196)..(235): Pfam Id: PF03403 Pfam Desc: Platelet-activating factor acetylhydrolase, plasma/intracellular isoform II
  misc_feature (340)..(491): Pfam Id: PF03403 Pfam Desc: Platelet-activating factor acetylhydrolase, plasma/intracellular isoform II
  misc_feature (26)..(591): NCBI GI: 171695970 Blast Desc: protein product [Podospora anserina] gi|170948227|emb|CAP60391.1| protein product [Podospora anserina]
  misc_feature (18)..(592): NCBI GI: 164424213 Blast Desc: NCU07476 [Neurospora crassa OR74A] gi|157070422|gb|EAA34534.2| [Neurospora crassa OR74A]
  misc_feature (22)..(585): NCBI GI: 116180848 Blast Desc: CHGG_01052 [Chaetomium globosum CBS 148.51] gi|88185349|gb|EAQ92817.1| CHGG_01052 [Chaetomium globosum CBS 148.51]
  misc_feature (22)..(587): NCBI GI: 156054668 Blast Desc: SS1G_06182 [Sclerotinia sclerotiorum 1980] gi|154703962|gb|EDO03701.1| SS1G_06182 [Sclerotinia sclerotiorum 1980]
  misc_feature (22)..(587): NCBI GI: 154296382 Blast Desc: BC1G_13017 [Botryotinia fuckeliana B05.10] gi|150843378|gb|EDN18571.1| BC1G_13017 [Botryotinia fuckeliana B05.10]
  misc_feature (13)..(586): NCBI GI: 189197169 Blast Desc: conserved [Pyrenophora tritici-repentis Pt-1C-BFP] gi|187980870|gb|EDU47496.1| conserved [Pyrenophora tritici-repentis Pt-1C-BFP]
  misc_feature (108)..(536): NCBI GI: 169616696 Blast Desc: SNOG_11523 [Phaeosphaeria nodorum SN15] gi|160703241|gb|EAT81231.2| SNOG_11523 [Phaeosphaeria nodorum SN15]
  misc_feature (34)..(462): NCBI GI: 164660889 Blast Desc: MGL_0835 [Malassezia globosa CBS 7966] gi|159105468|gb|EDP44353.1| MGL_0835 [Malassezia globosa CBS 7966]
  misc_feature (194)..(480): NCBI GI: 71003199 Blast Desc: UM00133.1 [Ustilago maydis 521] gi|46096285|gb|EAK81518.1| UM00133.1 [Ustilago maydis 521]
  misc_feature (36)..(513): NCBI GI: 67537978 Blast Desc: AN5159.2 [Aspergillus nidulans FGSC A4] gi|40743150|gb|EAA62340.1| AN5159.2 [Aspergillus nidulans FGSC A4] gi|259484612|tpe|CBF80984.1| TPA: conserved [Aspergillus FGSC
  misc_feature: Useful for introducing or modulating the production of volatile compounds
MENPDKQREKTSPQKRRRGQAPPRTFREYFFHSLPEYSGPYSVGTMEMEIPARDPRTFSHIKRNHEHILRMDTVLLQIYYPCDLSSYSLLSGLKKKPSRPTWLPRPRVATCHGFAKFLNIPHLPVTGYLAATTMFTKLPAFRNAKLAQSHPDQPVQAAAPPTGTGGTAAGSTMTGGTATGSEETLTSDETPDSPPFPVVMFSHGLGGSRTYCSTVCGEMASNGFIVVAVEHRDGSGARSFVNLPPRGDTPEAHDTAVIDDSRSYKVDYIFPEDNAQDTSPNNAKGVDTELRNAQIEMRLAEIEEAYHVLGLINDGHAQLVYDANLRKKGNIGSSSKGLEDIDWSDWKGRLLLSNVTAMGHSFGAATTVQISREKDRFPWVGQGILLDAWGPATPVLGEATKEALRKPILAINSEAFMHWPDNFTRMTAICREARSNDAPCWMMTIKGATHLSQTDFAILYPRWMSLLGKTLVNPRRAVELTVNSSLEFLKKILPSGQIHGANSWPDEGILDTKTLISKEVPAGYRPSKKWIGARLRIPHEFRLRVMRFFRKPKTSVPTDIEGKPLRGVVDFARGDEVWMHCSPNHQEDLDRSEMVQSTTTTTTG

SEQ ID NO: 4546 - DNA, 3498 bp, Muscodor strobelii
  misc_feature: SGI EST ID NO. CUFF.11542.0
  misc_feature: Variant of the nucleotide sequence at SEQ ID NO 4544
ctttcgtctaaatctcgtattctagcgattgaaacctgtcttgagttgtgcgtctgtcgattgcatgtctcagttcctatgcccagagaagaattgccattgccctaacccacacaacacacccaaccgtcaagatggagaatccagacaagcaaagagagaagacgtcgcctcagaagcgcagacgtggtcaggcacctcctcgcacatttcgagagtacttctttcactctctacccgaatattcaggtccctacagcgtcggaaccatggaaatggagatcccagctcgagacccacgcacattctctcacatcaagaggaatcatgagcatatcctacgaatggacactgtcctcctccagatctactatccctgcgatctttcatcgtactccctcctatcggggttgaagaagaagccttcccgtcccacgtggttgcccaggcctcgtgtagcgacatgccacggatttgccaagttcttgaacatcccgcatctgccagtgactgggtatctcgcggcgactaccatgtttacaaagttgccagcttttcgaaatgccaagcttgcccagtctcatcccgatcaacctgtgcaagctgcggcgccacctacaggaacgggaggtacagcggcaggtagcacaatgacaggaggcacagcgacaggaagtgaagagactttgacatccgacgagacgccggatagcccaccgttccccgtcgtcatgtttagtcacgggcttggaggatctcgcacgtattgttccaccgtctgtggtgagatggccagcaatggattcatcgtagtcgcagttgaacaccgtgatggcagtggtgctcgatcttttgtgaatctccctcctcgcggcgatacacccgaagcacatgatacagctgtgattgatgacagtcgctcttacaaagtggattacattttcccagaagacaatgcgcaagatacgtcaccaaataatgctaagggcgttgacaccgaacttaggaacgcccagatcgagatgcgactagctgaaatcgaagaggcatatcatgttctgggtctcatcaatgatggtcatgcacaattggtctacgatgccaacctgaggaagaaaggcaacatcgggtcaagctcaaagggtctggaggatatcgattggtcagattggaaaggtagactacttttatcgaatgtcaccgccatgggtcattcttttggtgccgcaacaactgtgcagatctcacgcgagaaagatcggtttccctgggtcgggcagggtattctactagatgcatggggtcccgcgacgcccgtgctgggagaggcgacgaaagaggcacttcgcaaaccaatcctcgccatcaattccgaagccttcatgcactggcctgacaacttcacacggatgactgctatctgtagagaggcgaggagtaacgatgctccctgctggatgatgacgatcaaaggagcaactcacttgtcccagacagatttcgccatcctatatccacgatggatgtccctcctcggcaagacactggtcaacccgagacgagctgtagaattgactgtgaactcgtctctggagttcctcaagaagattctaccctctgggcagatacacggagcaaacagttggccagacgagggcatactagacaccaagactctgatctccaaagaagtgcccgctggatacagaccatccaagaaatggatcggtgctcgtctcagaatacctcacgagtttcgtctacgggtgatgcgcttctttcgcaagccaaagacgagtgtaccgacggatatagaggggaagccattgcgaggggttgtggactttgcgcggggtgatgaggtttggatgcattgtagtccgaatcatcaagaagacttggatcgctctgaaatggtgcagtcaacgacgacgacgacgacgggctgaagagaccgagacgatgtatgatgcctcaatgtgtgatgtgtgctgggttcttgtacgactacgatactacgcattgcttttgttcgctcggagtctaggaaataccatttgaatttctgaatactgctctgtacatcgtggcttgagaacgacagccgatagagctctggtttctttggctgacgtgcagacgcacctcgttcacgggatatcgctacaattatcgctacaattacgaggggagagagggagatgacgcgatcacgattcaattcgacgcgacatcaaggtcggaccagaatcaccagatgggtgaggatccagctgctatcgaaattgccgatttttcaggtgatacagattagtcaagaattctggaatattgaacacgttcctggctcgcttcaagggcaatgtgtcaccgccaagacaccgagaatagtcgtttggggacataaggtaggcgagatcgataaagcttcggcaggtcggcgaatgcgtggatgctgcactccggatacccatcgtggcttgatgtaatgccgacggtgcctagctaagtacatgtgcagtcgtgaagttcttcggtatgtcaatatggtggcttctagaatacggatgtcggcaaggcaaggcaaggcaaggaaaggcaaatagactgagatcgggcagaaatggccagaaatagagccatcatttaaaaagcatactcgggatgcggactatacattgctatgctaccggcggcatctcatttcaccctgcatcttgatccagccagatctggcaatcaggtcggcttgcgcgtctttgagtaacccggatgatgtgaacgagagacggcgcgaaaagaaattcccggtctctctcgttaaaatcagctgggttagaggtattgtcccgatctgatgtcgcttgtgtgcatagccagaaccgactagaccaggcgcttgtcgttggggtgacattgcatcgattgcgacggagacgaacgagatcgagggtagcaaaacgtgggctcggcaaggcaaggcggctctacttagtaaagtagctgatttcccagcgctacggtggcgaaataagccgaagttggatgctgcagcgcggctaatatgggtaatatgacgctggcaacatggtgcgatattccccgatccgagcgaggactcgatggcgatgcttgacttggcttggcttggcttggctctggagtgcaggcagggacagactgttcaagtcgaataccgtagaaaatgagaatattatcgggttattcatggtccgaattgacggtgagatgattgacggtcatgtcgatggcatattggagagacacacgtacgtattctacacggcatgggcatcgcgatgaagcagcaagcaacatctggcggtgatgacagtcgagatgcagatgttgaaagtcagacatgtttgattcagctaggagttatgaccagacttgtcccgtcacatcggacagttgaattcatcctcatcttgaattggaaactcgtttagtagtggcacacaagttgaatctcaa

SEQ ID NO: 4547 - DNA, 3594 bp, Muscodor strobelii
  misc_feature: SGI cDNA ID NO. 561209
  misc_feature: Reduced expression when VOC is produced
  misc_feature: Encodes the peptide sequence at SEQ ID NO 4548
atggacaagacgacgagttctgatgttccgggtgcggctgcggctacggctgctggtgcaggtggtggcggtggtcgttcgcgatcggatagctttgttcgcatgttggagctggaaaggctgttcaagatgcaacggttccagcaaaatcatgcctcgctcgacactcccaacataaccggttcgccaaggacatccctcccctcaccttctcctcccccttcccgtcgttttcggcgtatgagcgcccatcctccgctctctcaccagacccagataatgaaagccgtccgtcggagtgctgctctcccgtcgctttctttatcaatcccccttgctccaccggccacggatcccaaaacaatgaggtccaatggtgttgctatcgcagattcttcgagtaaagaagattctctcaagaaatcggtaaccttttcagagccggaagaggacagtgacggtgaaggagccaacctttcggattcttcgtcgatttgtcaatcgcccagttgggaacagtacgggcagaagaaaaagaagaagaaacccaagaaatcagacgatccagcactcaagaagaagggaaaccgattgaccaagatcacgccaattgattctttcgtggccaaacctcttacggcatcagatcgttcacgttcggctgccgagttggatcacctcttcaaatccaatcaggaaaacgtacctccggcgatgattcggtcgcaaagtgccatgacgaagccacccccagcaccacttgcatcggcgccggtcgagatgaatgggaaaccaaagagtaagggattcctttcggggttcaggttccagcatgcaaatgtagctgtaacgcaaaagattgtggagatgcgcaaggccaagacggaacaagacgatgggaccctacgagccatacaatacgagaacacagtgccttcgcagcagccttcgttggtccggccagtggtggtggatacagcgacgtcgaaatcaaagagaccaccctctatcagatctgtcatgaccacctctagtcaatctgtgtcatcacaagagaagcgaaactcggtgactctacattcgatggggcatggccacaatcgctctcaatctctgctgtcgtcaacattgaacaagctcaagggaccgtcatatctctactatcgaccttcagaggacggcactgtcagtgatgcgcatgatgctgagcctgcatcgagcaagcctgtccaggtttcgcacgcaaagggaaaggcagagaaggcgccgaaacagaggaacatggcaggaatcgagcatgcacagcaaccccacgagttttcgttccccctgaagccccgacgagcgaatacagagccaggacctgacattgcgccccgagcacgaccgcctcgcactcgcaaggtggagattcaggagccaaatccgagccaggagaatggggcacctactttgagaccttcaggcaatcggcgagtccagatcgaagttcctgctgttgcacctcgagatgccgtcatggcgaaggtgatggctcaggagaagcagtcgcagaattctcgtgcggcacaacccaccagggcggatgtggagggaatgtaccacaatggtagcagggtgacgggacccgagaacaggcgcccctacatccaaagcatccagagtgacgttcgctaccccacaaatgtaaatgcaaatgcaaatgcacacggcgccgaaatgcgagatgattcgagattgcacccagatccaagggccgtatctagagccggagaccgaagcgagagagtggaagtggcagaaagaggcattcaggacgatgaccaggtttctgtcggcactcacgcatcgacaattcgacctgcgtctcgaacacagaacaaaagacaccagatctccccatataccgacgaaaaacacactcggtggtactcgtcggagatagaagacaccgacgccgacctcaactcgcagcaacaagaacaacatcaggcagtagaccgagtagaccgagaagatccagcagattcagcagaagacctcatcacattcgagcgcgaaagagaaagaccagctgcaatctaccaaccaagtcaattgggatcggaaggaaacgtggactattttgccttcttcagcgattcgtacgaccctccaccgctccaactatcgtcaccaaccgagtcaaccttcagaatccattcgccccccattgcggaagatgtcgaggacgaagaggaggcggttctatcgcagaatacatctgtgcacgttgacggtaggggacatgcagaaacacacgatttggcgagagacaagccttctgggatgcgcccacaacccaaggctacaactaggatttctcgtgagcacaaggcgaaggggtcgcccggtatctcggctcagcactccgatagcgatgtaccggcgtttgaacggctcgggctgtctaccaaggcagctaggatcttggcgggtgtcgaaactgacagtacgtcaacagctccatctcagacgacagatccgagccacacgacttcagaaaggtcttcttcatccacgtgtgacgatgcaccgccatccatatcccccgctacgacgccagatagctctcgaccacagtcacggagaggacaggcggactctcagcccgatgcatcacagatcacgctggtaggatccgcattgagcagaaacgataagcccgacaaggctgcgcgtcgacggttcaaggggcccttcattgagaccgctccgaggcttgaccatcacaaggaaggggcggaaagtcgggattggaataacgtcgccgtcccagtcgacctggcagccccgccaacacccacatacatcaagacagagggtttgacatccagtccattgcttgtggccaccccgacatcagcacagttcgcggacggtgctggcgtcaaagaatacgacgaatggcagaacggagatgggatgccgacaccgccagcaccagccagagctcactcggctctcgatctgcagtcgacggcgaagacgctgcctcatcccttaaagtcccatcgactgaacctcaagatgaaagaggcgccctcttcagtcagcctcccgaactcaccaccgcccgatgcaaccgacgaggtgttcccacgcaagtcggcgttgaagatgagccggaatcacagcacgaatgccctggaactgtcgagcacggcctcgtcgggggcagcctacctgcaggaagcccggaaggcagtgccgatgccagccacgtcatcgtcgtcgagagccctacgtcctcacttcccgcagaagaattcgtcgacgagcaccaagagcagcgtgtcgtcgaacgggcggacggacccactggcaaagatgctggtagagtgctgcaattgccactttttccatgatatgccgtcgcgggtgtacgagtgcatggcgaaaccggactctgtggtggaggacaagacgctgggtgtgtcggcagccatcacgacgacggtgagatgcccgtggtgtgctcatggcatgacgacgcaatgctgttccgggtatgcggcggtggtgtatctgaaggagaaactgcatgggaagtga

SEQ ID NO: 4548 - protein, 1197 aa, Muscodor strobelii
  misc_feature: SGI Peptide ID NO. 561209
  misc_feature (1094)..(1195): NCBI GI: 171695972 Blast Desc: protein product [Podospora anserina] gi|170948228|emb|CAP60392.1| protein product [Podospora anserina]
  misc_feature (1120)..(1195): NCBI GI: 116180852 Blast Desc: CHGG_01054 [Chaetomium globosum CBS 148.51] gi|88185351|gb|EAQ92819.1| CHGG_01054 [Chaetomium globosum CBS 148.51]
  misc_feature (1120)..(1195): NCBI GI: 261355306 Blast Desc: conserved [Verticillium albo-atrum VaMs.102]
  misc_feature (1121)..(1195): NCBI GI: 39943098 Blast Desc: MGG_03629 [Magnaporthe grisea 70-15] gi|145009786|gb|EDJ94442.1| MGG_03629 [Magnaporthe grisea 70-15]
  misc_feature (1065)..(1195): NCBI GI: 156054670 Blast Desc: SS1G_06183 [Sclerotinia sclerotiorum 1980] gi|154703963|gb|EDO03702.1| SS1G_06183 [Sclerotinia sclerotiorum 1980]
  misc_feature (1120)..(1195): NCBI GI: 85111095 Blast Desc: NCU07477 [Neurospora crassa OR74A] gi|28925501|gb|EAA34535.1| [Neurospora crassa OR74A]
  misc_feature (1119)..(1195): NCBI GI: 256734901 Blast Desc: NECHADRAFT_99027 [Nectria haematococca mpVI 77-13-4]
  misc_feature (1119)..(1195): NCBI GI: 46120538 Blast Desc: FG04916.1 [Gibberella zeae PH-1]
  misc_feature (1075)..(1165): NCBI GI: 154296386 Blast Desc: BC1G_13019 [Botryotinia fuckeliana B05.10] gi|150843380|gb|EDN18573.1| BC1G_13019 [Botryotinia fuckeliana B05.10]
  misc_feature (28)..(182): NCBI GI: 116180852 Blast Desc: CHGG_01054 [Chaetomium globosum CBS 148.51] gi|88185351|gb|EAQ92819.1| CHGG_01054 [Chaetomium globosum CBS 148.51]
  misc_feature: Useful for introducing or modulating the production of volatile compounds
MDKTTSSDVPGAAAATAAGAGGGGGRSRSDSFVRMLELERLFKMQRFQQNHASLDTPNITGSPRTSLPSPSPPPSRRFRRMSAHPPLSHQTQIMKAVRRSAALPSLSLSIPLAPPATDPKTMRSNGVAIADSSSKEDSLKKSVTFSEPEEDSDGEGANLSDSSSICQSPSWEQYGQKKKKKKPKKSDDPALKKKGNRLTKITPIDSFVAKPLTASDRSRSAAELDHLFKSNQENVPPAMIRSQSAMTKPPPAPLASAPVEMNGKPKSKGFLSGFRFQHANVAVTQKIVEMRKAKTEQDDGTLRAIQYENTVPSQQPSLVRPVVVDTATSKSKRPPSIRSVMTTSSQSVSSQEKRNSVTLHSMGHGHNRSQSLLSSTLNKLKGPSYLYYRPSEDGTVSDAHDAEPASSKPVQVSHAKGKAEKAPKQRNMAGIEHAQQPHEFSFPLKPRRANTEPGPDIAPRARPPRTRKVEIQEPNPSQENGAPTLRPSGNRRVQIEVPAVAPRDAVMAKVMAQEKQSQNSRAAQPTRADVEGMYHNGSRVTGPENRRPYIQSIQSDVRYPTNVNANANAHGAEMRDDSRLHPDPRAVSRAGDRSERVEVAERGIQDDDQVSVGTHASTIRPASRTQNKRHQISPYTDEKHTRWYSSEIEDTDADLNSQQQEQHQAVDRVDREDPADSAEDLITFERERERPAAIYQPSQLGSEGNVDYFAFFSDSYDPPPLQLSSPTESTFRIHSPPIAEDVEDEEEAVLSQNTSVHVDGRGHAETHDLARDKPSGMRPQPKATTRISREHKAKGSPGISAQHSDSDVPAFERLGLSTKAARILAGVETDSTSTAPSQTTDPSHTTSERSSSSTCDDAPPSISPATTPDSSRPQSRRGQADSQPDASQITLVGSALSRNDKPDKAARRRFKGPFIETAPRLDHHKEGAESRDWNNVAVPVDLAAPPTPTYIKTEGLTSSPLLVATPTSAQFADGAGVKEYDEWQNGDGMPTPPAPARAHSALDLQSTAKTLPHPLKSHRLNLKMKEAPSSVSLPNSPPPDATDEVFPRKSALKMSRNHSTNALELSSTASSGAAYLQEARKAVPMPATSSSSRALRPHFPQKNSSTSTKSSVSSNGRTDPLAKMLVECCNCHFFHDMPSRVYECMAKPDSVVEDKTLGVSAAITTTVRCPWCAHGMTTQCCSGYAAVVYLKEKLHGK

SEQ ID NO: 4549 - DNA, 6145 bp, Muscodor strobelii
  misc_feature: SGI EST ID NO. CUFF.11629.0
  misc_feature: Variant of the nucleotide sequence at SEQ ID NO 4547
gttttcttcttcttcgagatgccaaatatacatcttctgaggcgcattctgcatgtcgctacgtggtcgaacagacaggtgcccttttgtcgtattgtcgtattggggtctcggagaatgaacgaaagcaaaaacgacaagagtgcccttgcatctgcgaccccaataaatccatgtccccgcatctcatgtttctcgcctcgtattgacacctttttttggacagcgcagcttgcgcctctctctattgttcagctcactgactatccgatattgtgactagaacggggattgacatgatatttgcaaacgacagctttccgcccacgctcacgccgactaggaacgaggactgatgcactgctatgccaacttcagacgatagactgataaagtcagagcagtgagcgtactgtagctagcaataggcagacgggcaatcattcattcagccacagttcctgatccgataggtacacatgtagtcacaaatacaatagtcatgagccacgtgcatttttagagggcccaattgtaggcgatggcgatcatggtgatgcctgcttgcgtcgtacattgggtcgaggcaaagtgcacgtcgtgttatccctcgtggccgcagtcaaaggtaaggtacctgtagctcgtacaatgcgaaatcattcgtcacttccgtcgcgaagaccaaagtttgctgttgcagcagcgcgccacgacgaaaaagtcacgaacactgcttcgcccgcctcttttcgcctgtactgtaccttagccttggcttcatttctcccatcacccattcaccacatttctgacttgtagtatttgatcatctgaatgttggaatgaatgaatgaatgtcgttcgctacctgttgattaatccccattttctctctcttttcacctcaagtttcctggtgttcgtttctgttgttttccctcaacctacatacatgccttaggtaccgacttaccgacgttaatgtccaccgcgtcctgtcttgcgaatttgttttccaacagcaaacggcacaacaacaacacgacaacatccccacactcgcttatacgcccattcacgatgaagccatgactgacagactgattttttgatccggtcattcgtcgctgtcggtggataatcacacatctcaggttcacgacctataatcaccagtcgactctgcctgctcgtctttcttaccattctgcgcattgcgcattgcccattcccgctccgcctttctgtcactctgtcgtttcgttcgttgtgtgcaggtactccgactctataatataccgagcgcaacaacgtattgcattgaagatcactacccaaaacaagtaccgccctcaagagtttggccactgccttaattgacaatcccagctggatccctggagaaactctatactcactccttcccggccgtacggacgtccaaggtcgtgcgaagttttgcgagacatttgtgtttctttgttccagacgtataccgcaccacacgacactacacagacagtacagacactcagaaaatacagtagacggtacagcagacggtaccgattcgactacctcagctacatgaccttggtctgtcgcgataatattgtacatcgatcgatttggggaggttcagttacagcgcatctggtaggggtcatcagatcccagcccgctctggctaacgggcacccggccctgcatccccaatccccatctcactgcaacggtaccggcaacggcaatcctcagtaatgggccagacacatcacgacaacgactatagcgactataacgacctggatgacctaatttaatatcaatattcctctactgcaatactgcaacttgacgcgtcatcggcaaatatggacaagacgacgagttctgatgttccgggtgcggctgcggctacggctgctggtgcaggtggtggcggtggtcgttcgcgatcggatagctttgttcgcatgttggagctggaaaggctgttcaagatgcaacggttccagcaaaatcatgcctcgctcgacactcccaacataaccggttcgccaaggacatccctcccctcaccttctcctcccccttcccgtcgttttcggcgtatgagcgcccatcctccgctctctcaccagacccagataatgaaagccgtccgtcggagtgctgctctcccgtcgctttctttatcaatcccccttgctccaccggccacggatcccaaaacaatgaggtccaatggtgttgctatcgcagattcttcgagtaaagaagattctctcaagaaatcggtaaccttttcagagccggaagaggacagtgacggtgaaggagccaacctttcggattcttcgtcgatttgtcaatcgcccagttgggaacagtacgggcagaagaaaaagaagaagaaacccaagaaatcagacgatccagcactcaagaagaagggaaaccgattgaccaagatcacgccaattgattctttcgtggccaaacctcttacggcatcagatcgttcacgttcggctgccgagttggatcacctcttcaaatccaatcaggaaaacgtacctccggcgatgattcggtcgcaaagtgccatgacgaagccacccccagcaccacttgcatcggcgccggtcgagatgaatgggaaaccaaagagtaagggattcctttcggggttcaggttccagcatgcaaatgtagctgtaacgcaaaagattgtggagatgcgcaaggccaagacggaacaagacgatgggaccctacgagccatacaatacgagaacacagtgccttcgcagcagccttcgttggtccggccagtggtggtggatacagcgacgtcgaaatcaaagagaccaccctctatcagatctgtcatgaccacctctagtcaatctgtgtcatcacaagagaagcgaaactcggtgactctacattcgatggggcatggccacaatcgctctcaatctctgctgtcgtcaacattgaacaagctcaagggaccgtcatatctctactatcgaccttcagaggacggcactgtcagtgatgcgcatgatgctgagcctgcatcgagcaagcctgtccaggtttcgcacgcaaagggaaaggcagagaaggcgccgaaacagaggaacatggcaggaatcgagcatgcacagcaaccccacgagttttcgttccccctgaagccccgacgagcgaatacagagccaggacctgacattgcgccccgagcacgaccgcctcgcactcgcaaggtggagattcaggagccaaatccgagccaggagaatggggcacctactttgagaccttcaggcaatcggcgagtccagatcgaagttcctgctgttgcacctcgagatgccgtcatggcgaaggtgatggctcaggagaagcagtcgcagaattctcgtgcggcacaacccaccagggcggatgtggagggaatgtaccacaatggtagcagggtgacgggacccgagaacaggcgcccctacatccaaagcatccagagtgacgttcgctaccccacaaatgtaaatgcaaatgcaaatgcacacggcgccgaaatgcgagatgattcgagattgcacccagatccaagggccgtatctagagccggagaccgaagcgagagagtggaagtggcagaaagaggcattcaggacgatgaccaggtttctgtcggcactcacgcatcgacaattcgacctgcgtctcgaacacagaacaaaagacaccagatctccccatataccgacgaaaaacacactcggtggtactcgtcggagatagaagacaccgacgccgacctcaactcgcagcaacaagaacaacatcaggcagtagaccgagtagaccgagaagatccagcagattcagcagaagacctcatcacattcgagcgcgaaagagaaagaccagctgcaatctaccaaccaagtcaattgggatcggaaggaaacgtggactattttgccttcttcagcgattcgtacgaccctccaccgctccaactatcgtcaccaaccgagtcaaccttcagaatccattcgccccccattgcggaagatgtcgaggacgaagaggaggcggttctatcgcagaatacatctgtgcacgttgacggtaggggacatgcagaaacacacgatttggcgagagacaagccttctgggatgcgcccacaacccaaggctacaactaggatttctcgtgagcacaaggcgaaggggtcgcccggtatctcggctcagcactccgatagcgatgtaccggcgtttgaacggctcgggctgtctaccaaggcagctaggatcttggcgggtgtcgaaactgacagtacgtcaacagctccatctcagacgacagatccgagccacacgacttcagaaaggtcttcttcatccacgtgtgacgatgcaccgccatccatatcccccgctacgacgccagatagctctcgaccacagtcacggagaggacaggcggactctcagcccgatgcatcacagatcacgctggtaggatccgcattgagcagaaacgataagcccgacaaggctgcgcgtcgacggttcaaggggcccttcattgagaccgctccgaggcttgaccatcacaaggaaggggcggaaagtcgggattggaataacgtcgccgtcccagtcgacctggcagccccgccaacacccacatacatcaagacagagggtttgacatccagtccattgcttgtggccaccccgacatcagcacagttcgcggacggtgctggcgtcaaagaatacgacgaatggcagaacggagatgggatgccgacaccgccagcaccagccagagctcactcggctctcgatctgcagtcgacggcgaagacgctgcctcatcccttaaagtcccatcgactgaacctcaagatgaaagaggcgccctcttcagtcagcctcccgaactcaccaccgcccgatgcaaccgacgaggtgttcccacgcaagtcggcgttgaagatgagccggaatcacagcacgaatgccctggaactgtcgagcacggcctcgtcgggggcagcctacctgcaggaagcccggaaggcagtgccgatgccagccacgtcatcgtcgtcgagagccctacgtcctcacttcccgcagaagaattcgtcgacgagcaccaagagcagcgtgtcgtcgaacgggcggacggacccactggcaaagatgctggtagagtgctgcaattgccactttttccatgatatgccgtcgcgggtgtacgagtgcatggcgaaaccggactctgtggtggaggacaagacgctgggtgtgtcggcagccatcacgacgacggtgagatgcccgtggtgtgctcatggcatgacgacgcaatgctgttccgggtatgcggcggtggtgtatctgaaggagaaactgcatgggaagtgagagaataggacgctcgaccgatacttagaatctgtacgaaggaggggccatgttcatctctctcgttcgcctgctttctcccgacgctccctacttttttttccccctttgttcaatacattacgagacaggtcacatctgagatgtgtatcatttcccttgtccgttgcatttgatttcgtacattggcatcaggagttggggagacattcgagggtaaaagagacccaaaaagcactgcatggttgtgtttggtggtatttgcgtatggcatttgagaatgatgacgaagatatggggagttggctagagctacgaggcctggtgccgacgaagtggttattgctgatggatgaaaacggaatggtatgagcatattgcatatgtgatggagatgggtgtatgataggatggatgagcagagacaaaatgaaaatgtagatgcttgagttcacagtgctcaactggtagttcgcgtggtgatctgcctattctgtcttcttcatttcatatcatatcgtgtcccctcaagctaatgagaccgttctcaatcgggatggttgctattgagccgacctgcgtatcttagaagtgaacaggcaccatagtacagcggtcatcagagcatatgagattcggagtcgagtccagtgtcgtgcggtgcggtgcggtac

SEQ ID NO: 4550 - DNA, 450 bp, Muscodor strobelii
  misc_feature: SGI cDNA ID NO. 561210
  misc_feature: Encodes the peptide sequence at SEQ ID NO 4551
atgcttagtgggagtcgaactccaattctcagggtcgaaatcccgcctgtaaaactcatgcccgtcaagcgcatctatgcggcacgaacagtacacccagaaagtcctaatgactacgggaagctcgactccgcctatggacaggaagcaccagaaacggcaaggctaccttgctcctctttcatgtccgagcaaatcactagcccgagctcgtacacagatcttgcatctctcaacccatattttgttcatccgcaagatctttcccgtcgattatcactagtacgagattgcgaccgcggacatgaacttcaaaacgagactgctgaagagactgctgaacgtcttgctgaggagttgacttcaacatacaatgcaatcaaagaggaggaggacgagtcattgaagcatcttttggacagcatcaagttagatgagaactatttgtag

SEQ ID NO: 4551 - protein, 149 aa, Muscodor strobelii
  misc_feature: SGI Peptide ID NO. 561210
MLSGSRTPILRVEIPPVKLMPVKRIYAARTVHPESPNDYGKLDSAYGQEAPETARLPCSSFMSEQITSPSSYTDLASLNPYFVHPQDLSRRLSLVRDCDRGHELQNETAEETAERLAEELTSTYNAIKEEEDESLKHLLDSIKLDENYL

SEQ ID NO: 4552 - DNA, 2559 bp, Muscodor strobelii
  misc_feature: SGI cDNA ID NO. 561211
  misc_feature: Encodes the peptide sequence at SEQ ID NO 4553
atggctgcagaaacagattcaagcggagccgctgatcaaccatcagtgagcagaacagagcctcgaagtcaagctgcaaacagcaatgacgattcatctgagcctaagtacaatgattcgggtagcacagataccgccaataaaaatgatagcattctagtctcatcggatacaccaggtgccgaatcttcatcttcgggtactgccgacaaaacgcacagaagagcagacgttctttattgtttgacaactgcagaagaggagggaaagggcgagaagcactactataaggaccagccttggaaaggcgttagcaatggattacctgggtcagaggctagtgaggaagccgatgcagtgatgatatatacggtgccgactatcgtcgaagaaaggacgaaaaaggacggtaatagtgctctgacgtggcgagacgagcccgtcgactttgaactcaaacgggacgctcacctgctcaagacctcaaaaccccggatcactttatggtcgaagagactgatccgtataatggaaaagctgatgaactattacccatctcatctcgggtcctacaactcatacaaatctatcctcgacgacctttttgtcgaaatattgtacttttatccagagatgaaacgttacctgaagacatatgaagacacgatttccgatgaccctgtcaagctagagcgggtggccattggaagctgtggtgacgaaacctattccgatctcctcgaaccgtggctcgactttggagttttggacctgaagactgagccttgcgatgaggcaacagcttacgatcttgctgttttacttcggcttttatcatctatgtaccgagtgaaagttgcgcctacaatgtcttcattattgctggatgccgaaccaagaatcgaatacaatagattgtggatgctgctcaaaccgggaacatatgtttatgttcaggagtcgacttttgcagattccatcatcaaacgtaccgggcgtgacaactcgtattatgacgagaggggtgtagatgatccattcctggaagacagcgaacgtacagggtgggtcgtctcatcctggcagtacaaaaagggcatcccaaaccaaaacctttgggaatatgagcagcccgtagatcatttattccttgaactatggagtgtcgagtttgatgggaaaatgttccagcgaattgcgcgcccggcaatactctttcgcttcgacggttatcgagctgtgcggggtctggaaataatcccagcgcgacttcatgatcgacttgaccatggggtgttaagacggcatctcgagtctcgcggtgagaagtatctcaagatttttagtgagcctgcggcgcatcgagagtatcatcactctcttagcgggtatcatggtcagattatcgtggatcccgtcgcgtttcaccagtacgcatatcaggaggagtacaattatcactatcgtcaccgttcgcgtcggagatttttcccgattgcagatggagacggtggaaagagatttcaaagtattcttgacttcttgccatcaaccagcgaaagctttgaaagaataggcgaagtttatgtccttctgccacgtcgcacgcaaggtcttgggctgaaaacgaagcgctggatgaccttcgaaatcgaccatatcagcaagaaagcccctgactatctggataaccaactcgataatgagctggtgctaatttcagaagacgacaaagccgccttacgcactgtgctaccgaagaacgaacaagtgatcggtgttgcccaagatttcatagcagacaagggcgaaggcaaagtttttctattgtatggcccaccaggaacggggaagacattgactgtagagtgtgtagcgaatgacacgcagcggccattaatcagcttgacagttgcggacattggcgacaattggaaagcagaagcccagctacgaaaatggtttggggttgcggcaaagtggaacgcaattctacttatcgacgaggcggatctgttcctggagcagcgccgcgatggagacgctgcacgcaatgggctagcaacgatcttcttgcgatctatggaatattataaaggcgtgctgtttcttactacaaatcgaccaggtcacatcgacgattcatttatctcccgtatcacttgtccaatatcctacaggccactatcatcagaaacgaaagccaaaatcacgcacaaatttgtgcggaaatttgaaaactcggaaaccattgaggtccagaaacaggcagtcaactatttgatcgaaaactgtcaagatttcaatggtcgtcaaatacggaacatcctccagaacgcagtagcagcagctgaggtccagcaaagattcgaacaacgtgaagttagttcaaaagccaaaagcagcgaagatcttgctttgatcattgtgaaaagacatcatataaagggtgcggtagaacggcagcacgagttccgaacatatctagagggcctcaagggaggacgggatgaaccagctcgagccaagtctcggcaagactatcttagtgtctcgtga

SEQ ID NO: 4553 - protein, 852 aa, Muscodor strobelii
  misc_feature: SGI Peptide ID NO. 561211
  misc_feature (607)..(786): Pfam Id: PF00004 Pfam Desc: ATPase family associated with various cellular activities (AAA)
  misc_feature (28)..(848): NCBI GI: 169623664 Blast Desc: SNOG_15075 [Phaeosphaeria nodorum SN15] gi|111056498|gb|EAT77618.1| SNOG_15075 [Phaeosphaeria nodorum SN15]
  misc_feature (261)..(847): NCBI GI: 156033037 Blast Desc: SS1G_13594 [Sclerotinia sclerotiorum 1980] gi|154698997|gb|EDN98735.1| SS1G_13594 [Sclerotinia sclerotiorum 1980]
  misc_feature (306)..(847): NCBI GI: 154301437 Blast Desc: BC1G_10388 [Botryotinia fuckeliana B05.10] gi|150856128|gb|EDN31320.1| BC1G_10388 [Botryotinia fuckeliana B05.10]
  misc_feature (71)..(798): NCBI GI: 145244845 Blast Desc: An11g07150 [Aspergillus niger] gi|134079383|emb|CAK40765.1| protein product [Aspergillus niger]
  misc_feature (257)..(847): NCBI GI: 212528958 Blast Desc: conserved [Penicillium marneffei ATCC 18224] gi|210074034|gb|EEA28121.1| conserved [Penicillium marneffei ATCC 18224]
  misc_feature (529)..(842): NCBI GI: 46111087 Blast Desc: FG02425.1 [Gibberella zeae PH-1]
  misc_feature (261)..(843): NCBI GI: 189192951 Blast Desc: conserved [Pyrenophora tritici-repentis Pt-1C-BFP] gi|187978378|gb|EDU45004.1| conserved [Pyrenophora tritici-repentis Pt-1C-BFP]
  misc_feature (145)..(784): NCBI GI: 256733807 Blast Desc: NECHADRAFT_77327 [Nectria haematococca mpVI 77-13-4]
  misc_feature (382)..(838): NCBI GI: 256724746 Blast Desc: NECHADRAFT_84360 [Nectria haematococca mpVI 77-13-4]
  misc_feature (382)..(784): NCBI GI: 171690692 Blast Desc: protein product [Podospora anserina] gi|170945294|emb|CAP71406.1| protein product [Podospora anserina]
MAAETDSSGAADQPSVSRTEPRSQAANSNDDSSEPKYNDSGSTDTANKNDSILVSSDTPGAESSSSGTADKTHRRADVLYCLTTAEEEGKGEKHYYKDQPWKGVSNGLPGSEASEEADAVMIYTVPTIVEERTKKDGNSALTWRDEPVDFELKRDAHLLKTSKPRITLWSKRLIRIMEKLMNYYPSHLGSYNSYKSILDDLFVEILYFYPEMKRYLKTYEDTISDDPVKLERVAIGSCGDETYSDLLEPWLDFGVLDLKTEPCDEATAYDLAVLLRLLSSMYRVKVAPTMSSLLLDAEPRIEYNRLWMLLKPGTYVYVQESTFADSIIKRTGRDNSYYDERGVDDPFLEDSERTGWVVSSWQYKKGIPNQNLWEYEQPVDHLFLELWSVEFDGKMFQRIARPAILFRFDGYRAVRGLEIIPARLHDRLDHGVLRRHLESRGEKYLKIFSEPAAHREYHHSLSGYHGQIIVDPVAFHQYAYQEEYNYHYRHRSRRRFFPIADGDGGKRFQSILDFLPSTSESFERIGEVYVLLPRRTQGLGLKTKRWMTFEIDHISKKAPDYLDNQLDNELVLISEDDKAALRTVLPKNEQVIGVAQDFIADKGEGKVFLLYGPPGTGKTLTVECVANDTQRPLISLTVADIGDNWKAEAQLRKWFGVAAKWNAILLIDEADLFLEQRRDGDAARNGLATIFLRSMEYYKGVLFLTTNRPGHIDDSFISRITCPISYRPLSSETKAKITHKFVRKFENSETIEVQKQAVNYLIENCQDFNGRQIRNILQNAVAAAEVQQRFEQREVSSKAKSSEDLALIIVKRHHIKGAVERQHEFRTYLEGLKGGRDEPARAKSRQDYLSVS

SEQ ID NO: 4554 - DNA, 3246 bp, Muscodor strobelii
  misc_feature: SGI EST ID NO. CUFF.11576.0
  misc_feature: Variant of the nucleotide sequence at SEQ ID NO 4552
ccgaaattggcaaactgtagacaataagtaacacagcgtttgccataacacaaactctacttttctcggccataatatattatttgacaaatcgacaggtagattcgcaacctgaatgcgttagggctctatatgaacaagatggctgcagaaacagattcaagcggagccgctgatcaaccatcagtgagcagaacagagcctcgaagtcaagctgcaaacagcaatgacgattcatctgagcctaagtacaatgattcgggtagcacagataccgccaataaaaatgatagcattctagtctcatcggatacaccaggtgccgaatcttcatcttcgggtactgccgacaaaacgcacagaagagcagacgttctttattgtttgacaactgcagaagaggagggaaagggcgagaagcactactataaggaccagccttggaaaggcgttagcaatggattacctgggtcagaggctagtgaggaagccgatgcagtgatgatatatacggtgccgactatcgtcgaagaaaggacgaaaaaggacggtaatagtgctctgacgtggcgagacgagcccgtcgactttgaactcaaacgggacgctcacctgctcaagacctcaaaaccccggatcactttatggtcgaagagactgatccgtataatggaaaagctgatgaactattacccatctcatctcgggtcctacaactcatacaaatctatcctcgacgacctttttgtcgaaatattgtacttttatccagagatgaaacgttacctgaagacatatgaagacacgatttccgatgaccctgtcaagctagagcgggtggccattggaagctgtggtgacgaaacctattccgatctcctcgaaccgtggctcgactttggagttttggacctgaagactgagccttgcgatgaggcaacagcttacgatcttgctgttttacttcggcttttatcatctatgtaccgagtgaaagttgcgcctacaatgtcttcattattgctggatgccgaaccaagaatcgaatacaatagattgtggatgctgctcaaaccgggaacatatgtttatgttcaggagtcgacttttgcagattccatcatcaaacgtaccgggcgtgacaactcgtattatgacgagaggggtgtagatgatccattcctggaagacagcgaacgtacagggtgggtcgtctcatcctggcagtacaaaaagggcatcccaaaccaaaacctttgggaatatgagcagcccgtagatcatttattccttgaactatggagtgtcgagtttgatgggaaaatgttccagcgaattgcgcgcccggcaatactctttcgcttcgacggttatcgagctgtgcggggtctggaaataatcccagcgcgacttcatgatcgacttgaccatggggtgttaagacggcatctcgagtctcgcggtgagaagtatctcaagatttttagtgagcctgcggcgcatcgagagtatcatcactctcttagcgggtatcatggtcagattatcgtggatcccgtcgcgtttcaccagtacgcatatcaggaggagtacaattatcactatcgtcaccgttcgcgtcggagatttttcccgattgcagatggagacggtggaaagagatttcaaagtattcttgacttcttgccatcaaccagcgaaagctttgaaagaataggcgaagtttatgtccttctgccacgtcgcacgcaaggtcttgggctgaaaacgaagcgctggatgaccttcgaaatcgaccatatcagcaagaaagcccctgactatctggataaccaactcgataatgagctggtgctaatttcagaagacgacaaagccgccttacgcactgtgctaccgaagaacgaacaagtgatcggtgttgcccaagatttcatagcagacaagggcgaaggcaaagtttttctattgtatggcccaccaggaacggggaagacattgactgtagagtgtgtagcgaatgacacgcagcggccattaatcagcttgacagttgcggacattggcgacaattggaaagcagaagcccagctacgaaaatggtttggggttgcggcaaagtggaacgcaattctacttatcgacgaggcggatctgttcctggagcagcgccgcgatggagacgctgcacgcaatgggctagcaacgatcttcttgcgatctatggaatattataaaggcgtgctgtttcttactacaaatcgaccaggtcacatcgacgattcatttatctcccgtatcacttgtccaatatcctacaggccactatcatcagaaacgaaagccaaaatcacgcacaaatttgtgcggaaatttgaaaactcggaaaccattgaggtccagaaacaggcagtcaactatttgatcgaaaactgtcaagatttcaatggtcgtcaaatacggaacatcctccagaacgcagtagcagcagctgaggtccagcaaagattcgaacaacgtgaagttagttcaaaagccaaaagcagcgaagatcttgctttgatcattgtgaaaagacatcatataaagggtgcggtagaacggcagcacgagttccgaacatatctagagggcctcaagggaggacgggatgaaccagctcgagccaagtctcggcaagactatcttagtgtctcgtgagacacaaggatcccgctgggttccacaagcctgtcagtatcaaataaatgcttctcagaggtgagactggtggtcgtggaagcttacgaaagtgctgcagacgctcatgtaggaaaagtaataatggatgactttctacctaacttccgaataaactggcgaataacgcgtatatatatatacatacctaaacccctgtatcatgcacccctaagcgtaccacattacctcaggtggttaccgcgaataggtgggcgactttgtgacaatgctcctgtttgaagtggctatcgctgggatctaaggctatactgcagatgctgttccgatttaacaatgtagttgtacaacgaagagctataggttcgatcacgtcttttgttgaatcttgcaatccatattcatacgttgaatcaatgcgtatgatgatagactcccttcgtgtactgggtagaccaccgaggaaattggcgttgccttagtcgcgagaaatctccataaacagaagattgtatatacatgcataatgtgacaaggcatcaaaag

SEQ ID NO: 4555 - DNA, 561 bp, Muscodor strobelii
  misc_feature: SGI cDNA ID NO. 561212
  misc_feature: Encodes the peptide sequence at SEQ ID NO 4556
atggggcagctgtgggagtcgatcattcgatctatagacgatgaacaactgcttagagacgatttcaacggactgagtcggtctttcacgtctcgggcagctggggagtcttccaatcaaggctcagctaaacgcgaagctgatgaacaaacgccagtcgaggcaaaggactgcaaaggacaaacgaagcagtcacgaccaaccgcagttgcgaagggaaccaatgaacacctaggtgacgagagtcggagcctcaaatcggagcgcgatgcaatggtggaagagatcatcgatcgcgttacaccccaacttcagcgtctggctagagaagccgctgagcgtgagctcgataaactgattgagaatgcactgggcgagacagcggaacagaagatccaagcggtactcagccgggtacaggatttaggggaagaagacctcgaagatctctttttgaagaggtctaccatggctgtcgtcttgcgtcgcctcctagagaggattgagcgactggaggaggagaatgagtgggaggatctggggcgacctggatctgtatag

SEQ ID NO: 4556 - protein, 186 aa, Muscodor strobelii
  misc_feature: SGI Peptide ID NO. 561212
MGQLWESIIRSIDDEQLLRDDFNGLSRSFTSRAAGESSNQGSAKREADEQTPVEAKDCKGQTKQSRPTAVAKGTNEHLGDESRSLKSERDAMVEEIIDRVTPQLQRLAREAAERELDKLIENALGETAEQKIQAVLSRVQDLGEEDLEDLFLKRSTMAVVLRRLLERIERLEEENEWEDLGRPGSV

SEQ ID NO: 4557 - DNA, 104 bp, Muscodor strobelii
  misc_feature: SGI EST ID NO. CUFF.11584.0
  misc_feature: Variant of the nucleotide sequence at SEQ ID NO 4555
cttagagacgatttcaacggactgagtcggtctttcacgtctcgggcagctggggagtcttccaatcaaggctcagctaaacgcgaagctgatgaacaaacgcc

SEQ ID NO: 4558 - DNA, 1929 bp, Muscodor strobelii
  misc_feature: SGI cDNA ID NO. 561213
  misc_feature: Encodes the peptide sequence at SEQ ID NO 4559
atgcctccgcgtcgcaacacccgccctgttggcgacaaggccaatgacaagaccggccagcctgtgcacaacaacactccctacgacaggcccgccgagccccctgccgaccccaatgttcccgatgctgatgaaattgctgaggccgaagcccgctccgtccccgtcctacgcacagtcaagtttgctgcgcacaagggagtcgtgctggccaaacgcaagttcgccaagaaacccggcgagtactcagacaacacacacacgcagcgtgtccgagtccgcaatgccggcatcagcgcctaccagcgaggtgttgagcaggccaggtccgccgacctcaaggccgtggctgagaagtggcgagagtatgctgagacggaccgctacatggagctggacgagcagacccgcggccgctggctcgacgacatcgagaaggatgtaatggactcccgcagaaagaagggcctggacttcgacagcaaggtctggcagctcaacagtctcgcgcgccctgaggacttcgccggtgtcaaccccaacgccccggtgattggtggccctgctcctgagggagagcctggtcaacgtcctggcaagacgggtgagaacgtcaagcccattcccgagctcatggctgcgaaggcacccctgaggctctacgttcccgagcccgtgcagtttggctcagtcgacgacgttcccgccgatggcactcctcgcgaacctcgttctatgcccgctccccgtcaggacggtccgcagcagctgcagcctcagtatcagaccttgacccaggaccaagcccggaaccttctcgatcagccagccgtcttcatccctgtcaaccccgacactccttatgtctccaacgacgaccctgctctgcacgcactgatcacacaaccgccggtacatgcttgggaatatggtgcccctcccgcgcaaatgcacgagcctaacacccagcccctagctgacattccttacaacgaagacttggatgattacgacgatgatgatatcggctcgctgcccgcccattacgagcccattcctcatgtcggtcgccttgcacgtcacgggccccagcctgtgccgacccccgcccgcactggtgctgcatcgcctgagggtcccattcactatgatccccgagtaccgggtcagcaccttgtccatccgtctctacgcacgcagcccgtaccaccggagcgcaggaatcactatccatatgccacccctcttccgcgtcatactccaggccatcaccgatccccttctatggccccgcatcatcttcagtctccgtctgtgggcccccgcccttaccaatccccggctttggcgcagcatcgtcgacagccttcgtcgccggccatgaaccaccctgaggtcacggcccatatccagcagatgatgacccagcacgatgaagagcgtcgtgagcgtgatgaggagatccgacgacgcgaagaggagaacgctgagttgcgacgacagctcgctgctagccagcaaggtggtggaatgtttgttgagcctgaggagaccgccgagccccaacagactaccgagccccaacagactaccgagccccgacagactactgagcttcgacagactactgagcttcgacagactattgagcctcaggagcgtgccgcgtctcaagagacagctgatacgagccaacatgatgtgtctatacatgacggctccgagcacaatgcacctgagcacaacgcatctgagcatgccgcatatgaacagaacgcacgtggacaggacggatctgagtatgatggatcggaccagaccgattgggaggcgctccaggcccaggaaatgtcagggggtcaggaggtgcaacagggtcagggggagaccatgatcgtccatgacgatgacgacgatatctacaactaa

SEQ ID NO: 4559 - protein, 642 aa, Muscodor strobelii
  misc_feature: SGI Peptide ID NO. 561213
MPPRRNTRPVGDKANDKTGQPVHNNTPYDRPAEPPADPNVPDADEIAEAEARSVPVLRTVKFAAHKGVVLAKRKFAKKPGEYSDNTHTQRVRVRNAGISAYQRGVEQARSADLKAVAEKWREYAETDRYMELDEQTRGRWLDDIEKDVMDSRRKKGLDFDSKVWQLNSLARPEDFAGVNPNAPVIGGPAPEGEPGQRPGKTGENVKPIPELMAAKAPLRLYVPEPVQFGSVDDVPADGTPREPRSMPAPRQDGPQQLQPQYQTLTQDQARNLLDQPAVFIPVNPDTPYVSNDDPALHALITQPPVHAWEYGAPPAQMHEPNTQPLADIPYNEDLDDYDDDDIGSLPAHYEPIPHVGRLARHGPQPVPTPARTGAASPEGPIHYDPRVPGQHLVHPSLRTQPVPPERRNHYPYATPLPRHTPGHHRSPSMAPHHLQSPSVGPRPYQSPALAQHRRQPSSPAMNHPEVTAHIQQMMTQHDEERRERDEEIRRREEENAELRRQLAASQQGGGMFVEPEETAEPQQTTEPQQTTEPRQTTELRQTTELRQTIEPQERAASQETADTSQHDVSIHDGSEHNAPEHNASEHAAYEQNARGQDGSEYDGSDQTDWEALQAQEMSGGQEVQQGQGETMIVHDDDDDIYN

SEQ ID NO: 4560 - DNA, 1098 bp, Muscodor strobelii
  misc_feature: SGI cDNA ID NO. 561214
  misc_feature: Encodes the peptide sequence at SEQ ID NO 4561
atggccaactaccaacccgaagtggccccgcgccaatacgtgcccttgacctgccacggccactcgcgccctgtccctcacatcagcttctcacccctcgagacagatggcgcctactacttgatctctgcctgcaaagatggtaatcccatgcttcgcgacggccagaccggcgactggatcggaaccttcatcggccacaaaggtgccgtatggcaggcccggctgagccctgatgcctcgggcgctgccacagcctctgccgatttcactgccaagatctgggatacccacacgggcgagaacaccatcaccctgcagcacgaacacatcgtccgcgccgtcgcataccctcccaacagctcagaaatggtggccactggtggcatggagaagaagctgcgcatcttcgatctcaccgacttcgacgagggtgagactgtgaccaacggcgatagaatcacccacaccacaatcccagcctcgtccggccacgagatcggcgccggcatccacaccaagtccatcaagttcattgtttggactaaggatcccaacatcttgatcaccgcctccgacaacaccctccgctggttcagcctgccccgacgcagcctcatcaagcagcaagtcctcgatggcgagatcgggtcctgtgagttctcctggattgctccagagctggccgagcacaccgatgtcggagatgggctccctgttttgtccgtcgcggcaggcaaatgcctctatttcttcggtggtctccaggccacggatccctttaagacggtcaagctcgactacaaagtggccagtgtggctttggatgtcaagggcaggaagtacgtggtgggtgaagacaaccctgccacatgggcccgagtttaccgctgggatgatggtacagagattgacatccacaaaggtcatcacggccctgtctggtccatcgcctgctccccagatggcaagctctatgcgacgggctccgaggatggcaccatcaagatgtggaagaattgcgagggcttctacgggctttggcgtggtggtggcggtgctgccaacggggtagggcaagagcggactgctgattag

SEQ ID NO: 4561 - protein, 365 aa, Muscodor strobelii
  misc_feature: SGI Peptide ID NO. 561214
  misc_feature (301)..(339): Pfam Id: PF00400 Pfam Desc: WD domain, G-beta repeat
  misc_feature (58)..(96): Pfam Id: PF00400 Pfam Desc: WD domain, G-beta repeat
  misc_feature (108)..(138): Pfam Id: PF00400 Pfam Desc: WD domain, G-beta repeat
  misc_feature (10)..(355): NCBI GI: 46111861 Blast Desc: FG02812.1 [Gibberella zeae PH-1]
  misc_feature (9)..(365): NCBI GI: 39969959 Blast Desc: MGG_10588 [Magnaporthe grisea 70-15] gi|149209297|ref|XP_001522023.1| MGCH7_ch7g141 [Magnaporthe grisea 70-15] gi|86196096|gb|EAQ70734.1| MGCH7_ch7g141 grisea
  misc_feature (9)..(351): NCBI GI: 116192735 Blast Desc: CHGG_06085 [Chaetomium globosum CBS 148.51] gi|88181998|gb|EAQ89466.1| CHGG_06085 [Chaetomium globosum CBS 148.51]
  misc_feature (14)..(351): NCBI GI: 171684207 Blast Desc: protein product [Podospora anserina] gi|170942064|emb|CAP67716.1| protein product [Podospora anserina]
  misc_feature (11)..(349): NCBI GI: 154322567 Blast Desc: BC1G_00626 [Botryotinia fuckeliana B05.10] gi|150847960|gb|EDN23153.1| BC1G_00626 [Botryotinia fuckeliana B05.10]
  misc_feature (11)..(349): NCBI GI: 156064937 Blast Desc: SS1G_00478 [Sclerotinia sclerotiorum 1980] gi|154691338|gb|EDN91076.1| SS1G_00478 [Sclerotinia sclerotiorum 1980]
  misc_feature (50)..(349): NCBI GI: 261353340 Blast Desc: serine-threonine kinase receptor-associated protein [Verticillium albo-atrum VaMs.102]
  misc_feature (51)..(351): NCBI GI: 164428655 Blast Desc: NCU00879 [Neurospora crassa OR74A] gi|157072230|gb|EAA35559.2| conserved [Neurospora crassa OR74A]
  misc_feature (12)..(349): NCBI GI: 189191616 Blast Desc: WD domain containing protein [Pyrenophora tritici-repentis Pt-1C-BFP] gi|187973753|gb|EDU41252.1| WD domain containing protein [Pyrenophora tritici-repentis Pt-1C-BFP]
  misc_feature (1)..(349): NCBI GI: 242793042 Blast Desc: WD repeat protein [Talaromyces stipitatus ATCC 10500] gi|218718670|gb|EED18090.1| WD repeat protein [Talaromyces stipitatus ATCC 10500]
  misc_feature (17)..(338): SWISSPROT Homolog: EC 2.7.11.1 Non-specific serine/threonine protein kinase
MANYQPEVAPRQYVPLTCHGHSRPVPHISFSPLETDGAYYLISACKDGNPMLRDGQTGDWIGTFIGHKGAVWQARLSPDASGAATASADFTAKIWDTHTGENTITLQHEHIVRAVAYPPNSSEMVATGGMEKKLRIFDLTDFDEGETVTNGDRITHTTIPASSGHEIGAGIHTKSIKFIVWTKDPNILITASDNTLRWFSLPRRSLIKQQVLDGEIGSCEFSWIAPELAEHTDVGDGLPVLSVAAGKCLYFFGGLQATDPFKTVKLDYKVASVALDVKGRKYVVGEDNPATWARVYRWDDGTEIDIHKGHHGPVWSIACSPDGKLYATGSEDGTIKMWKNCEGFYGLWRGGGGAANGVGQERTAD

SEQ ID NO: 4562 - DNA, 2524 bp, Muscodor strobelii
  misc_feature: SGI EST ID NO. CUFF.11615.0
  misc_feature: Variant of the nucleotide sequence at SEQ ID NO 4560
ccgcccccaaaagggaatcgacgagggtggccggggggtaacccctaccagcttctggacgtctgggaatttctttgcgacaacctcgtctgctctgctcaactcgtcctcgccgcgtcctcgtcctcttcttcgcccaacttctccctccacctcacatcgtcaaaaagtgtctcacaagcacggccctcttttcgtctcttccctctcctcatatctctccgtccgtgctcctccaaagtctcaaccctggaactatccattcatcctctcttccgtaccccttggaatttgtctcttggacttccttggtcctgtcttgtagaggatatcagtagagcttggtcgcattgactgtaatttgcttcttggtctccctacctgatctctgccctctgcactctcgaccacacagatcgaccacacagacccaacgtattcaacgtcaacccactcccaaattcacgtccgtcctctttcctttttgacgacctgtaacgacgattacgactacaactagacacgatacgcaacgatccctccgcgataccagcttgccatacaaacaattcgcaacaagacaactcggacccagaccaagactggcaaattgccttagaccatcggccggcaacggtgcatctctaatccacttctctcacgagtccatcgccctctaccacctccgtctgcgttcgtcataaaccaccctctcgatcataccgcacatccccttctctccgctgctcgcctcgtgccagcccacttcaactaggcctgtacccgcttgcgccgcctcgcattgccgtcgccatcgccatcgcccactactgtcttctacatctgcacgcatagactttatcccagagtagccgaccacctctccttgccatggccaactaccaacccgaagtggccccgcgccaatacgtgcccttgacctgccacggccactcgcgccctgtccctcacatcagcttctcacccctcgagacagatggcgcctactacttgatctctgcctgcaaagatggtaatcccatgcttcgcgacggccagaccggcgactggatcggaaccttcatcggccacaaaggtgccgtatggcaggcccggctgagccctgatgcctcgggcgctgccacagcctctgccgatttcactgccaagatctgggatacccacacgggcgagaacaccatcaccctgcagcacgaacacatcgtccgcgccgtcgcataccctcccaacagctcagaaatggtggccactggtggcatggagaagaagctgcgcatcttcgatctcaccgacttcgacgagggtgagactgtgaccaacggcgatagaatcacccacaccacaatcccagcctcgtccggccacgagatcggcgccggcatccacaccaagtccatcaagttcattgtttggactaaggatcccaacatcttgatcaccgcctccgacaacaccctccgctggttcagcctgccccgacgcagcctcatcaagcagcaagtcctcgatggcgagatcgggtcctgtgagttctcctggattgctccagagctggccgagcacaccgatgtcggagatgggctccctgttttgtccgtcgcggcaggcaaatgcctctatttcttcggtggtctccaggccacggatccctttaagacggtcaagctcgactacaaagtggccagtgtggctttggatgtcaagggcaggaagtacgtggtgggtgaagacaaccctgccacatgggcccgagtttaccgctgggatgatggtacagagattgacatccacaaaggtcatcacggccctgtctggtccatcgcctgctccccagatggcaagctctatgcgacgggctccgaggatggcaccatcaagatgtggaagaattgcgagggcttctacgggctttggcgtggtggtggcggtgctgccaacggggtagggcaagagcggactgctgattagggtggtgcctcagtccacagccctacctcgaattcgagtagctgccgtgacgtaggtcgcggaacgccaccaactgatgacgatgcgtcttgggagcttgtctcctcgactgctacaacttcggtcaccgcatgatatacatgatatgttactaggcccagatctggattgtgatacccgttacagctgaggcacgagagaggacatactatttccaggtcgcacagtcggcctcgtggtgtcagccaccattgcgcagggggtcacgacatacagatagccataacctatctggcagcaaacccatcagaagcatcagacatgagcttttgggctcttgcaggttgggaaaaatggattgtacgtagattataccctccgtatggtaattcacacactcccgtggactcgtacctcagagcacttctcccactcatctcgtgacttactagtgtaaaatagctcgaccagccatgaatttagaattatatggtaaggtagttggctcgtacattgtgatacaagtgtatgtgca

SEQ ID NO: 4563 - DNA, 2328 bp, Muscodor strobelii
  misc_feature: SGI cDNA ID NO. 561215
  misc_feature: Encodes the peptide sequence at SEQ ID NO 4564
atgggcgacttcaagctctcggcgcagctggctgcccacgaaggcgacgtccgcgctgtcgccttcccccttgacgacctcgtcgtatctgcttcgagagactacaccgtccgcgcctggtcgcgatcctcggcctcgccccccgccttcgagccgtcggtggtgagcaaaggtactgagttcatcaacactttggcctacctgccaccttcacccgacttccccaagggcctgatcgtctcgggcggcaacgagaccatcatcgacgtccgatcgcctgcctccaccgcctccgataatgccgagcgtctgctgattggccatgcccgcaacgtctgttcgctcgccattgccccgggtggcaagtacgttgcctctggcagctgggacaacacggcccgtgtctggcgagtgggcaagtgggagaccgagttcgtcctcaacgaccacgagggcgccgtctgggctgtcttgcccttgtccgactccgtcatcatcaccggctgtgccgacaagaacatccgcgtattcaatctagctgatgccgccgccggtgagatccgccctcgatcgaccatttacactccagatgtcatccgcgctctctgcaaggtgcccccgggtcaccccagcggagccgccgtggccagtgcaagcaatgacggggtcatccgcctatggacttccgagggccagaaggtcgccgagcttcatggccacgagagcttcatctactccctcgctacattgccgacaggcgagattgtcagctccggcgaagacaggaccgtccgcgtctggcggggttcggaatgcgtccagaccatcacccaccctgccatctccgtctggagcgtcgctgtctctcccaagggcgacattgtcaccggtgccagcgacggcatggctcgtgtcttctcccgcgcttcagatcgcatagccgacccagagacgctggcacagttcgacgaatccatcaaagcctcggccattcctcaacagtctattggcggtgttaacaaggagaaactaccgggcccggaattcctgacttctaagtctggtactaaggacggtcaggtgcagatgatcaaggaagcagatggctctgtgacggctcatacgtggtcaacgagcacacagcagtggaccaatgttggaactgttgttgatgccgagggcagcagtggccgcaaggtggagcacaatggacagtccttcgactatgttttcgatgtcgccatcgaagagggccagccatcgttgaagcttccctacaacctgtccgagaatccttactcgagagcccagaagttcattgacgacaacgagctctcccagaactaccttgatcagatcgcacagttcatcgtggccaacaccgaaggcaagactctcggtcaggactcttcagctgctggcgggccagacccctatggtaccgaagcacgatatcggccggaccaggcatccagtgcccccaagattcttccccagaaagactatcttgccattactggcgtgaagtacgagcctgtcttcaaaaagatttcgaccctcaactcggaactcgtcacggccggtcgaaaggacatctccctcaacccatcttccgagaatgccctcgccatgctccgccaaactttggagtcggaccgccccgtcaccgatgaagccgccctcaacttggtcgttatgatgtgcacacagtgggactactcttctcgcctagctcctctcgacttattacgatgcgtggccctgtttcccgcaactgctcgagtacgatcgacagattctcacaacttggttcaaattgcgatttctgctacactcgaaggagtaccggacggtagccaaatcaacgagaactgtgtcatgatggcactacgaactattgccaacctcttccgaacggcagacggccggaaactcctcgtacagtcttcttccgaggttgtcgctttcatcaacagaatcctcggagttggagggaagacaccgatcggacccttcaaccgcaacctcctgatcgccttgacaacggtcactgtcaactatgccgtacttgcttccaagcaactaggcatcatatctaacgatgtacaaattcgcctcctatccgcactggccttgatcttacaaaagcagaccgaagacgaagtggtttaccgtgcactcgttgccgtaggcacacttatccctacagtagggaaggctgctccagaggctcgtagtctggcatctgcagtgaacgccgcaaaagagaaagtgaaggacactcgtgtgcaaaacgtagctaacgagtgtcttgcgttgttgcgttga

SEQ ID NO: 4564 - protein, 775 aa, Muscodor strobelii
  misc_feature: SGI Peptide ID NO. 561215
  misc_feature (99)..(137): Pfam Id: PF00400 Pfam Desc: WD domain, G-beta repeat
  misc_feature (231)..(268): Pfam Id: PF00400 Pfam Desc: WD domain, G-beta repeat
  misc_feature (4)..(41): Pfam Id: PF00400 Pfam Desc: WD domain, G-beta repeat
  misc_feature (141)..(178): Pfam Id: PF00400 Pfam Desc: WD domain, G-beta repeat
  misc_feature (352)..(467): Pfam Id: PF09070 Pfam Desc: PFU (PLAA family ubiquitin binding)
  misc_feature (495)..(770): Pfam Id: PF08324 Pfam Desc: PUL domain
  misc_feature (270)..(307): Pfam Id: PF00400 Pfam Desc: WD domain, G-beta repeat
  misc_feature (1)..(770): NCBI GI: 46111859 Blast Desc: FG02811.1 [Gibberella zeae PH-1]
  misc_feature (1)..(774): NCBI GI: 261353339 Blast Desc: ubiquitin homeostasis protein lub1 [Verticillium albo-atrum VaMs.102]
  misc_feature (1)..(760): NCBI GI: 259484050 Blast Desc: TPA: polyubiquitin binding protein (Doa1/Ufd3), (AFU_orthologue; AFUA_5G08370) [Aspergillus nidulans FGSC A4]
  misc_feature (1)..(774): NCBI GI: 154322565 Blast Desc: BC1G_00625 [Botryotinia fuckeliana B05.10] gi|150847959|gb|EDN23152.1| BC1G_00625 [Botryotinia fuckeliana B05.10]
  misc_feature (1)..(774): NCBI GI: 156064935 Blast Desc: SS1G_00477 [Sclerotinia sclerotiorum 1980] gi|154691337|gb|EDN91075.1| SS1G_00477 [Sclerotinia sclerotiorum 1980]
  misc_feature (1)..(769): NCBI GI: 255949556 Blast Desc: Pc22g16290 [Penicillium chrysogenum Wisconsin 54-1255] gi|211592562|emb|CAP98917.1| Pc22g16290 [Penicillium chrysogenum Wisconsin 54-1255]
  misc_feature (1)..(769): NCBI GI: 189192194 Blast Desc: phospholipase A-2-activating protein [Pyrenophora tritici-repentis Pt-1C-BFP] gi|187974042|gb|EDU41541.1| phospholipase A-2-activating protein [Pyrenophora Pt-1C-BFP]
  misc_feature (1)..(760): NCBI GI: 67901434 Blast Desc: AN7704.2 [Aspergillus nidulans FGSC A4] gi|40742029|gb|EAA61219.1| AN7704.2 [Aspergillus nidulans FGSC A4]
  misc_feature (3)..(775): NCBI GI: 164428657 Blast Desc: NCU00880 [Neurospora crassa OR74A] gi|157072231|gb|EAA35560.2| conserved [Neurospora crassa OR74A]
  misc_feature (1)..(774): NCBI GI: 261201626 Blast Desc: polyubiquitin binding protein [Ajellomyces dermatitidis SLH14081] gi|239590124|gb|EEQ72705.1| polyubiquitin binding protein [Ajellomyces dermatitidis SLH14081] polyubiquitin
MGDFKLSAQLAAHEGDVRAVAFPLDDLVVSASRDYTVRAWSRSSASPPAFEPSVVSKGTEFINTLAYLPPSPDFPKGLIVSGGNETIIDVRSPASTASDNAERLLIGHARNVCSLAIAPGGKYVASGSWDNTARVWRVGKWETEFVLNDHEGAVWAVLPLSDSVIITGCADKNIRVFNLADAAAGEIRPRSTIYTPDVIRALCKVPPGHPSGAAVASASNDGVIRLWTSEGQKVAELHGHESFIYSLATLPTGEIVSSGEDRTVRVWRGSECVQTITHPAISVWSVAVSPKGDIVTGASDGMARVFSRASDRIADPETLAQFDESIKASAIPQQSIGGVNKEKLPGPEFLTSKSGTKDGQVQMIKEADGSVTAHTWSTSTQQWTNVGTVVDAEGSSGRKVEHNGQSFDYVFDVAIEEGQPSLKLPYNLSENPYSRAQKFIDDNELSQNYLDQIAQFIVANTEGKTLGQDSSAAGGPDPYGTEARYRPDQASSAPKILPQKDYLAITGVKYEPVFKKISTLNSELVTAGRKDISLNPSSENALAMLRQTLESDRPVTDEAALNLVVMMCTQWDYSSRLAPLDLLRCVALFPATARVRSTDSHNLVQIAISATLEGVPDGSQINENCVMMALRTIANLFRTADGRKLLVQSSSEVVAFINRILGVGGKTPIGPFNRNLLIALTTVTVNYAVLASKQLGIISNDVQIRLLSALALILQKQTEDEVVYRALVAVGTLIPTVGKAAPEARSLASAVNAAKEKVKDTRVQNVANECLALLR

SEQ ID NO: 4565 - DNA, 2798 bp, Muscodor strobelii
  misc_feature: SGI EST ID NO. CUFF.11681.1
  misc_feature: Variant of the nucleotide sequence at SEQ ID NO 4563
gggtactatacatagctcccgcaagctggaatcgtcttttcgaagcttcaaccacgccaacccgcgccctgcgatttgcaaagacacaacactcgtttccgctttgctgtagcccgtcttggtcgacagagagatgggcgacttcaagctctcggcgcagctggctgcccacgaaggcgacgtatgcctccttccgtcgtttccccttcttccacgccgtgcccaaatctctatcaaatctcccgatgccgtcactatcgacgtagcttgctctaggcgcaacgttcgctaaccaccaagatgcataggtccgcgctgtcgccttcccccttgacgacctcgtcgtatctgcttcgagagactacaccgtccgcgcctggtcgcgatcctcggcctcgccccccgccttcgagccgtcggtggtgagcaaaggtactgagttcatcaacactttggcctacctgccaccttcacccgacttccccaagggcctgatcgtctcgggcggcaacgagaccatcatcgacgtccgatcgcctgcctccaccgcctccgataatgccgagcgtctgctgattggccatgcccgcaacgtctgttcgctcgccattgccccgggtggcaagtacgttgcctctggcagctgggacaacacggcccgtgtctggcgagtgggcaagtgggagaccgagttcgtcctcaacgaccacgagggcgccgtctgggctgtcttgcccttgtccgactccgtcatcatcaccggctgtgccgacaagaacatccgcgtattcaatctagctgatgccgccgccggtgagatccgccctcgatcgaccatttacactccagatgtcatccgcgctctctgcaaggtgcccccgggtcaccccagcggagccgccgtggccagtgcaagcaatgacggggtcatccgcctatggacttccgagggccagaaggtcgccgagcttcatggccacgagagcttcatctactccctcgctacattgccgacaggcgagattgtcagctccggcgaagacaggaccgtccgcgtctggcggggttcggaatgcgtccagaccatcacccaccctgccatctccgtctggagcgtcgctgtctctcccaagggcgacattgtcaccggtgccagcgacggcatggctcgtgtcttctcccgcgcttcagatcgcatagccgacccagagacgctggcacagttcgacgaatccatcaaagcctcggccattcctcaacagtctattggcggtgttaacaaggagaaactaccgggcccggaattcctgacttctaagtctggtactaaggacggtcaggtgcagatgatcaaggaagcagatggctctgtgacggctcatacgtggtcaacgagcacacagcagtggaccaatgttggaactgttgttgatgccgagggcagcagtggccgcaaggtggagcacaatggacagtccttcgactatgttttcgatgtcgccatcgaagagggccagccatcgttgaagcttccctacaacctgtccgagaatccttactcgagagcccagaagttcattgacgacaacgagctctcccagaactaccttgatcagatcgcacagttcatcgtggccaacaccgaaggcaagactctcggtcaggactcttcagctgctggcgggccagacccctatggtaccgaagcacgatatcggccggaccaggcatccagtgcccccaagattcttccccagaaagactatcttgccattactggcgtgaagtacgagcctgtcttcaaaaagatttcgaccctcaactcggaactcgtcacggccggtcgaaaggacatctccctcaacccatcttccgagaatgccctcgccatgctccgccaaactttggagtcggaccgccccgtcaccgatgaagccgccctcaacttggtcgttatgatgtgcacacagtgggactactcttctcgcctagctcctctcgacttattacgatgcgtggccctgtttcccgcaactgctcgagtacgatcgacagattctcacaacttggttcaaattgcgatttctgctacactcgaaggagtaccggacggtagccaaatcaacgagaactgtgtcatgatggcactacgaactattgccaacctcttccgaacggcagacggccggaaactcctcgtacagtcttcttccgaggttgtcgctttcatcaacagaatcctcggagttggagggaagacaccgatcggacccttcaaccgcaacctcctgatcgccttgacaacggtcactgtcaactatgccgtacttgcttccaagcaactaggcatcatatctaacgatgtacaaattcgcctcctatccgcactggccttgatcttacaaaagcagaccgaagacgaagtggtttaccgtgcactcgttgccgtaggcacacttatccctacagtagggaaggctgctccagaggctcgtagtctggcatctgcagtgaacgccgcaaaagagaaagtgaaggacactcgtgtgcaaaacgtagctaacgagtgtcttgcgttgttgcgttgaggcgtaactggacggaaggacacctggtttatagatttgtggtatatttagttggttgcatttgcatggcgctcgggagcatagcttgcttgtggtacttaggtagataggctcacgtgtggttgctttgctagcataccgtatcgtgaggaatgagagttcaaggatattaaatagatttgaaacacttaaacaccgtatagatgaaag

SEQ ID NO: 4566 - DNA, 1800 bp, Muscodor strobelii
  misc_feature: SGI cDNA ID NO. 561216
  misc_feature: Encodes the peptide sequence at SEQ ID NO 4567
atgtcggtcatcctggagaaccagccctctgaaactcaggacgaatgggtgagagtccgacgacgcaagggacggagtagaaaggcgcagtatcgacctgttcccagcaaggaatcgtccgcacccgagcccagcacgccgattttgacattagagcaagtcaaaaaggaccacgagcacttcgccggccagtggagatcatcccctgcttctcatcgactccaagaagctctgtcaaagaagaagcataacttgcagatcgataaagctatatgttttggaatcgggacatttgacccagcagacgcatcatgggacatcaagcgcaaggcacatgttcaacttgtggctttccttcttattgtcgagcacgttcagctctcattagatgagccaatctgttgcagctttcaagatcccatattcaattcagtcgacaagggattcatcgagagtctcggtcataaggtggtggagtctccttacggctttcaacttgttgatgaatcgtctttagcgtttggagtacacctatacagagacatctactcgcaagtcatctcaaagcacacgccggcaatgttcattggcacgccatacgatgtctgggaagatcgaaccaactggctcaaccgcactgctgtccaatatgcattacaggggtattatgatggcctcccgccagaagtccaggacatggtcgaggttcgagcacccgaaatctccgaaatcttcgccggcggcagcagaggcgaaggcgccttagaacgcgctctaaagagtacccgacgcgcgcatatgcttgtcggatcagtcaagacgaaagagtataccatttggcctatcaatgtgcatctaggtcactgggtgcttgtagttctccataagcagcaggctcgcaatcccaaagaaaagacggtagaatggtcacagatcgtccaaatggccatcatcgatccagcacgaaatcacagttatcaccgaacagtcgagtcccaactccgacgactcctagaaaaaggcgtgggctgcggattcgcagaaggctacgagcgaaaagtatggacgcccttccaacacgacaagacatcctgcggtccacgagcctaccaagccggcaagacgataatggatttcctccaagaactgcacgaaaagggaatggggtataacgaagctctctggtccgatcacagcggctggttcaacgaggatttcgtgcgcagcgagatgatgggacgaaacgcgtggcgcatcgtaaaagactacaagtacaaagcccgcatcggcgtcgagatcgtgcatcgcgtcaaaccacccttcacgtcggttacggataagaatgaatgggtgaacgcagcgaccgtaatgagaccgacggacaaaaccgggcagaagccagaacaacgacccatggataagaaagacgaaggaacggcagatttctacatggagcctaatcgacatcgtctcacggcgcgaccgcaagtcaacgagcttattcaagtcgaacaggaggacccgtcgcagccggaaatcagataccctatttggcccttgggcgaatggaatatcaaacggcctgtggaagtgccacgacctgcgctgagagcattgtttaaccgagaaaccggccaatacgatgagccagatccatcaaagtcactaggtatcaacctgaagactggtgcaccgctcgataccgttgagatccccatgccgggggcgcttgttcctgaagggaagcggccattgttcccacctgatgacaagaaggggaagagagctagacattcatag

SEQ ID NO: 4567 - protein, 599 aa, Muscodor strobelii
  misc_feature: SGI Peptide ID NO. 561216
  misc_feature (110)..(154): Pfam Id: PF07985 Pfam Desc: SRR1
  misc_feature (15)..(205): NCBI GI: 256721938 Blast Desc: NECHADRAFT_67810 [Nectria haematococca mpVI 77-13-4]
  misc_feature (2)..(208): NCBI GI: 261353337 Blast Desc: conserved [Verticillium albo-atrum VaMs.102]
  misc_feature (7)..(205): NCBI GI: 46111855 Blast Desc: FG02809.1 [Gibberella zeae PH-1]
  misc_feature (10)..(203): NCBI GI: 171684213 Blast Desc: protein product [Podospora anserina] gi|170942067|emb|CAP67719.1| protein product [Podospora anserina]
  misc_feature (15)..(204): NCBI GI: 85115023 Blast Desc: NCU00882 [Neurospora crassa OR74A] gi|28926592|gb|EAA35562.1| [Neurospora crassa OR74A]
  misc_feature (15)..(224): NCBI GI: 116192741 Blast Desc: CHGG_06088 [Chaetomium globosum CBS 148.51] gi|88182001|gb|EAQ89469.1| CHGG_06088 [Chaetomium globosum CBS 148.51]
  misc_feature (68)..(204): NCBI GI: 39969957 Blast Desc: MGG_10587 [Magnaporthe grisea 70-15] gi|149209293|ref|XP_001522021.1| MGCH7_ch7g139 [Magnaporthe grisea 70-15] gi|86196094|gb|EAQ70732.1| MGCH7_ch7g139 grisea
  misc_feature (50)..(201): NCBI GI: 156064927 Blast Desc: [Sclerotinia sclerotiorum 1980] gi|154691333|gb|EDN91071.1| [Sclerotinia sclerotiorum 1980]
  misc_feature (53)..(210): NCBI GI: 154322559 Blast Desc: [Botryotinia fuckeliana B05.10] gi|150847956|gb|EDN23149.1| [Botryotinia fuckeliana B05.10]
  misc_feature (8)..(201): NCBI GI: 226287020 Blast Desc: conserved [Paracoccidioides brasiliensis Pb18]
MSVILENQPSETQDEWVRVRRRKGRSRKAQYRPVPSKESSAPEPSTPILTLEQVKKDHEHFAGQWRSSPASHRLQEALSKKKHNLQIDKAICFGIGTFDPADASWDIKRKAHVQLVAFLLIVEHVQLSLDEPICCSFQDPIFNSVDKGFIESLGHKVVESPYGFQLVDESSLAFGVHLYRDIYSQVISKHTPAMFIGTPYDVWEDRTNWLNRTAVQYALQGYYDGLPPEVQDMVEVRAPEISEIFAGGSRGEGALERALKSTRRAHMLVGSVKTKEYTIWPINVHLGHWVLVVLHKQQARNPKEKTVEWSQIVQMAIIDPARNHSYHRTVESQLRRLLEKGVGCGFAEGYERKVWTPFQHDKTSCGPRAYQAGKTIMDFLQELHEKGMGYNEALWSDHSGWFNEDFVRSEMMGRNAWRIVKDYKYKARIGVEIVHRVKPPFTSVTDKNEWVNAATVMRPTDKTGQKPEQRPMDKKDEGTADFYMEPNRHRLTARPQVNELIQVEQEDPSQPEIRYPIWPLGEWNIKRPVEVPRPALRALFNRETGQYDEPDPSKSLGINLKTGAPLDTVEIPMPGALVPEGKRPLFPPDDKKGKRARHS

SEQ ID NO: 4568 - DNA, 3689 bp, Muscodor strobelii
  misc_feature: SGI EST ID NO. CUFF.11627.0
  misc_feature: Variant of the nucleotide sequence at SEQ ID NO 4566
ccggcatggtggtagaagctgaccagtctgatgaagcaaaatcctaaaaatagccgctcgctgttacaatgctgtagtctcggattacaagacatgtgtatatcaacgttgtgcctggttgcggaagcaccttgatattgatgatgtatccgcgccatcatcatcaatcatgtgtcagctgttcagcttggagaaatctaacaccatctttgagcattgtggtacaggaatagagagccctttgaagaaattgtagctggtttaggctgcattcacagcctgacaaccgagaccctggccaagccgtccgacgccgacaagtatgtcgcaatattgcaaacaagcgaccggaggaaacacaaattggaggcattcaagagagccgcatgttcgccgtgtagccttgtcaggcgcggcattttggagatccggtgagggacttcgaagagaagtggttggcatctaatagcgcagcttcgtgtgaatgtgtctgtaacaaatcttggagcatacatgcatgataagagacacaaactatattaatactttttttatatacatgtatgtaaccattctccgaaccttgagctattgtgactgtaggagaatggacctcctgcgatgcggattgaggcacgcagtctgtgcggcacagtaaacacgatctaggtaattaccgccacaagcaggtcgtgaaataaatggcaatagcactacccgatggtgtaaagtccgagatatcgattcaaaaaatgaagaaaccctaatgatagtcagaatattcagtcgaattcactcgcaactactttcaacatatgagcccagctccaaattcgaatagataatatttcccagatgcatttgtggtgctatgtagcgctattggatgcgaagagaatgcactaatcagatgttatgtattttgcaaatagtttacacccaaacatttgaacacatgaaaaaagaacatgcggaaaatcttgacgttaattacaaccaccttcgcagtttacgttttcgcatgtcacatacagtaagggataaagatacgatctcgcttgtggaatttttcttatacccgcaatgtcggtcatcctggagaaccagccctctgaaactcaggacgaatgggtgagagtccgacgacgcaagggacggagtagaaaggcgcagtatcgacctgttcccagcaaggaatcgtccgcacccgagcccagcacgccgattttgacattagagcaagtcaaaaaggaccacgagcacttcgccggccagtggagatcatcccctgcttctcatcgactccaagaagctctgtcaaagaagaagcataacttgcagatcgataaagctatatgttttggaatcgggacatttgacccagcagacgcatcatgggacatcaagcgcaaggcacatgttcaacttgtggctttccttcttattgtcgagcacgttcagctctcattagatgagccaatctgttgcagctttcaagatcccatattcaattcagtcgacaagggattcatcgagagtctcggtcataaggtggtggagtctccttacggctttcaacttgttgatgaatcgtctttagcgtttggagtacacctatacagagacatctactcgcaagtcatctcaaagcacacgccggcaatgttcattggcacgccatacgatgtctgggaagactttcacggtggcgacagcctgaattgggatcgaatgaaacaactgaatgagcaatgctctcgtatcaactttcccgagaatagttccgagacaatattttcaagtactgcaattcattgggctgaaaaggatcaaaattgagaagcccgtggaaattgtgcttttgaacataacgacagacataagagcaattgcagcatcgagacaaagaatccagcatcgcatgcacacaggacagtgctagaagtatcgggcacaaaggcgaaaccggaagcaattgtagataaagaaagcacaccaccagaatctcggcggcgaacacaaagcgctttgtgacctcactcgataaactcgatgtaacaccattgaatcttggacccgaatgcatcaaatcgagggattcgggagagaaagccgtgtgctcatcctccccagcagacgaattttcaaccagcatcgatttccccgattgtttacacacgattagcaacaaaagccggccgaagtggtctggcattacacctgtcgggatgaatgattacgggatccagggttcggactgccaaaatctctgctcgaatacatgcccgatcgaccatatcgactttctacattcacatcaactcaagagaacaaagatcggatttccagacctcaacgggttgcattccctgaactatagtcgaaccaactggctcaaccgcactgctgtccaatatgcattacaggggtattatgatggcctcccgccagaagtccaggacatggtcgaggttcgagcacccgaaatctccgaaatcttcgccggcggcagcagaggcgaaggcgccttagaacgcgctctaaagagtacccgacgcgcgcatatgcttgtcggatcagtcaagacgaaagagtataccatttggcctatcaatgtgcatctaggtcactgggtgcttgtagttctccataagcagcaggctcgcaatcccaaagaaaagacggtagaatggtcacagatcgtccaaatggccatcatcgatccagcacgaaatcacagttatcaccgaacagtcgagtcccaactccgacgactcctagaaaaaggcgtgggctgcggattcgcagaaggctacgagcgaaaagtatggacgcccttccaacacgacaagacatcctgcggtccacgagcctaccaagccggcaagacgataatggatttcctccaagaactgcacgaaaagggaatggggtataacgaagctctctggtccgatcacagcggctggttcaacgaggatttcgtgcgcagcgagatgatgggacgaaacgcgtggcgcatcgtaaaagactacaagtacaaagcccgcatcggcgtcgagatcgtgcatcgcgtcaaaccacccttcacgtcggttacggataagaatgaatgggtgaacgcagcgaccgtaatgagaccgacggacaaaaccgggcagaagccagaacaacgacccatggataagaaagacgaaggaacggcagatttctacatggagcctaatcgacatcgtctcacggcgcgaccgcaagtcaacgagcttattcaagtcgaacaggaggacccgtcgcagccggaaatcagataccctatttggcccttgggcgaatggaatatcaaacggcctgtggaagtgccacgacctgcgctgagagcattgtttaaccgagaaaccggccaatacgatgagccagatccatcaaagtcactaggtatcaacctgaagactggtgcaccgctcgataccgttgagatccccatgccgggggcgcttgttcctgaagggaagcggccattgttcccacctgatgacaagaaggggaagagagctagacattcatagtctgctcatttgttcgtcttgtagcccgatccctaggctaaaacttcctgatggtaacagagatgtgagaggaaaggaatccggattgataccttatgtatttaataatcaatactattcaga

SEQ ID NO: 4569 - DNA, 708 bp, Muscodor strobelii
  misc_feature: SGI cDNA ID NO. 561217
  misc_feature: Elevated expression when VOC is produced
  misc_feature: Encodes the peptide sequence at SEQ ID NO 4570
atgctttcctcaataatattagccgtctcggccgccaccctcgcgtctgcacacacaatcatcacatatcctggatggcgaggtaacaacttacacacaaatgatgactggccatatggcatgcaatggacctatccatgcggtggtatcccattgaccaagaaccggacatactggccaacgactggtggtgcagtggctttccagccgggttggttccagggacattcaacggcactcctatacatcaacttgggcgtcggcaccgatggacctgacggcggtccgttgaacatgtcgaaccccatgatggctccaatccagcttcaaggcccgtcgaacggcccttacccaggcacagtctgcttcccccaggtgccgcttccaaccaacttcaccatgaacgagggggacaatgcgacaatccaaatcgttgagattgctcaacacggtgctgccttgttctcatgcgtcgatatcaccttcgtaccgccaggcgactcgcgcatcgctgatgtcaactcatcgaactgctacaatagttctgaccttggcttcgcacagctctactccatcactacgacggcggccgatagcacggccaacaacgccacgagcgccgcgaccaggatgctctcctcaccatctacatgggcttggatgggctatttgccggtgtttctcggtgcagcggctttattactataa

SEQ ID NO: 4570 - protein, 235 aa, Muscodor strobelii
  misc_feature: SGI Peptide ID NO. 561217
  misc_feature (1)..(225): NCBI GI: 171684211 Blast Desc: protein product [Podospora anserina] gi|170942066|emb|CAP67718.1| protein product [Podospora anserina]
  misc_feature (1)..(234): NCBI GI: 39969955 Blast Desc: MGG_10586 [Magnaporthe grisea 70-15] gi|149209291|ref|XP_001522020.1| MGCH7_ch7g138 [Magnaporthe grisea 70-15] gi|86196093|gb|EAQ70731.1| MGCH7_ch7g138 grisea
  misc_feature (6)..(235): NCBI GI: 156064929 Blast Desc: SS1G_00474 [Sclerotinia sclerotiorum 1980] gi|154691334|gb|EDN91072.1| SS1G_00474 [Sclerotinia sclerotiorum 1980]
  misc_feature (18)..(192): NCBI GI: 85115018 Blast Desc: NCU00881 [Neurospora crassa OR74A] gi|28926591|gb|EAA35561.1| conserved [Neurospora crassa OR74A]
  misc_feature (6)..(192): NCBI GI: 154322563 Blast Desc: BC1G_00624 [Botryotinia fuckeliana B05.10] gi|150847958|gb|EDN23151.1| BC1G_00624 [Botryotinia fuckeliana B05.10]
  misc_feature (1)..(235): NCBI GI: 116192739 Blast Desc: CHGG_06087 [Chaetomium globosum CBS 148.51] gi|88182000|gb|EAQ89468.1| CHGG_06087 [Chaetomium globosum CBS 148.51]
  misc_feature (6)..(221): NCBI GI: 119479557 Blast Desc: NFIA_078500 [Neosartorya fischeri NRRL 181] gi|119407961|gb|EAW17910.1| conserved [Neosartorya fischeri NRRL 181]
  misc_feature (4)..(212): NCBI GI: 119183682 Blast Desc: CIMG_06742 [Coccidioides immitis RS] gi|240109674|gb|EER27843.1| conserved [Coccidioides posadasii C735 delta SOWgp]
  misc_feature (6)..(221): NCBI GI: 146324121 Blast Desc: conserved [Aspergillus fumigatus Af293] gi|129558058|gb|EAL91719.2| conserved [Aspergillus fumigatus Af293] gi|159126506|gb|EDP51622.1| conserved [Aspergillus A1163]
  misc_feature (14)..(224): NCBI GI: 169780588 Blast Desc: [Aspergillus oryzae RIB40] gi|238505238|ref|XP_002383848.1| conserved [Aspergillus flavus NRRL3357] gi|83773498|dbj|BAE63625.1| protein product oryzae]
  misc_feature: Useful for introducing or modulating the production of volatile compounds
MLSSIILAVSAATLASAHTIITYPGWRGNNLHTNDDWPYGMQWTYPCGGIPLTKNRTYWPTTGGAVAFQPGWFQGHSTALLYINLGVGTDGPDGGPLNMSNPMMAPIQLQGPSNGPYPGTVCFPQVPLPTNFTMNEGDNATIQIVEIAQHGAALFSCVDITFVPPGDSRIADVNSSNCYNSSDLGFAQLYSITTTAADSTANNATSAATRMLSSPSTWAWMGYLPVFLGAAALLL

SEQ ID NO: 4571 - DNA, 1585 bp, Muscodor strobelii
  misc_feature: SGI EST ID NO. CUFF.11928.1
  misc_feature: Variant of the nucleotide sequence at SEQ ID NO 4569
tcccattcaaaatcgtaatatctatcctctaccgccagcctgcttttcctcccgaactttctgcttcctatactctcctgctgaagaccatctttccgaccacgataacctcattagtcccctaatcgaattctctaccacagcgaagctattgaacgcaggtcgtccgcatagctgtgatacgcctccatattttccagagcactatactccaaactcctcatctcatcttgggggccaaatcgggcattgagcgaaggcgcacattggtttatccggaacactctgtatctcgcaatcgaagcacttggaacattgacatcgcctcaaagcaagagcgcagcgctcacaacctaggttttcacctgattttccacaattcgcgtatcagcgacatatccagacagaatgctttcctcaataatattagccgtctcggccgccaccctcgcgtctgcacacacaatcatcacatatcctggatggcgaggtaacaacttacacacaaatgatgactggccatatggcatgcaatggacctatccatgcggtggtatcccattgaccaagaaccggacatactggccaacgactggtggtgcagtggctttccagccgggttggttccagggacattcaacggcactcctatacatcaacttgggcgtcggcaccgatggacctgacggcggtccgttgaacatgtcgaaccccatgatggctccaatccagcttcaaggcccgtcgaacggcccttacccaggcacagtctgcttcccccaggtgccgcttccaaccaacttcaccatgaacgagggggacaatgcgacaatccaaatcgttgagattgctcaacacggtgctgccttgttctcatgcgtcgatatcaccttcgtaccgccaggcgactcgcgcatcgctgatgtcaactcatcgaactgctacaatagttctgaccttggcttcgcacagctctactccatcactacgacggcggccgatagcacggccaacaacgccacgagcgccgcgaccaggatgctctcctcaccatctacatgggcttggatgggctatttgccggtgtttctcggtgcagcggctttattactataaaagaaaatatgacgagagcatgcacgatgaggaaagatatgacagagaccaaaagtgcttgcgatgagctgcgtctcgaaattttatacccaatatttaaactgtacattgttctacctcttatacgtcagctatcttcagcaatcagaccgaactagagcagttctcgggcttggatatgagctgttggtctattaattcgggcagcgttgtggtatacggcgctgaggcgtttagttatcgcttgttatagcaggagatatcgaatttcaatccaaaacttagaaagttcacgcatcaccattgttcgattgtgcaaactttatgattttacagttaggaagttggatcgagtcagacacagacctatactccgtttttctaaccagctagtatgttcaagctatataactttccacggggagatcctcgtaagcaaccaggttggagtcattgtagtcacaaatca

SEQ ID NO: 4572 - DNA, 1998 bp, Muscodor strobelii
  misc_feature: SGI cDNA ID NO. 561218
  misc_feature: Encodes the peptide sequence at SEQ ID NO 4573
atgtctctaacttacggatccagtggagaacctatcttcattgaagaagactctccccaattctccatcatcgaagatcaaatggctgccccaaaagccagcgacgagacgaagaaggagaagaaggagaagaagcctaaaaaggagaaagcccctccaaaagagaaaaagccgaaagaacctaagcccaaggaagccaagactaagaaaactgggaaaactgcaaaggccaatgcttcaagaggccagcccgtaaaagctgctcgtcttgtcagctctcgctttgctaattttggctggcacacaaaaattgacaatgaggttgaagagatggcgaaggccatcggttcagaggtagatgcgatgtatctcctgcagaaggaacgagacagtccagtcagagccttatcgatgcgcaacgcggtgttctatgagcaccagcaactatgtgatcctcacttgatctctacgccggcgatcgaccacgtcgatttatttagcgaaaaacaggaaacgataaagaccgtaatggacatcattaaatgcagacgtccagaaaccggcgaaaatgagttacatatgcattacttcttcgagggaatgagaaagcgcgagtttttgttatggcctatactgattcacgacgtctggattactttctttgcgaggcttgaagcttgtgactcacttcatagggagattacagattttgcgatcgtcgatccctcggccgagaatcgggaggtaagagaagagttcgtgctggaacgtctcgcaatcatcctccgcgaagcaaagataaggatgaatttcgatgtcgctaggtctctccgactggcagatgttgactctcggtgggaaacgggttatgtttcatgggcagtatcccgtgaattcatgcgacggctctcgaagctcctatggctccgaagccgtgaccccgatgccactgccgacgacttcttgtgggatgattttgaggaactgtacaactttgactcttaccgagagagcatgatggtagcatgtgcgctacaagcgattcgcaagtccaaccacaactaccgcatcggcatcgagacaccgagcgaaaactgtctatacttgcccgacaagctcagaccattgaggaaggacgtggcagacgaaaagtggcatacgttcgagtcagacgcaaagcacattgaaccactcgaaggaggcttaaacccctcaccaaaatccgtaccggtaaccccatccgagtctcgtgctgcctcgccaactccgccaccgggcagtgagcagcaagatgttatggaagggaacgaggatatggatgttgaggaagagggtgaccgagatatctcgccggcggctgctcccaaagaagatcttataatggaggatgtcagttccgacacgaaggttgagcagaatatggttactgagccgaattccccgactgcagctccggacgaagttattgatgaagcagccgacggacctattattaaagcaactgacgaaccagctgatgaagtccgagctgcgccggttccggacatgggaggcacgtcacttgaatttgaggattatcaggctactgctcatagtcttaacaacagcaccgacagtgcacaaatacccgggctccacctccttcgtcgatctgtttctccatcgccttctagtcagaggccaagtgagatacaggctgaggaaagacctgctagtctcctagccgcccctcgaagcccagtgcttgtcggtgtgacgccaacttacgggctttctccacatgtatcgtctggggaaggatccgaagctggagacgatgctggcgacctagaatcacatcctaccattacacctgcccaggctctggctcagtcagcgcttgaaactttgtggcgaaaggaattaagcccagaaaaacgagagcgcgatgaggacgttaacgagaacgaaggacgctctccaaagcgtgttcgagttgaggatgagggtgaaaagtaa

SEQ ID NO: 4573 - protein, 665 aa, Muscodor strobelii
  misc_feature: SGI Peptide ID NO. 561218
MSLTYGSSGEPIFIEEDSPQFSIIEDQMAAPKASDETKKEKKEKKPKKEKAPPKEKKPKEPKPKEAKTKKTGKTAKANASRGQPVKAARLVSSRFANFGWHTKIDNEVEEMAKAIGSEVDAMYLLQKERDSPVRALSMRNAVFYEHQQLCDPHLISTPAIDHVDLFSEKQETIKTVMDIIKCRRPETGENELHMHYFFEGMRKREFLLWPILIHDVWITFFARLEACDSLHREITDFAIVDPSAENREVREEFVLERLAIILREAKIRMNFDVARSLRLADVDSRWETGYVSWAVSREFMRRLSKLLWLRSRDPDATADDFLWDDFEELYNFDSYRESMMVACALQAIRKSNHNYRIGIETPSENCLYLPDKLRPLRKDVADEKWHTFESDAKHIEPLEGGLNPSPKSVPVTPSESRAASPTPPPGSEQQDVMEGNEDMDVEEEGDRDISPAAAPKEDLIMEDVSSDTKVEQNMVTEPNSPTAAPDEVIDEAADGPIIKATDEPADEVRAAPVPDMGGTSLEFEDYQATAHSLNNSTDSAQIPGLHLLRRSVSPSPSSQRPSEIQAEERPASLLAAPRSPVLVGVTPTYGLSPHVSSGEGSEAGDDAGDLESHPTITPAQALAQSALETLWRKELSPEKRERDEDVNENEGRSPKRVRVEDEGEK

SEQ ID NO: 4574 - DNA, 1011 bp, Muscodor strobelii
  misc_feature: SGI cDNA ID NO. 561219
  misc_feature: Encodes the peptide sequence at SEQ ID NO 4575
atgagactatattccacaggcgggactggatttattgcgtcccatgtcttggatgtgctgctagaggctggtttcttcgttgtcgtcacagcgagatccgaagcaaaaggcaaggcaatcgtagagtctgtcagaccacatcataatgtcgctttcgttgtcgtggaagacatcgcagtggatggagcattcgataatgtcttcaagtccgcggagtcgccttttacttacgtggtacatactgcatcgccctatcacctcaacgtccaggatcctgtcagggacttcctcgacccagcgattaagggaacgaccggactgttaaagtcgatcaaagcacatgctccgacggtaaaacgtgtagtcatcacctcatcctcagcagccatcttgaacccgaagaaccatgcaaagacttatgatgagacttactgggcatctacgacttggcaggatgccatcgaaaatccgcaaaagaatgcttacaaagcgagcaaggtgttttctgagaaggcggcctggaaattcatcgaggatgaaagaccaaacttcgacttagcagtaataaattccacttatgtatttggaccagttcaaagaaatctgtcgagtctagaggcaatgaacacgtcgaaccatcgcatccgcgatatgatgcaaggcaagatgaaggatggtcttcatccgacagcacccgtcttcacttgggtagacgtacgggacgttgctgcggcgcatttgaacgccattacggtgcagaaagccggtggtcatcgattctacgttgttggcggccacttctccaacaaggagatttgcgacatcatccgggtccgtttcccctctctagcttctcgtctgccagatgatccagtcgacgacttaccgcacgatgtttatcacttcaacaatacaaaatctcgacaaatactgggcctcaagtacacggatctcgaaaagtgcgtttccgatactgttcgctctattcgaactctattccctgacctttga

SEQ ID NO: 4575 - protein, 336 aa, Muscodor strobelii
  misc_feature: SGI Peptide ID NO. 561219
  misc_feature (3)..(264): Pfam Id: PF01370 Pfam Desc: NAD dependent epimerase/dehydratase family
  misc_feature (3)..(129): Pfam Id: PF01370 Pfam Desc: NAD dependent epimerase/dehydratase family
  misc_feature (1)..(329): NCBI GI: 119480963 Blast Desc: ketoreductase [Neosartorya fischeri NRRL 181] gi|119408664|gb|EAW18613.1| ketoreductase [Neosartorya fischeri NRRL 181]
  misc_feature (1)..(329): NCBI GI: 255950364 Blast Desc: Pc22g20490 [Penicillium chrysogenum Wisconsin 54-1255] gi|211592966|emb|CAP99337.1| Pc22g20490 [Penicillium chrysogenum Wisconsin 54-1255]
  misc_feature (2)..(332): NCBI GI: 115396004 Blast Desc: conserved [Aspergillus terreus NIH2624] gi|114193210|gb|EAU34910.1| conserved [Aspergillus terreus NIH2624]
  misc_feature (1)..(329): NCBI GI: 121715436 Blast Desc: ketoreductase [Aspergillus clavatus NRRL 1] gi|119403484|gb|EAW13901.1| ketoreductase [Aspergillus clavatus NRRL 1]
  misc_feature (3)..(329): NCBI GI: 71001360 Blast Desc: ketoreductase [Aspergillus fumigatus Af293] gi|66852999|gb|EAL93323.1| ketoreductase [Aspergillus fumigatus Af293] gi|159129436|gb|EDP54550.1| ketoreductase [Aspergillus
  misc_feature (2)..(329): NCBI GI: 67539614 Blast Desc: AN5977.2 [Aspergillus nidulans FGSC A4] gi|40738536|gb|EAA57726.1| AN5977.2 [Aspergillus nidulans FGSC A4] gi|259479840|tpe|CBF70432.1| TPA: ketoreductase AFUA_2G10280)
  misc_feature (2)..(332): NCBI GI: 145252534 Blast Desc: An16g04710 [Aspergillus niger] gi|134083332|emb|CAK42899.1| protein product [Aspergillus niger]
  misc_feature (1)..(329): NCBI GI: 238493317 Blast Desc: ketoreductase [Aspergillus flavus NRRL3357] gi|220696389|gb|EED52731.1| ketoreductase [Aspergillus flavus NRRL3357]
  misc_feature (2)..(329): NCBI GI: 145241700 Blast Desc: An09g01810 [Aspergillus niger] gi|134078036|emb|CAK40119.1| protein product [Aspergillus niger]
  misc_feature (3)..(329): NCBI GI: 212539175 Blast Desc: NAD dependent epimerase/dehydratase, [Penicillium marneffei ATCC 18224] gi|210069485|gb|EEA23576.1| NAD dependent epimerase/dehydratase, [Penicillium marneffei ATCC 18224]
  misc_feature (1)..(329): SWISSPROT Homolog: EC 1.1.1.283 Methylglyoxal reductase (NADPH-dependent)
MRLYSTGGTGFIASHVLDVLLEAGFFVVVTARSEAKGKAIVESVRPHHNVAFVVVEDIAVDGAFDNVFKSAESPFTYVVHTASPYHLNVQDPVRDFLDPAIKGTTGLLKSIKAHAPTVKRVVITSSSAAILNPKNHAKTYDETYWASTTWQDAIENPQKNAYKASKVFSEKAAWKFIEDERPNFDLAVINSTYVFGPVQRNLSSLEAMNTSNHRIRDMMQGKMKDGLHPTAPVFTWVDVRDVAAAHLNAITVQKAGGHRFYVVGGHFSNKEICDIIRVRFPSLASRLPDDPVDDLPHDVYHFNNTKSRQILGLKYTDLEKCVSDTVRSIRTLFPDL

SEQ ID NO: 4576 - DNA, 1611 bp, Muscodor strobelii
  misc_feature: SGI EST ID NO. CUFF.11637.0
  misc_feature: Variant of the nucleotide sequence at SEQ ID NO 4574
tggatgtgctgctagaggctggtttcttcgttgtcgtcacagcgagatccgaagcaaaaggcaaggcaatcgtagagtctgtcagaccacatcataatgtcgctttcgttgtcgtggaagacatcgcagtggatggagcattcgataatgtcttcaagtccgcggagtcgccttttacttacgtggtacatactgcatcgccctatcacctcaacgtccaggatcctgtcagggacttcctcgacccagcgattaagggaacgaccggactgttaaagtcgatcaaagcacatgctccgacggtaaaacgtgtagtcatcacctcatcctcagcagccatcttgaacccgaagaaccatgcaaagacttatgatgagacttactgggcatctacgacttggcaggatgccatcgaaaatccgcaaaagaatgcttacaaagcgagcaaggtgttttctgagaaggcggcctggaaattcatcgaggatgaaagaccaaacttcgacttagcagtaataaattccacttatgtatttggaccagttcaaagaaatctgtcgagtctagaggcaatgaacacgtcgaaccatcgcatccgcgatatgatgcaaggcaagatgaaggatggtcttcatccgacagcacccgtcttcacttgggtagacgtacgggacgttgctgcggcgcatttgaacgccattacggtgcagaaagccggtggtcatcgattctacgttgttggcggccacttctccaacaaggagatttgcgacatcatccgggtccgtttcccctctctagcttctcgtctgccagatgatccagtcgacgacttaccgcacgatgtttatcacttcaacaatacaaaatctcgacaaatactgggcctcaagtacacggatctcgaaaagtgcgtttccgatactgttcgctctattcgaactctattccctgacctttgaatgttcaacctcatactcgatggagcatggagcatggatgaacatttacaaattggatacctttacatcgaaatattaagtagtaagaattttagtggccgtactcgttatctcagcttattacctttaggagaaggacttccgcaacaatgtagtccttggtcggtagctgtgcgatgtgtctgaattgccgcttctataggaaggagaattgatatgtaggcgattagtaggagcttaccgaaagaaacagtcgcatctccatattacttcacagagttgtataccatatggagtagatcacataagtcgtgcaacgcgacgatgcaggctaggagacagatcttgtgcatatattgccatctctcaccgaaaagcctatcagaagcctttttaaatggactgacttgagaacttgtctaatctgacagaccgatcccgactttttcggcggaggataatggttcgtggtctacagaccgccgaatttgtgagtattaggacttggagtctgaaagcctcccgtcgccaagacataatgcattgcttgacacaacgtaccgcggcgcatctattgcgttccatgatatggcatgaagatatcaatatggtgctctcgccgcataggtaaataagtcgtattctttcg

SEQ ID NO: 4577 - DNA, 1308 bp, Muscodor strobelii
  misc_feature: SGI cDNA ID NO. 561220
  misc_feature: Elevated expression when VOC is produced
  misc_feature: Encodes the peptide sequence at SEQ ID NO 4578
atgacaaccggaagcaaaccccgcattcacgttgcgattataggaggaggaataactggcgtgatcctcgcacttgcgctcgagaaacgaggcgtatcctacacgctctacgaacgcgcaccagcattcactgagcttggtgctgggataggcttcagccccaacgctgaacgggccctcaaggttgttgaccccaaagtatatgaggtgtacaagactgtcgcatcgtcgaatgttgaagaggaatatttccaatgggtagacggaagccgaaataacgaggttatcgcccgactcttgatcggtgttgacgaatttcagggcgggagaaggtcagatttcttggaggcgtggtcggcgttgatacccagccacagagccaagtttagtaaggaaatagagtcaattgtgcagaaagatgatggcaaagtgactctccgtttcaaggatggttgcgaggaggaatgtgatattgccatcggatgcgatggtatccgctcacgggtacgacagctgattctcggggacgcaaacccagcagcatatccgcgatactcgaataagttctgctttcgggctttactcccaatggataaagcgcaagcggtcttaggcgagaagcgaacaatggaaaggttcatgtacaacgggccagatgcgcacattatcacgtatcctgttgccaaaaacacatttctgaatgcgctatttgttataactgacccgagtccttggctcagtgagcggcatacggcttctggggataaggaagaagcggtgcacgcatacgcgacttggcatccggccgtgcgaggtctagtcgaccttctaccagagaaactcgacaagtgggcgatattcgacatgtacgattgccccacgacacattacaacgttggcagcgtggctctcgctggcgacgcagcacatgcttctggtccccatctcggttctggggctggatttggcattgaagatgcgctcgtcctagctagtatcctcaaattagcagacgacgagagttcgcgaacaccagggaaagggcgcaagcagatatgtcacgatgcgctttctgcctacaatgaggtccggtttgaccgcgatcaatggcttcctggcgctacccgaaaggccgtcgaactctttcagtggcaagacgaagaagtccgcgacgaccatgtaaagtttttggaacacgtgaccccgctgtatcataaaatttggaaatatgatattgatgaaatggtaagaggcgcagagaagcagctgagatcgatcatagcgaagcagtcgccttcccatttatag

SEQ ID NO: 4578 - protein, 435 aa, Muscodor strobelii
  misc_feature: SGI Peptide ID NO. 561220
  misc_feature (8)..(355): Pfam Id: PF01494 Pfam Desc: FAD binding domain
  misc_feature (9)..(425): NCBI GI: 116197216 Blast Desc: CHGG_05206 [Chaetomium globosum CBS 148.51] gi|88181119|gb|EAQ88587.1| CHGG_05206 [Chaetomium globosum CBS 148.51]
  misc_feature (1)..(414): NCBI GI: 171676624 Blast Desc: protein product [Podospora anserina] gi|170936379|emb|CAP61036.1| protein product [Podospora anserina]
  misc_feature (3)..(421): NCBI GI: 145612986 Blast Desc: MGG_08293 [Magnaporthe grisea 70-15] gi|145020063|gb|EDK04291.1| MGG_08293 [Magnaporthe grisea 70-15]
  misc_feature (6)..(417): NCBI GI: 212539233 Blast Desc: salicylate hydroxylase, [Penicillium marneffei ATCC 18224] gi|210069514|gb|EEA23605.1| salicylate hydroxylase, [Penicillium marneffei ATCC 18224]
  misc_feature (9)..(417): NCBI GI: 242760657 Blast Desc: monoxygenase, [Talaromyces stipitatus ATCC 10500] gi|218723231|gb|EED22648.1| monoxygenase, [Talaromyces stipitatus ATCC 10500]
  misc_feature (9)..(413): NCBI GI: 164424093 Blast Desc: NCU11363 [Neurospora crassa OR74A] gi|157070370|gb|EDO65038.1| [Neurospora crassa OR74A]
  misc_feature (9)..(430): NCBI GI: 115390232 Blast Desc: protein TOXD [Aspergillus terreus NIH2624] gi|114195017|gb|EAU36717.1| protein TOXD [Aspergillus terreus NIH2624]
  misc_feature (5)..(428): NCBI GI: 145241706 Blast Desc: An09g01840 [Aspergillus niger] gi|134078039|emb|CAK40122.1| protein product [Aspergillus niger]
  misc_feature (5)..(370): NCBI GI: 121700482 Blast Desc: FAD binding domain protein [Aspergillus clavatus NRRL 1] gi|119396648|gb|EAW07080.1| FAD binding domain protein [Aspergillus clavatus NRRL 1]
  misc_feature (23)..(424): NCBI GI: 238506379 Blast Desc: salicylate 1-monooxygenase SalA [Aspergillus flavus NRRL3357] gi|220689104|gb|EED45455.1| salicylate 1-monooxygenase SalA [Aspergillus flavus NRRL3357]
  misc_feature (32)..(423): SWISSPROT Homolog: EC 1.14.13.1 Salicylate 1-monooxygenase
  misc_feature: Useful for introducing or modulating the production of volatile compounds
MTTGSKPRIHVAIIGGGITGVILALALEKRGVSYTLYERAPAFTELGAGIGFSPNAERALKVVDPKVYEVYKTVASSNVEEEYFQWVDGSRNNEVIARLLIGVDEFQGGRRSDFLEAWSALIPSHRAKFSKEIESIVQKDDGKVTLRFKDGCEEECDIAIGCDGIRSRVRQLILGDANPAAYPRYSNKFCFRALLPMDKAQAVLGEKRTMERFMYNGPDAHIITYPVAKNTFLNALFVITDPSPWLSERHTASGDKEEAVHAYATWHPAVRGLVDLLPEKLDKWAIFDMYDCPTTHYNVGSVALAGDAAHASGPHLGSGAGFGIEDALVLASILKLADDESSRTPGKGRKQICHDALSAYNEVRFDRDQWLPGATRKAVELFQWQDEEVRDDHVKFLEHVTPLYHKIWKYDIDEMVRGAEKQLRSIIAKQSPSHL

SEQ ID NO: 4579 - DNA, 1603 bp, Muscodor strobelii
  misc_feature: SGI EST ID NO. CUFF.11642.0
  misc_feature: Variant of the nucleotide sequence at SEQ ID NO 4577
gatcccaagctctcggattcattagcatcttcaattgttccgacggtgcggaacaaaataagcacacctagcgtaagtcatacctgcgaacctcaacttgatgtaattatcgtaacaaatcggagctcacaacggtcaaaaacaactggctggattgatgtcgccgtgggtttcgtgacttattcctccgcggatgatattgttttgcataaaattctctcccgcggcctatccgtgcttcatcttatattcgggctattcagtcttcaaaacaaccacgcgttaccaccatgacaaccggaagcaaaccccgcattcacgttgcgattataggaggaggaataactggcgtgatcctcgcacttgcgctcgagaaacgaggcgtatcctacacgctctacgaacgcgcaccagcattcactgagcttggtgctgggataggcttcagccccaacgctgaacgggccctcaaggttgttgaccccaaagtatatgaggtgtacaagactgtcgcatcgtcgaatgttgaagaggaatatttccaatgggtagacggaagccgaaataacgaggttatcgcccgactcttgatcggtgttgacgaatttcagggcgggagaaggtcagatttcttggaggcgtggtcggcgttgatacccagccacagagccaagtttagtaaggaaatagagtcaattgtgcagaaagatgatggcaaagtgactctccgtttcaaggatggttgcgaggaggaatgtgatattgccatcggatgcgatggtatccgctcacgggtacgacagctgattctcggggacgcaaacccagcagcatatccgcgatactcgaataagttctgctttcgggctttactcccaatggataaagcgcaagcggtcttaggcgagaagcgaacaatggaaaggttcatgtacaacgggccagatgcgcacattatcacgtatcctgttgccaaaaacacatttctgaatgcgctatttgttataactgacccgagtccttggctcagtgagcggcatacggcttctggggataaggaagaagcggtgcacgcatacgcgacttggcatccggccgtgcgaggtctagtcgaccttctaccagagaaactcgacaagtgggcgatattcgacatgtacgattgccccacgacacattacaacgttggcagcgtggctctcgctggcgacgcagcacatgcttctggtccccatctcggttctggggctggatttggcattgaagatgcgctcgtcctagctagtatcctcaaattagcagacgacgagagttcgcgaacaccagggaaagggcgcaagcagatatgtcacgatgcgctttctgcctacaatgaggtccggtttgaccgcgatcaatggcttcctggcgctacccgaaaggccgtcgaactctttcagtggcaagacgaagaagtccgcgacgaccatgtaaagtttttggaacacgtgaccccgctgtatcataaaatttggaaatatgatattgatgaaatggtaagaggcgcagagaagcagctgagatcgatcatagcgaagcagtcgccttcccatttatagacaga

SEQ ID NO: 4580 - DNA, 801 bp, Muscodor strobelii
  misc_feature: SGI cDNA ID NO. 561221
  misc_feature: Reduced expression when VOC is produced
  misc_feature: Encodes the peptide sequence at SEQ ID NO 4581
atgtctaatactagcagaagtcagaggcacattgatgccgtcacaggcgcgcgagtcctcgtcatcgggggcactgcggggatcgggaagggtgtcgcgtctgccgcgttggcaacgggagccaaggtgttcctctcttcatctagcacgtctaaagtatccgccgcgatagccgaatttcgggggatctactccaatgccagtatctttggcacggctgccgatctctctaaaactgacacggttgaatccgatttggaaaaggtgctacaggtcgccgtcgcggaactgggcgggccactcgatcacatcgcgtacactgcgggagacgctttcgacttcgaacccctttccgccgtaactgctgcaaacgcatactcctcttggacggtacgctacctcggcccgttactcatagggaaactagtggctgtcaatccgggtgcatatttaaagccagccgcgagctcatctatcaccctcacatcaggtatccatggaagcaagccattccctggcctatcgaagtcaatcgcttggtgcggtgccgtcgagactctgaccaaggcgttcgcggttgatctcgctccaatacgggtgaacaacgtgtctcccggcgctatccgtactccgatgctgcaaaagctcggcgaggaagccatcgctgactttgctcatcagcatctcacgaagaaagtgggcgagattcaagaaatagcagaggcataccttctcagcatgcgctgctcgttcgtcacaggtcagcaacttgtcattgatggtggatatacattcaagtag

SEQ ID NO: 4581 - protein, 266 aa, Muscodor strobelii
  misc_feature: SGI Peptide ID NO. 561221
  misc_feature (7)..(262): NCBI GI: 189199066 Blast Desc: short chain dehydrogenase [Pyrenophora tritici-repentis Pt-1C-BFP] gi|187982969|gb|EDU48457.1| short chain dehydrogenase [Pyrenophora tritici-repentis Pt-1C-BFP]
  misc_feature (9)..(262): NCBI GI: 85093767 Blast Desc: NCU02335 [Neurospora crassa OR74A] gi|28921213|gb|EAA30525.1| [Neurospora crassa OR74A]
  misc_feature (11)..(266): NCBI GI: 70983666 Blast Desc: oxidoreductase, short chain dehydrogenase/reductase family [Aspergillus fumigatus Af293] gi|66844986|gb|EAL85322.1| oxidoreductase, short chain dehydrogenase/reductase family Af293]
  misc_feature (9)..(262): NCBI GI: 169612836 Blast Desc: SNOG_09545 [Phaeosphaeria nodorum SN15] gi|111061690|gb|EAT82810.1| SNOG_09545 [Phaeosphaeria nodorum SN15]
  misc_feature (19)..(257): NCBI GI: 115383944 Blast Desc: conserved [Aspergillus terreus NIH2624] gi|114196211|gb|EAU37911.1| conserved [Aspergillus terreus NIH2624]
  misc_feature (1)..(266): NCBI GI: 119484640 Blast Desc: short-chain dehydrogenase [Neosartorya fischeri NRRL 181] gi|119410255|gb|EAW20202.1| short-chain dehydrogenase [Neosartorya fischeri NRRL 181]
  misc_feature (9)..(262): NCBI GI: 189188664 Blast Desc: short chain dehydrogenase [Pyrenophora tritici-repentis Pt-1C-BFP] gi|187972277|gb|EDU39776.1| short chain dehydrogenase [Pyrenophora tritici-repentis Pt-1C-BFP]
  misc_feature (10)..(266): NCBI GI: 169766322 Blast Desc: [Aspergillus oryzae RIB40] gi|83765487|dbj|BAE55630.1| protein product [Aspergillus oryzae]
  misc_feature (10)..(266): NCBI GI: 238483031 Blast Desc: oxidoreductase, short chain dehydrogenase/reductase family [Aspergillus flavus NRRL3357] gi|220700804|gb|EED57142.1| oxidoreductase, short chain dehydrogenase/reductase family flavus
  misc_feature (18)..(262): NCBI GI: 154310582 Blast Desc: BC1G_06765 [Botryotinia fuckeliana B05.10] gi|150851305|gb|EDN26498.1| BC1G_06765 [Botryotinia fuckeliana B05.10]
  misc_feature (19)..(264): SWISSPROT Homolog: EC 1.1.1.163 Cyclopentanol dehydrogenase
  misc_feature: Useful for introducing or modulating the production of volatile compounds
MSNTSRSQRHIDAVTGARVLVIGGTAGIGKGVASAALATGAKVFLSSSSTSKVSAAIAEFRGIYSNASIFGTAADLSKTDTVESDLEKVLQVAVAELGGPLDHIAYTAGDAFDFEPLSAVTAANAYSSWTVRYLGPLLIGKLVAVNPGAYLKPAASSSITLTSGIHGSKPFPGLSKSIAWCGAVETLTKAFAVDLAPIRVNNVSPGAIRTPMLQKLGEEAIADFAHQHLTKKVGEIQEIAEAYLLSMRCSFVTGQQLVIDGGYTFK

SEQ ID NO: 4582 - DNA, 1229 bp, Muscodor strobelii
  misc_feature: SGI EST ID NO. CUFF.11648.0
  misc_feature: Variant of the nucleotide sequence at SEQ ID NO 4580
cgaactcatagaatcagacatctcatcattaaaagtatcttgtataaccccctgcaccagtctcctgcatgtccggtctctcgcgccattactactgagaccatcggcaactactctcgcgtacctataattgaagtacaagatgtctaatactagcagaagtcagaggcacattgatgccgtcacaggcgcgcgagtcctcgtcatcgggggcactgcggggatcgggaagggtgtcgcgtctgccgcgttggcaacgggagccaaggtgttcctctcttcatctagcacgtctaaagtatccgccgcgatagccgaatttcgggggatctactccaatgccagtatctttggcacggctgccgatctctctaaaactgacacggttgaatccgatttggaaaaggtgctacaggtcgccgtcgcggaactgggcgggccactcgatcacatcgcgtacactgcgggagacgctttcgacttcgaacccctttccgccgtaactgctgcaaacgcatactcctcttggacggtacgctacctcggcccgttactcatagggaaactagtggctgtcaatccgggtgcatatttaaagccagccgcgagctcatctatcaccctcacatcaggtatccatggaagcaagccattccctggcctatcgaagtcaatcgcttggtgcggtgccgtcgagactctgaccaaggcgttcgcggttgatctcgctccaatacgggtgaacaacgtgtctcccggcgctatccgtactccgatgctgcaaaagctcggcgaggaagccatcgctgactttgctcatcagcatctcacgaagaaagtgggcgagattcaagaaatagcagaggcataccttctcagcatgcgctgctcgttcgtcacaggtcagcaacttgtcattgatggtggatatacattcaagtagtcgcccaaatattcgtaaccagagagtttaggctcaatccttctcgagtgctgcgttctccctaatacccacagaccatacagccatgtcccgaccgaacagaaggcgcaataaatggcatcaccgaatgccacgatgtttatagtacccgaataatgcaaggaataaaatacaaccataatgatttttccccgacaaaacttgatatatatatatgcacaagcatatatccattccaaatggataatgttcacaaggatgtgttgctggtgctattagatatggg

SEQ ID NO: 4583 - DNA, 2196 bp, Muscodor strobelii
  misc_feature: SGI cDNA ID NO. 561222
  misc_feature: Encodes the peptide sequence at SEQ ID NO 4584
atggtcgagtttgagtccaggccctcagtccatcaggattttgagagatatctgacactctaccgcaaccatatcgaaatcatggcgggatgggacggcgctgccgctgaccttcgccgtcggcggcttctgatggatatcaaggaactcgtcaccaagccctatcctcgcattcagatacatccctgcgacgatgatctcactgctgcttgtcttgtgctgtcccctgagcactatccagatctacatctctccatcaagttcccagaccaatatccaatctgcgccccaagcgtcagaatgaacagtcacataagacatcccaatgtcttcagtagcggctacatctgcgctggtatcctgaataccgatgaggagtacacgagcgcttacacacttaaagctattgccatccagcttctgagcttttttgacagtgaatctgtcgaacagcaaggcggtactttgaaggtgaagctagccgattaccaggatatcagcaagaagtacttgaaggatgactaccactgtcgcaaatgtggattcggaccggattttcaaccacgtcaaccgacgctagcatcgtgggtaggttcgaactcgagatcccgttcaggcgtgagacagcccgctcctccggcctctttcaacgggcttgtcgaccatgacccagagcagtggccggctataggaagcctcgccatctcttggcccaagcgtgacgcaagtgacgagggaacgtcaaactcggttcggccgactgacaagaccaaagacggagtgttctacatggatcatttgcccaatgaactcattctgttgatccttgagaaattggatgattttgaggatctcgccaacttcgcccgtgcctggcccagggtcagccacctagttcgagattttgacgtgatccgacaacgcgagctccagtgcttctgtttaaaggaaggatatcagtcaacggaactaggagtcggcgtagaagtgtctaggggagatatctcctcagagttcgacctcatctcgagaaaggcctttgaagacctctgcattcgcacgtctatcaacaacatgcctttccaatactggctcccgcttcctatctctcgacgacactggaagcagaccaccagctacgcggatgagaccctgactcagatcaaagcagtgatgaactctaaggcccagttccatgagcaggtactttacacgttcatgaacaatatcgttgtgcggcttaatcaaaccgctgagcagcacagcatccattatgctttaccaaagagtaacctgcgtcatgcttctgagaaggcaatcgaatcatacttccatctcttccatctactcgtttgcttagcaacagagaatgcagagatcgtgaggcgcgccaacaatctattacattctttcattgccggcaagcgatctaagacggattgtccgaatctaggccacctgctcattgcgctcttgatctctgatgttcaagtcgacgaggcgctcgttaaagccatcatcaccgaggcaattactcgcaatgttgtctggcttctcagcaagaaaggcgccaacatggcagaactatcttatctggagcgagatgaagtatccgcttaccgactcaagaagactttcgagggttcccgaacttcgtatcgcttattgatgttttctgagctattccgccgcacagcacgcccttcacacgagaagtccctgcagcaagttcgggacgaactattcgatcgccacggcgccccgccgcgagacgcagctggaaagctcgctgctgaagtccgacgcctccataacattggcaatttccctgacttcatgcgtgagatgggcgttgtcaatcttccggatgccaagaagttcacaggtgttctcagaagcacggtaaatcttagcatgcataaaggctactctgcctgggccatgtcgcaggtcaaggcaatgcaattacgctacaccaaggatccagacgtgtgcctcacgaaagaagagccctctggaatcaagattatcaacaactttcagggcattagcttcttccctaatgacaataagggtacgaacggcggccactcaagtcatcggggtggaagaggtggacacgatggctcggctaggggcagtcactacggcaatggccgtggacgcggtaggggccgtggaggacgtggtcattag

SEQ ID NO: 4584 - protein, 731 aa, Muscodor strobelii
  misc_feature: SGI Peptide ID NO. 561222
  misc_feature (42)..(171): Pfam Id: PF00179 Pfam Desc: Ubiquitin-conjugating enzyme
  misc_feature (83)..(146): Pfam Id: PF00179 Pfam Desc: Ubiquitin-conjugating enzyme
  misc_feature (36)..(589): NCBI GI: 169598834 Blast Desc: SNOG_02223 [Phaeosphaeria nodorum SN15] gi|111069315|gb|EAT90435.1| SNOG_02223 [Phaeosphaeria nodorum SN15]
  misc_feature (264)..(688): NCBI GI: 261361366 Blast Desc: conserved [Verticillium albo-atrum VaMs.102]
  misc_feature (401)..(618): NCBI GI: 156032645 Blast Desc: SS1G_14020 [Sclerotinia sclerotiorum 1980] gi|154699422|gb|EDN99160.1| SS1G_14020 [Sclerotinia sclerotiorum 1980]
  misc_feature (42)..(643): NCBI GI: 170089135 Blast Desc: [Laccaria bicolor S238N-H82] gi|164649050|gb|EDR13292.1| [Laccaria bicolor S238N-H82]
  misc_feature (34)..(643): NCBI GI: 169862072 Blast Desc: [Coprinopsis cinerea okayama7#130] gi|116501244|gb|EAU84139.1| [Coprinopsis cinerea okayama7#130]
  misc_feature (40)..(187): NCBI GI: 156032645 Blast Desc: SS1G_14020 [Sclerotinia sclerotiorum 1980] gi|154699422|gb|EDN99160.1| SS1G_14020 [Sclerotinia sclerotiorum 1980]
  misc_feature (41)..(643): NCBI GI: 284085209 Blast Desc: NAEGRDRAFT_59412 [Naegleria gruberi]
  misc_feature (42)..(663): NCBI GI: 169862070 Blast Desc: [Coprinopsis cinerea okayama7#130] gi|116501243|gb|EAU84138.1| [Coprinopsis cinerea okayama7#130]
  misc_feature (298)..(643): NCBI GI: 281208250 Blast Desc: PPL_04853 [Polysphondylium pallidum PN500]
  misc_feature (256)..(643): NCBI GI: 284091628 Blast Desc: ubiquitin-conjugating enzyme family protein [Naegleria gruberi]
MVEFESRPSVHQDFERYLTLYRNHIEIMAGWDGAAADLRRRRLLMDIKELVTKPYPRIQIHPCDDDLTAACLVLSPEHYPDLHLSIKFPDQYPICAPSVRMNSHIRHPNVFSSGYICAGILNTDEEYTSAYTLKAIAIQLLSFFDSESVEQQGGTLKVKLADYQDISKKYLKDDYHCRKCGFGPDFQPRQPTLASWVGSNSRSRSGVRQPAPPASFNGLVDHDPEQWPAIGSLAISWPKRDASDEGTSNSVRPTDKTKDGVFYMDHLPNELILLILEKLDDFEDLANFARAWPRVSHLVRDFDVIRQRELQCFCLKEGYQSTELGVGVEVSRGDISSEFDLISRKAFEDLCIRTSINNMPFQYWLPLPISRRHWKQTTSYADETLTQIKAVMNSKAQFHEQVLYTFMNNIVVRLNQTAEQHSIHYALPKSNLRHASEKAIESYFHLFHLLVCLATENAEIVRRANNLLHSFIAGKRSKTDCPNLGHLLIALLISDVQVDEALVKAIITEAITRNVVWLLSKKGANMAELSYLERDEVSAYRLKKTFEGSRTSYRLLMFSELFRRTARPSHEKSLQQVRDELFDRHGAPPRDAAGKLAAEVRRLHNIGNFPDFMREMGVVNLPDAKKFTGVLRSTVNLSMHKGYSAWAMSQVKAMQLRYTKDPDVCLTKEEPSGIKIINNFQGISFFPNDNKGTNGGHSSHRGGRGGHDGSARGSHYGNGRGRGRGRGGRGH

SEQ ID NO: 4585 - DNA, 2961 bp, Muscodor strobelii
  misc_feature: SGI EST ID NO. CUFF.11651.0
  misc_feature: Variant of the nucleotide sequence at SEQ ID NO 4583
ggttgggtggtccaatagcgtcactctcagggcttccggtgagctgaaaagggcaggccgagagtggagctttccaggtgatcgccgccgccgtgggaatgaggctcatagcactacaactgtatgcgtacctcttagaacacagagcacagatttcctttattggatacctcatgatcattactagaatcatcaggcggatacagcctgaggagatgacatgcgccaggtactccccaaggtcaatgcgcccgcccgggcacccggggtgacccatcagttacgccgtagtgactcaggtttgccggcatccagcttgcactgccaggccacactgagacgaggcaaacaaagaggcgcgcggtgcagcgcttgttggcaagcaacatatttaaaacccagagggtcgtctcttctggtcttctgttttcctttctgcttcatggggttttggagccaaggacatcttcagtcattgtctctgaataaccatcgccaacatcctatgccccgtatttgccgtcgcatttcatcccatggtcgagtttgagtccaggccctcagtccatcaggattttgagagatatctgacactctaccgcaaccatatcgaaatcatggcgggatgggacggcgctgccgctgaccttcgccgtcggcggcttctgatggatatcaaggaactcgtcaccaagccctatcctcgcattcagatacatccctgcgacgatgatctcactgctgcttgtcttgtgctgtcccctgagcactatccagatctacatctctccatcaagttcccagaccaatatccaatctgcgccccaagcgtcagaatgaacagtcacataagacatcccaatgtcttcagtagcggctacatctgcgctggtatcctgaataccgatgaggagtacacgagcgcttacacacttaaagctattgccatccagcttctgagcttttttgacagtgaatctgtcgaacagcaaggcggtactttgaaggtgaagctagccgattaccaggatatcagcaagaagtacttgaaggatgactaccactgtcgcaaatgtggattcggaccggattttcaaccacgtcaaccgacgctagcatcgtgggtaggttcgaactcgagatcccgttcaggcgtgagacagcccgctcctccggcctctttcaacgggcttgtcgaccatgacccagagcagtggccggctataggaagcctcgccatctcttggcccaagcgtgacgcaagtgacgagggaacgtcaaactcggttcggccgactgacaagaccaaagacggagtgttctacatggatcatttgcccaatgaactcattctgttgatccttgagaaattggatgattttgaggatctcgccaacttcgcccgtgcctggcccagggtcagccacctagttcgagattttgacgtgatccgacaacgcgagctccagtgcttctgtttaaaggaaggatatcagtcaacggaactaggagtcggcgtagaagtgtctaggggagatatctcctcagagttcgacctcatctcgagaaaggcctttgaagacctctgcattcgcacgtctatcaacaacatgcctttccaatactggctcccgcttcctatctctcgacgacactggaagcagaccaccagctacgcggatgagaccctgactcagatcaaagcagtgatgaactctaaggcccagttccatgagcaggtactttacacgttcatgaacaatatcgttgtgcggcttaatcaaaccgctgagcagcacagcatccattatgctttaccaaagagtaacctgcgtcatgcttctgagaaggcaatcgaatcatacttccatctcttccatctactcgtttgcttagcaacagagaatgcagagatcgtgaggcgcgccaacaatctattacattctttcattgccggcaagcgatctaagacggattgtccgaatctaggccacctgctcattgcgctcttgatctctgatgttcaagtcgacgaggcgctcgttaaagccatcatcaccgaggcaattactcgcaatgttgtctggcttctcagcaagaaaggcgccaacatggcagaactatcttatctggagcgagatgaagtatccgcttaccgactcaagaagactttcgagggttcccgaacttcgtatcgcttattgatgttttctgagctattccgccgcacagcacgcccttcacacgagaagtccctgcagcaagttcgggacgaactattcgatcgccacggcgccccgccgcgagacgcagctggaaagctcgctgctgaagtccgacgcctccataacattggcaatttccctgacttcatgcgtgagatgggcgttgtcaatcttccggatgccaagaagttcacaggtgttctcagaagcacggtaaatcttagcatgcataaaggctactctgcctgggccatgtcgcaggtcaaggcaatgcaattacgctacaccaaggatccagacgtgtgcctcacgaaagaagagccctctggaatcaagattatcaacaactttcagggcattagcttcttccctaatgacaataagggtacgaacggcggccactcaagtcatcggggtggaagaggtggacacgatggctcggctaggggcagtcactacggcaatggccgtggacgcggtaggggccgtggaggacgtggtcattaggacacggtggcttgatatcgagacgtattgaatcccgaaattgtatactagctacatatttgcggtactccgtaaatagttgagcaacccttgttgctccagataccctagtatgaatgacaacatcgtcatcatatacgaattatagccgcgctctaagtactaatcaggcagtggtccatttcgaagagactacccttttaacgtgtttccgctacgtagagcacct

SEQ ID NO: 4586 - DNA, 696 bp, Muscodor strobelii
  misc_feature: SGI cDNA ID NO. 561223
  misc_feature: Elevated expression when VOC is produced
  misc_feature: Encodes the peptide sequence at SEQ ID NO 4587
atgccggaaataacactttaccgcaaagacggagcctgttcttgggtgccacacgctctgctccggcatctgaacatcccattcaaggacttccccatggaattcttacccaacgacggtggaatgcagggcatcaacggttcaatatcccgagaagagttccgtcgcacagtcaatccagcaggttacgtccccgttctcgtcgttgacggcgagatcattaccgaacaactcgcagtgttgaacatgattgtgttcctagcatcagatcagggaaaggcgcaagcgatgctcggtcgcacacctcttgaaaggacccgagttattcagtggatggcttggttgtctgatacactacactcaaacggctttggtgcggccatgcatccgaagcgctatgtcgaggaccataccgagatgtatgatgtggtggtggcgaaaggagtcaagactattcaggaatctttcgaccgtattgataagcatatgaaggataggcaattcatggtcggcgatgccctgacaattgtcgacctgtttatatatgtgatctggggatggtcaaacttcatgacagttggaattgaggcaacggaagaaaagtatgcttcgtacgcgaagcatctgaaacgtttggagactttggatactgtgaaagagacgtcgcaggcagaaaatagagacttgtacttctag

SEQ ID NO: 4587 - protein, 231 aa, Muscodor strobelii
  misc_feature: SGI Peptide ID NO. 561223
  misc_feature (115)..(216): Pfam Id: PF00043 Pfam Desc: Glutathione S-transferase, C-terminal domain
  misc_feature (144)..(216): Pfam Id: PF00043 Pfam Desc: Glutathione S-transferase, C-terminal domain
  misc_feature (1)..(231): NCBI GI: 46137837 Blast Desc: FG10434.1 [Gibberella zeae PH-1]
  misc_feature (1)..(228): NCBI GI: 256720684 Blast Desc: NECHADRAFT_50171 [Nectria haematococca mpVI 77-13-4]
  misc_feature (1)..(231): NCBI GI: 171676796 Blast Desc: protein product [Podospora anserina] gi|170936465|emb|CAP61122.1| protein product [Podospora anserina]
  misc_feature (1)..(231): NCBI GI: 39941308 Blast Desc: MGG_05565 [Magnaporthe grisea 70-15] gi|145022234|gb|EDK06254.1| MGG_05565 [Magnaporthe grisea 70-15]
  misc_feature (1)..(221): NCBI GI: 240277633 Blast Desc: glutathione S-transferase [Ajellomyces capsulatus H143]
  misc_feature (2)..(230): NCBI GI: 169599993 Blast Desc: SNOG_02826 [Phaeosphaeria nodorum SN15] gi|111068437|gb|EAT89557.1| SNOG_02826 [Phaeosphaeria nodorum SN15]
  misc_feature (1)..(222): NCBI GI: 261202518 Blast Desc: glutathione S-transferase [Ajellomyces dermatitidis SLH14081] gi|239590570|gb|EEQ73151.1| glutathione S-transferase [Ajellomyces dermatitidis SLH14081]
  misc_feature (1)..(221): NCBI GI: 239612295 Blast Desc: glutathione S-transferase [Ajellomyces dermatitidis ER-3]
  misc_feature (1)..(221): NCBI GI: 225557087 Blast Desc: glutathione S-transferase [Ajellomyces capsulatus G186AR]
  misc_feature (1)..(213): NCBI GI: 238491184 Blast Desc: glutathione S-transferase GST-6.0, [Aspergillus flavus NRRL3357] gi|220697242|gb|EED53583.1| glutathione S-transferase GST-6.0, [Aspergillus flavus NRRL3357]
  misc_feature (4)..(225): SWISSPROT Homolog: EC 2.5.1.18 Glutathione transferase
  misc_feature: Useful for introducing or modulating the production of volatile compounds
MPEITLYRKDGACSWVPHALLRHLNIPFKDFPMEFLPNDGGMQGINGSISREEFRRTVNPAGYVPVLVVDGEIITEQLAVLNMIVFLASDQGKAQAMLGRTPLERTRVIQWMAWLSDTLHSNGFGAAMHPKRYVEDHTEMYDVVVAKGVKTIQESFDRIDKHMKDRQFMVGDALTIVDLFIYVIWGWSNFMTVGIEATEEKYASYAKHLKRLETLDTVKETSQAENRDLYF

SEQ ID NO: 4588 - DNA, 3295 bp, Muscodor strobelii
  misc_feature: SGI EST ID NO. CUFF.11654.0
  misc_feature: Variant of the nucleotide sequence at SEQ ID NO 4586
caatattataatcttatgtttatgtgatgaccatagcctttacttgattagacaaagtatgggtcgtccgctttgtcatccacccatgtaatgttgggacgaaatgttgagatacactgttgggagaaccggcgaaagggacactatcttacaaaattacggaatagctacgccaaacgaaatgcgattgaagtcgggtgtttcggagtcgtatgtgggatgatttacaatcaagccgtcaggatcgctactcaaccttttcaacaaatagcatctaaaattgactcattcttgaaatcgaatgagagaacacgtatgggactatgaggcatataaagtgacagtattgatctgagttaagtatggctacctaccgtctaatccagcgcatacgtctctttacctcacaggctttatgaattctctcccctgggacataacaacattcggtaccatttttgacattgagatctcacaactcacataaaaatgccggaaataacactttaccgcaaagacggagcctgttcttgggtgccacacgctctgctccggcatctgaacatcccattcaaggacttccccatggaattcttacccaacgacggtggaatgcagggcatcaacggttcaatatcccgagaagagttccgtcgcacagtcaatccagcaggttacgtccccgttctcgtcgttgacggcgagatcattaccgaacaactcgcagtgttgaacatgattgtgttcctagcatcagatcagggaaaggcgcaagcgatgctcggtcgcacacctcttgaaaggacccgagttattcagtggatggcttggttgtctgatacactacactcaaacggctttggtgcggccatgcatccgaagcgctatgtcgaggaccataccgagatgtatgatgtggtggtggcgaaaggagtcaagactattcaggaatctttcgaccgtattgataagcatatgaaggataggcaattcatggtcggcgatgccctgacaattgtcgacctgtttatatatgtgatctggggatggtcaaacttcatgacagttggaattgaggcaacggaagaaaagtatgcttcgtacgcgaagcatctgaaacgtttggagactttggatactgtgaaagagacgtcgcaggcagaaaatagagacttgtacttctagctaaagcagaaaaaaccgtcatatctacaggtattgacgagctgcattaatactgtatagtttttagtcttaattgatcactgcccagtcatttacctccatcttcgtagttccaactgtggacatgatatttcgcgggtatgggatcatttttaaaacaaagattggatcgcccagtctcaaatcaaatctaagattagatgctgaactttgaagctaatatatagtaaaatgtctcccattgtcccggcacctgcacaccagggtatcatccgtaggtataaatctctcattgacgccgtgtagctcgtgatgctgttcttgataagtgaaacaaaggggggcataagcgatgccgaaacacagtcgattctcaatgatcattatcaccaagcttttacagcaaacggcgagatgacgtgctgatatacgacctcgctaggagctagcttttatatagtgcacgtgaccgccactcgtcatattctctctttgtgattgcctaataagcggtgtagatgaacacgcaatggccaagaatgatattaaaaagtccacaccccttctggggttgacatgaactgtgaaattcagtatatcgactgtttggcctttggcactccatcgcgattcaaactaagatcgtcaactgagccatgatgtgaaaagggagagggcgcggtttcatcatcgtagaatgtcgttgcgggtggtagtggtttcagcatatggctcggcgacgaaggagaggtaaactcgtggagctcgtcatccattctgatccacgaatctctttgtgtctggcgatagtaacccgatcggcgtttgttatttggccctccagtagtagagctatgtgtcgttcgctttcgccgtaagtcacgcactgagccgtagatgtttggcgcgtttgctacaaatattgacacgagcatctggaccgatgcccataagcttcgcgttgactgtcccgaatcgtggtcgcgtactgagacaattctaatgatgctgatgatgatacaaaatgaccccaatgcgaagagggtatacaaggtgacgtgttccgcaatagttctctttcgtaacttaacgattggccacgcaatgacgatcaacatcagatcaagtataatgttgctaatcgtttgggtatagagttgaccataggcttgtacgcatgttccaggaggcgggctgacttgccaaaagagggtgataggtcgacactcgaggaaagtaacaagctcgatagcaatgaaagtcgctaagacgcttgcccacgtaaatttgatcatagtggcgacccaattgattcccgatgtaattcgcgtgtagaacacaagcagaatacagatctgcagccacaggacagcagtgatgatagctcgagcggctagaacgagtatgctacccgtctggacctgctgaaggtcgtcgggtgacaaagaaccgccatgtttagcagcgtcggcagcattcccaaggtcgagatagtaggtattgaggatgattctcccggtgactgtcacaactgacgcggacacgagaatgaagctcacatctactcgttcacgtcttagcagcgacaaggcgatgcgggaaacgaggatgaggagggacaggactgtcgtggcatagttgacttgcttggcgacgagtgcctcggacatgatctgttacaggtcacacgatccgccagccgaggaggatggcttccataacacagcattctggtagttgcgaatgccaacaaaacaacaacagaatggaaactacaatgcctgtgggtgaatcgacaaaaatgtgtaagggacggtgctctatccggagagacgggtactggagggtaatacaccacctttaattcagtcaaagaagcccaccgtcagctcgatactccacgtggagtaggggttgggatccccattattcgtgctccggcaataatgaggcagcacaataggcgacaaatagctagccggccgtacacgctgatcgcggttgtggtcagctaagcggatatgcagcctgtgccagaggattccgatgagctgaccatcgtggcagaacagaaccgactaatagcaagaatcggaacaggggcctgccg

SEQ ID NO: 4589 - DNA, 1080 bp, Muscodor strobelii
  misc_feature: SGI cDNA ID NO. 561224
  misc_feature: Encodes the peptide sequence at SEQ ID NO 4590
atgtccgaggcactcgtcgccaagcaagtcaactatgccacgacagtcctgtccctcctcatcctcgtttcccgcatcgccttgtcgctgctaagacgtgaacgagtagatgtgagcttcattctcgtgtccgcgtcagttgtgacagtcaccgggagaatcatcctcaatacctactatctcgaccttgggaatgctgccgacgctgctaaacatggcggttctttgtcacccgacgaccttcagcaggtccagacgggtagcatactcgttctagccgctcgagctatcatcactgctgtcctgtggctgcagatctgtattctgcttgtgttctacacgcgaattacatcgggaatcaattgggtcgccactatgatcaaatttacgtgggcaagcgtcttagcgactttcattgctatcgagcttgttactttcctcgagtgtcgacctatcaccctcttttggcaagtcagcccgcctcctggaacatgcgtacaagcctatggtcaactctatacccaaacgattagcaacattatacttgatctgatgttgatcgtcattgcgtggccaatcgttaagttacgaaagagaactattgcggaacacgtcaccttgtataccctcttcgcattggggtcattttgtatcatcatcagcatcattagaattgtctcagtacgcgaccacgattcgggacagtcaacgcgaagcttatgggcatcggtccagatgctcgtgtcaatatttgtagcaaacgcgccaaacatctacggctcagtgcgtgacttacggcgaaagcgaacgacacatagctctactactggagggccaaataacaaacgccgatcgggttactatcgccagacacaaagagattcgtggatcagaatggatgacgagctccacgagtttacctctccttcgtcgccgagccatatgctgaaaccactaccacccgcaacgacattctacgatgatgaaaccgcgccctctcccttttcacatcatggctcagttgacgatcttagtttgaatcgcgatggagtgccaaaggccaaacagtcgatatactga

SEQ ID NO: 4590 - protein, 359 aa, Muscodor strobelii
  misc_feature: SGI Peptide ID NO. 561224
  misc_feature (16)..(301): NCBI GI: 242792387 Blast Desc: conserved [Talaromyces stipitatus ATCC 10500] gi|218718530|gb|EED17950.1| conserved [Talaromyces stipitatus ATCC 10500]
  misc_feature (45)..(280): NCBI GI: 39960810 Blast Desc: MGG_09467 [Magnaporthe grisea 70-15] gi|145010962|gb|EDJ95618.1| MGG_09467 [Magnaporthe grisea 70-15]
  misc_feature (78)..(278): NCBI GI: 261356767 Blast Desc: conserved [Verticillium albo-atrum VaMs.102]
  misc_feature (32)..(288): NCBI GI: 46114746 Blast Desc: FG03215.1 [Gibberella zeae PH-1]
  misc_feature (64)..(277): NCBI GI: 256730069 Blast Desc: NECHADRAFT_6955 [Nectria haematococca mpVI 77-13-4]
  misc_feature (65)..(300): NCBI GI: 238497029 Blast Desc: conserved [Aspergillus flavus NRRL3357] gi|220694630|gb|EED50974.1| conserved [Aspergillus flavus NRRL3357]
  misc_feature (17)..(279): NCBI GI: 259480202 Blast Desc: TPA: conserved [Aspergillus nidulans FGSC A4]
  misc_feature (15)..(274): NCBI GI: 261352544 Blast Desc: conserved [Verticillium albo-atrum VaMs.102]
  misc_feature (102)..(284): NCBI GI: 255935805 Blast Desc: Pc13g04940 [Penicillium chrysogenum Wisconsin 54-1255] gi|211583549|emb|CAP91563.1| Pc13g04940 [Penicillium chrysogenum Wisconsin 54-1255]
  misc_feature (10)..(283): NCBI GI: 46116240 Blast Desc: FG03962.1 [Gibberella zeae PH-1]
MSEALVAKQVNYATTVLSLLILVSRIALSLLRRERVDVSFILVSASVVTVTGRIILNTYYLDLGNAADAAKHGGSLSPDDLQQVQTGSILVLAARAIITAVLWLQICILLVFYTRITSGINWVATMIKFTWASVLATFIAIELVTFLECRPITLFWQVSPPPGTCVQAYGQLYTQTISNIILDLMLIVIAWPIVKLRKRTIAEHVTLYTLFALGSFCIIISIIRIVSVRDHDSGQSTRSLWASVQMLVSIFVANAPNIYGSVRDLRRKRTTHSSTTGGPNNKRRSGYYRQTQRDSWIRMDDELHEFTSPSSPSHMLKPLPPATTFYDDETAPSPFSHHGSVDDLSLNRDGVPKAKQSIY

SEQ ID NO: 4591 - DNA, 3295 bp, Muscodor strobelii
  misc_feature: SGI EST ID NO. CUFF.11654.0
  misc_feature: Variant of the nucleotide sequence at SEQ ID NO 4589
cggcaggcccctgttccgattcttgctattagtcggttctgttctgccacgatggtcagctcatcggaatcctctggcacaggctgcatatccgcttagctgaccacaaccgcgatcagcgtgtacggccggctagctatttgtcgcctattgtgctgcctcattattgccggagcacgaataatggggatcccaacccctactccacgtggagtatcgagctgacggtgggcttctttgactgaattaaaggtggtgtattaccctccagtacccgtctctccggatagagcaccgtcccttacacatttttgtcgattcacccacaggcattgtagtttccattctgttgttgttttgttggcattcgcaactaccagaatgctgtgttatggaagccatcctcctcggctggcggatcgtgtgacctgtaacagatcatgtccgaggcactcgtcgccaagcaagtcaactatgccacgacagtcctgtccctcctcatcctcgtttcccgcatcgccttgtcgctgctaagacgtgaacgagtagatgtgagcttcattctcgtgtccgcgtcagttgtgacagtcaccgggagaatcatcctcaatacctactatctcgaccttgggaatgctgccgacgctgctaaacatggcggttctttgtcacccgacgaccttcagcaggtccagacgggtagcatactcgttctagccgctcgagctatcatcactgctgtcctgtggctgcagatctgtattctgcttgtgttctacacgcgaattacatcgggaatcaattgggtcgccactatgatcaaatttacgtgggcaagcgtcttagcgactttcattgctatcgagcttgttactttcctcgagtgtcgacctatcaccctcttttggcaagtcagcccgcctcctggaacatgcgtacaagcctatggtcaactctatacccaaacgattagcaacattatacttgatctgatgttgatcgtcattgcgtggccaatcgttaagttacgaaagagaactattgcggaacacgtcaccttgtataccctcttcgcattggggtcattttgtatcatcatcagcatcattagaattgtctcagtacgcgaccacgattcgggacagtcaacgcgaagcttatgggcatcggtccagatgctcgtgtcaatatttgtagcaaacgcgccaaacatctacggctcagtgcgtgacttacggcgaaagcgaacgacacatagctctactactggagggccaaataacaaacgccgatcgggttactatcgccagacacaaagagattcgtggatcagaatggatgacgagctccacgagtttacctctccttcgtcgccgagccatatgctgaaaccactaccacccgcaacgacattctacgatgatgaaaccgcgccctctcccttttcacatcatggctcagttgacgatcttagtttgaatcgcgatggagtgccaaaggccaaacagtcgatatactgaatttcacagttcatgtcaaccccagaaggggtgtggactttttaatatcattcttggccattgcgtgttcatctacaccgcttattaggcaatcacaaagagagaatatgacgagtggcggtcacgtgcactatataaaagctagctcctagcgaggtcgtatatcagcacgtcatctcgccgtttgctgtaaaagcttggtgataatgatcattgagaatcgactgtgtttcggcatcgcttatgcccccctttgtttcacttatcaagaacagcatcacgagctacacggcgtcaatgagagatttatacctacggatgataccctggtgtgcaggtgccgggacaatgggagacattttactatatattagcttcaaagttcagcatctaatcttagatttgatttgagactgggcgatccaatctttgttttaaaaatgatcccatacccgcgaaatatcatgtccacagttggaactacgaagatggaggtaaatgactgggcagtgatcaattaagactaaaaactatacagtattaatgcagctcgtcaatacctgtagatatgacggttttttctgctttagctagaagtacaagtctctattttctgcctgcgacgtctctttcacagtatccaaagtctccaaacgtttcagatgcttcgcgtacgaagcatacttttcttccgttgcctcaattccaactgtcatgaagtttgaccatccccagatcacatatataaacaggtcgacaattgtcagggcatcgccgaccatgaattgcctatccttcatatgcttatcaatacggtcgaaagattcctgaatagtcttgactcctttcgccaccaccacatcatacatctcggtatggtcctcgacatagcgcttcggatgcatggccgcaccaaagccgtttgagtgtagtgtatcagacaaccaagccatccactgaataactcgggtcctttcaagaggtgtgcgaccgagcatcgcttgcgcctttccctgatctgatgctaggaacacaatcatgttcaacactgcgagttgttcggtaatgatctcgccgtcaacgacgagaacggggacgtaacctgctggattgactgtgcgacggaactcttctcgggatattgaaccgttgatgccctgcattccaccgtcgttgggtaagaattccatggggaagtccttgaatgggatgttcagatgccggagcagagcgtgtggcacccaagaacaggctccgtctttgcggtaaagtgttatttccggcatttttatgtgagttgtgagatctcaatgtcaaaaatggtaccgaatgttgttatgtcccaggggagagaattcataaagcctgtgaggtaaagagacgtatgcgctggattagacggtaggtagccatacttaactcagatcaatactgtcactttatatgcctcatagtcccatacgtgttctctcattcgatttcaagaatgagtcaattttagatgctatttgttgaaaaggttgagtagcgatcctgacggcttgattgtaaatcatcccacatacgactccgaaacacccgacttcaatcgcatttcgtttggcgtagctattccgtaattttgtaagatagtgtccctttcgccggttctcccaacagtgtatctcaacatttcgtcccaacattacatgggtggatgacaaagcggacgacccatactttgtctaatcaagtaaaggctatggtcatcacataaacataagattataatattg

SEQ ID NO: 4592 - DNA, 1602 bp, Muscodor strobelii
  misc_feature: SGI cDNA ID NO. 561225
  misc_feature: Encodes the peptide sequence at SEQ ID NO 4593
atgcccatgtccaacacaatctcagttattcttgccctagcggtgtggctttctgtcacattcgcagctcgaagatttctgtcgtcgaagatgagaaacttaccgccgttgccgcctggaccaaaagggcttcccttcgtagggaacttgaacgacctgccgaagccgggtgacttcgaggccactcactggctcaagcacaaggagctttatggaccaataagttcggtgacgatcatggggcagtcgacaatatttctccacgacccaaatcttgcactggagctcttcgagaagcggtcactcaagtactctgggcgacctaagcaggtttttgccggtgagatggtgggttgggacaatattgcgggactcatcccatttgactcgcgctggcgaactatgcgtaagaatatgagcaccgttctagggtccactgttgctgttgggaagttcaacaatcttcaacaggcggaggttgcacactttctacttcacctcttgagaagcccaagcaagcttccggaccacattagaaaggaagtcggcaccgttgtgttgaaaatatcgtacggatataatgcggaacctcataaagaggatgttatgatcaacatggctcaaacagctatggataaattcggttacgctgccgtgccatggacgttcatggtcgatattttccccttcctacgtgtcttaccagaatggatgcccggcacatcgttcaaagagactgcacgacagtgggcggctgaattgacagaagcgactgaaaagccctacgcattcgtaaagcaccaaatggagcacggatcgcataccccatctttgatgtcgcgactaatagataacggggaggaggatacttatgtgaagactctcaacaagcattctgcaatcaccctctttttgacaggcgctgatactacttcatcggccattggacttttcttcttggctatgtcgatgtatccagacgtccagaagcgcgcacaagaagaaatcgatcaagtcattggcaaagaaaggctacccacagccgctgatcgtgtttaccttccgtatgttaacgccctcgtgaaagaaacgttgagatggcatacggtggtgcccttgggcctcccacatgagaattccgaggatgacatatgcaatggctatttgattccgaaaggctcgctcgtaatcccaaatatttggcacttcactcacgatcccgacgtttatcatgagcccaacgaatttaaacctgaccgatttttgggcacggacggtcgcgacccggagccgaatccatacagatacatttttggcttcggtcgacgcatctgccctggccgcatcctagccgacagcactttgtttttgacagtcgcgcagtccttggcggtgttcgatatcgacgttcatggaggcgatcgcggccgagactggaagccaactttcacacctggcgtaatcagctttcctgatccatatcaatgtgccatcaagccaagatctcctcatcatgaagaattgatcaactccctagaagaagcatatccctggcagcaaggcgatgcacagacattggagagtatgcagattccaacctaa

SEQ ID NO: 4593 - protein, 533 aa, Muscodor strobelii
  misc_feature: SGI Peptide ID NO. 561225
  misc_feature (38)..(498): Pfam Id: PF00067 Pfam Desc: Cytochrome P450
  misc_feature (297)..(498): Pfam Id: PF00067 Pfam Desc: Cytochrome P450
  misc_feature (38)..(145): Pfam Id: PF00067 Pfam Desc: Cytochrome P450
  misc_feature (48)..(507): NCBI GI: 256724264 Blast Desc: NECHADRAFT_53484 [Nectria haematococca mpVI 77-13-4]
  misc_feature (46)..(531): NCBI GI: 242817323 Blast Desc: cytochrome P450 oxidoreductase OrdA-like, [Talaromyces stipitatus ATCC 10500] gi|218713397|gb|EED12821.1| cytochrome P450 oxidoreductase OrdA-like, [Talaromyces stipitatus ATCC
  misc_feature (46)..(529): NCBI GI: 212530868 Blast Desc: cytochrome P450 oxidoreductase OrdA-like, [Penicillium marneffei ATCC 18224] gi|210074989|gb|EEA29076.1| cytochrome P450 oxidoreductase OrdA-like, [Penicillium marneffei ATCC 18224]
  misc_feature (6)..(530): NCBI GI: 169599354 Blast Desc: SNOG_02494 [Phaeosphaeria nodorum SN15] gi|111069586|gb|EAT90706.1| SNOG_02494 [Phaeosphaeria nodorum SN15]
  misc_feature (9)..(530): NCBI GI: 189195692 Blast Desc: O-methylsterigmatocystin oxidoreductase [Pyrenophora tritici-repentis Pt-1C-BFP] gi|187980063|gb|EDU46689.1| O-methylsterigmatocystin oxidoreductase [Pyrenophora Pt-1C-BFP]
  misc_feature (46)..(531): NCBI GI: 115401660 Blast Desc: conserved [Aspergillus terreus NIH2624] gi|114190359|gb|EAU32059.1| conserved [Aspergillus terreus NIH2624]
  misc_feature (46)..(531): NCBI GI: 238494768 Blast Desc: cytochrome P450, [Aspergillus flavus NRRL3357] gi|220695270|gb|EED51613.1| cytochrome P450, [Aspergillus flavus NRRL3357]
  misc_feature (46)..(530): NCBI GI: 121716160 Blast Desc: Cytochrome P450 oxidoreductase, [Aspergillus clavatus NRRL 1] gi|119403846|gb|EAW14263.1| Cytochrome P450 oxidoreductase, [Aspergillus clavatus NRRL 1]
  misc_feature (48)..(529): NCBI GI: 255944851 Blast Desc: Pc20g06670 [Penicillium chrysogenum Wisconsin 54-1255] gi|211587928|emb|CAP85996.1| Pc20g06670 [Penicillium chrysogenum Wisconsin 54-1255]
  misc_feature (1)..(530): NCBI GI: 169765434 Blast Desc: [Aspergillus oryzae RIB40] gi|83765043|dbj|BAE55186.1| protein product [Aspergillus oryzae]
  misc_feature (71)..(473): SWISSPROT Homolog: EC 1.14.13.21 Flavonoid 3'-monooxygenase
MPMSNTISVILALAVWLSVTFAARRFLSSKMRNLPPLPPGPKGLPFVGNLNDLPKPGDFEATHWLKHKELYGPISSVTIMGQSTIFLHDPNLALELFEKRSLKYSGRPKQVFAGEMVGWDNIAGLIPFDSRWRTMRKNMSTVLGSTVAVGKFNNLQQAEVAHFLLHLLRSPSKLPDHIRKEVGTVVLKISYGYNAEPHKEDVMINMAQTAMDKFGYAAVPWTFMVDIFPFLRVLPEWMPGTSFKETARQWAAELTEATEKPYAFVKHQMEHGSHTPSLMSRLIDNGEEDTYVKTLNKHSAITLFLTGADTTSSAIGLFFLAMSMYPDVQKRAQEEIDQVIGKERLPTAADRVYLPYVNALVKETLRWHTVVPLGLPHENSEDDICNGYLIPKGSLVIPNIWHFTHDPDVYHEPNEFKPDRFLGTDGRDPEPNPYRYIFGFGRRICPGRILADSTLFLTVAQSLAVFDIDVHGGDRGRDWKPTFTPGVISFPDPYQCAIKPRSPHHEELINSLEEAYPWQQGDAQTLESMQIPT

SEQ ID NO: 4594 - DNA, 969 bp, Muscodor strobelii
  misc_feature: SGI cDNA ID NO. 561226
  misc_feature: Elevated expression when VOC is produced
  misc_feature: Encodes the peptide sequence at SEQ ID NO 4595
atgatcgcatctctgcgtagcttgtcgcgaagggtggaggctgccgggtctgtgacacacgagctgccggtgcggcccgaggaacctgtgcaggagccagggctcgaggatgtggaactagacctcgtggttgctagcaggaaatccgaagacacgtcttggttccatgagcacatgccatcgacgcacaaaagcatctacgtggtcgacgacccaaccgctgctttaacagtgccagaaaacaagggccgagagtccatggtctatctcacgtacataattgatcactacgagaagttgccgcagaatatagtattcttgcacgcctcgcggtttgcatggcataacgatgacccggactatgacgcgttaccgccattacgcaacttccaattaccctatctccaagaggccggatatgcgaatcttcgctgcgcttgggtcattgggtgccctcgcgaaattcaccctatcgacgacgcggctaagacagatgggatcgaattaacggttccggaagccattgaaaaactcggcacggctaatttgacgacaagacatgtttacaaaaaggtctacgaagagcttttccctggtctgcctattcccgaactcgtcgcagtgagctgttgctcccagtttggtgtcacccgtgacacagtgagaagtcgtccgaaagaagactacatccgctaccgcgactggcttctagcctcgcctttatgggatgatatcacgggtcgtatatttgaattctcctggcacatcatgttccataaagaagcataccattgccccgcagctgcagactgctactgtaaaacttttggatattgcgatctggcttgtaacgacgactctagctgtggtcccgagcgatacactttgcctggatattctacgctcccaaagggatggccgctggtcggctggaatggcgaaacgcgcaatttcacaggtccaatttaa

SEQ ID NO: 4595 - protein, 322 aa, Muscodor strobelii
  misc_feature: SGI Peptide ID NO. 561226
  misc_feature (42)..(321): NCBI GI: 116202329 Blast Desc: CHGG_09049 [Chaetomium globosum CBS 148.51] gi|88177567|gb|EAQ85035.1| CHGG_09049 [Chaetomium globosum CBS 148.51]
  misc_feature (37)..(322): NCBI GI: 242798286 Blast Desc: conserved [Talaromyces stipitatus ATCC 10500] gi|218716483|gb|EED15904.1| conserved [Talaromyces stipitatus ATCC 10500]
  misc_feature (29)..(319): NCBI GI: 238485576 Blast Desc: conserved [Aspergillus flavus NRRL3357] gi|220698905|gb|EED55244.1| conserved [Aspergillus flavus NRRL3357]
  misc_feature (35)..(320): NCBI GI: 256726521 Blast Desc: [Nectria haematococca mpVI 77-13-4]
  misc_feature (42)..(321): NCBI GI: 189207877 Blast Desc: conserved [Pyrenophora tritici-repentis Pt-1C-BFP] gi|187976365|gb|EDU42991.1| conserved [Pyrenophora tritici-repentis Pt-1C-BFP]
  misc_feature (29)..(319): NCBI GI: 169771823 Blast Desc: [Aspergillus oryzae RIB40] gi|83768240|dbj|BAE58379.1| protein product [Aspergillus oryzae]
  misc_feature (25)..(320): NCBI GI: 46124393 Blast Desc: FG06574.1 [Gibberella zeae PH-1]
  misc_feature (23)..(317): NCBI GI: 259480800 Blast Desc: TPA: conserved [Aspergillus nidulans FGSC A4]
  misc_feature (37)..(322): NCBI GI: 212541584 Blast Desc: conserved [Penicillium marneffei ATCC 18224] gi|210068246|gb|EEA22338.1| conserved [Penicillium marneffei ATCC 18224]
  misc_feature (41)..(317): NCBI GI: 255955449 Blast Desc: Pc21g14630 [Penicillium chrysogenum Wisconsin 54-1255] gi|211590188|emb|CAP96360.1| Pc21g14630 [Penicillium chrysogenum Wisconsin 54-1255]
  misc_feature: Useful for introducing or modulating the production of volatile compounds
MIASLRSLSRRVEAAGSVTHELPVRPEEPVQEPGLEDVELDLVVASRKSEDTSWFHEHMPSTHKSIYVVDDPTAALTVPENKGRESMVYLTYIIDHYEKLPQNIVFLHASRFAWHNDDPDYDALPPLRNFQLPYLQEAGYANLRCAWVIGCPREIHPIDDAAKTDGIELTVPEAIEKLGTANLTTRHVYKKVYEELFPGLPIPELVAVSCCSQFGVTRDTVRSRPKEDYIRYRDWLLASPLWDDITGRIFEFSWHIMFHKEAYHCPAAADCYCKTFGYCDLACNDDSSCGPERYTLPGYSTLPKGWPLVGWNGETRNFTGPI

SEQ ID NO: 4596 - DNA, 3302 bp, Muscodor strobelii
  misc_feature: SGI EST ID NO. CUFF.11679.0
  misc_feature: Variant of the nucleotide sequence at SEQ ID NO 4594
gtagatcgacgccagccaggcctggccagggagcgaatcccgctaaaagtcgttctatgttcctggcaagaattggtgctgtagacgaggcaaagggcgatatatgaccagaaacacatcgcgattctcaagtggacaagttcgtccataccaccgcgccggcgacaacacatagaatacatcattctattgtctttcttatatatacatattgatcgtatatatattttcttggtacctgtacatttggtggccgcgcgattgagccaggtgaagccgatgcatcgcggtctgctcgtgagtgagcagacccgtcactatgatcgcatctctgcgtagcttgtcgcgaagggtggtcatcttatcttctatcctaacttgttttttctggcattgacattatggagacgtgactatcaagcttccccacaagaatatgtcaatgtattacctagtgatcaggaggctgccgggtctgtgacacacgagctgccggtgcggcccgaggaacctgtgcaggagccagggctcgaggatgtggaactagacctcgtggttgctagcaggaaatccgaagacacgtcttggttccatgagcacatgccatcgacgcacaaaagcatctacgtggtcgacgacccaaccgctgctttaacagtgccagaaaacaagggccgagagtccatggtctatctcacgtacataattgatcactacgagaagttgccgcagaatatagtattcttgcacgcctcgcggtttgcatggcataacgatgacccggactatgacgcgttaccgccattacgcaacttccaattaccctatctccaagaggccggatatgcgaatcttcgctgcgcttgggtcattgggtgccctcgcgaaattcaccctatcgacgacgcggctaagacagatgggatcgaattaacggttccggaagccattgaaaaactcggcacggctaatttgacgacaagacatgtttacaaaaaggtctacgaagagcttttccctggtctgcctattcccgaactcgtcgcagtgagctgttgctcccagtttggtgtcacccgtgacacagtgagaagtcgtccgaaagaagactacatccgctaccgcgactggcttctagcctcgcctttatgggatgatatcacgggtcgtatatttgaattctcctggcacatcatgttccataaagaagcataccattgccccgcagctgcagactgctactgtaaaacttttggatattgcgatctggcttgtaacgacgactctagctgtggtcccgagcgatacactttgcctggatattctacgctcccaaagggatggccgctggtcggctggaatggcgaaacgcgcaatttcacaggtccaatttaacaactgcatacttgtcgcaaacagctttttgaattcgatgcaaattctggatattttgttttcaaggacaactcaagtcgaatgtccgtcacatgtgagtcattgctggccaccctttcttcttgtctccgcctattgacttcaggcgtagtgtggatggacacgcactggctaagattttgaaaatgctattcaagtcaggctacttatacgaaccaatatgtcattttatgctataagcgagcgattatcaattgtaatagacgaataaaatagacaccccattacatatctttatctatctggctcctgcccttttatgtccaagatcataccgcaatgaagaacatcagacctgcggcaacgagcgctattgagaacatggaagtcttggcggctgtgcagcccttgctatctacaacgacgcgttacaatggggttgggtaaggcaatactgccgacagcaaccttatcgtcaagccgcgccgtcactgtgatagaaagagccgcaaaaaggaaagatttcattgtactgattttcaaggctatttttctcagggtcaagagtcaagagtgaaaacagcgaagatcttgtctgatcggccaagacagcaagacgggctggggacaatgttaatcagatgcgatgcccatcgagccagcacgacctattgtttcgtcataaccgaggaaataagaatccttcacggctagcaatggcagcaaaatcacagtcctaacgtgcaaccgtaaggaggactcaacgggctccatgtggagaatacggccgtcctatttttggctcgatgatggcaatcacattcttccgactttttacatattctttcaccaagcatggagccgcaattggccattcgaccaatcgcccacgtggctccgatgattggcagttcccaatgccttaatatgagtctacaccatagtgccacgatattcactcataatgacggcagtaatacgttgcggcgaatattgcttcttccctagtcgagcatttggctgctatgcgacaactcaacgatgtattttcagccccaacgtagacatgcgcttttcgatctcccattcgaactgattctactcatatttgaatagattgttcactcacgtcggtttgctcgggtgatgcgaattcggatcatcagccgtaaggctcagcttcgtccactctatcgtggtcaaaggggcacgtgaagaatcgtattgagtcacctgacttacgtgagttccacaggccattctaggaatcgttttgacaatgcgcctcaaaatgcaggctacttccgtcgcgacaaagagggtccagaaccgccctgacaatcgaatttacattcttacataggatatcagatgtgcagagagaaatcaaacttcggtctatcgaatcgaatacgtgttattgctcggtgtccacgcgaaattgacgccgatatgacacacgaagcaataacaggatgcattcagtcgcttcttatttagttggcaccaacatacaagctggaagttattcttcaagaggctatcgctcatgttatagggctcatgtcatagtagaatgaatatcttagaatcgatatctatatcggcgccgtgcggctcggcaaggaagcatctgtgaaagacctcatttcggatgggatacaattccgcccaaccaatgagagagatgatatctaaagcgatgtctttggttgcgcgttccaagcggctgtagccgaaaggcgatatcggaatggttaagtcgcttctgacgtccgttgctgtatcgcaatgtcagggtcatctcacgatctgttcaacacgagctcgtttgggtagctagcacccataagcgtcgagaacttctcgattttgcttttaaccatagaccaattattgtatccagg

SEQ ID NO: 4597 - DNA, 7131 bp, Muscodor strobelii
  misc_feature: SGI cDNA ID NO. 561227
  misc_feature: Encodes the peptide sequence at SEQ ID NO 4598
atggcgacgacaccacccgcagccgacgaaccgtcggttgccattgcgcctgccacccacagccaagacaacgaccctttccattcctccttctccgcgtcaggcgcagcaagaaaccaccgatggtcccatttcgactcgtccaacttcgcacatggctcctttgcctcgcccgcccaagcgagacgcgttctcgaggcacatctagccgagacggaccggagaatggaagaagccggcaaggttggcacggcgctactgcaacaacgccaggtcatcatggaccacatggaagaggtcgacaaggttgaggccgaaggcgagctatcggaggacttgcgcgacaaactggtcgagatcgaaaaggactacaacgaggtcgcccgcgagagcgctcgtgcattcctgcccaagtcacgcgtctctagtagtgaggcggctgtgggctcacctttcgtgccagagggcaaaggtggcaggcgttccgtgagtccctccaaattcgaagcccaagcgacaggctcgcctacgaagctgagcgtgcccaaccgtaaaatccggaaccagccgtccaatcgcatccacgacatcgagttcgccgccgaaatcagcacttcgctcatttcccaggtgcgcaatctgcaaggcttgcttgccgaaaaggaggaagagctgagagacacgcgagccgagcagtcaagactcgaatatgaggccgagggtttccagcaacgactcaaggccctcgacgacagtgaacatcgctacaaggaggaaaactggaacctcgaaaccaaacttcaggagctcatggtcaaggatagagatgcctcggaccgcgagacgaaactgggccagaccctcaagcttctccaggccgagaaaaacgcagcccagcgagaactggatgagatcaagctgagccactcccgactctccgaagagcatgccgccagtgtcaagcatctcgacatcgagctcggcacggccaagcgaaacatggtcatgggcgagtccgagagggccgctatgcagcgcaagatagaggatctgacagggcagaatcaagagctcgccaaggcggtctcagcgtctcagcgtggccgggtgttggaacgggagtccatcttcggtatgagcgacgaggacttccagaccgccaacgaccacaccactcccgagcactccccacccccatcgcctgtcaagggcacacctcgtcactccatgctcgagtctgaaaccttgaagacatctctggctcacgcccaacgaaccatccaaagtctgcggaacaatgtccatcgagagaagacggaccggatggaaacgagaagactccttcaagaagcccgtgacgagatcgaaaggcttcgtagcgaccctcccgcgcctaaccgtcgtgcccgaaagaccgactcgaaagaattcaagaagcccccgcgtttgctgggtaatctacgcagtgctcgcagcgagattttcatggacgaccccaactgggaagaccagggcgagcctgcttcccaccctcagtcttcacctgtgtcccgcgagacgaccatctacgaacctgtcgccgaacataccgaacataccgatcagttcgagacggccaacgagacgagcgacgctgccttcgagactgctaatgagcataccgacgacttccacacgggtgccgaggagttctctagtgacgatgtcgagaccgagacggatagtcctaccaaacgccgcactttgaagggaagaccgccgaacctcacatggcagcgaagcacttcattcgacagcacggcatctaccgaggacgaggattactcctacgaagacacgaggacacccacttcgatcccgcccctgcacacaaaattccccctccgtgttagccgtggagccttccgcagatcgcgccaggccagcgaggagccagcgttccagagcagcccagcaagcttcgccaacagcagcaacatggggacgcctcagcaaacaggccagagcttggctgccgagctgggcgactttgatggcagtgataatgagtctaacatgtccgcgacacctagcaggagatcggttcatgttcgggccagtaccccaccgccagcgatgcccccattgcctaaggtgatcatggtggatagtggtatgatgacagagccgtcagaacaagacgattccgcgaccgcgagcggcctccgtcctatctctatgaacaccgtcgctagcggatactcggttgactccaactacagcgacgctggtgtggcagacttggacgagaagttagcgaggttcccgtcgcctcctacatcacctcctaagcgagatttccctccgctaccagagctggccatgtccacattgcactctcatcatgtcgaaccgattgctgaacctgacacccatgcggccgagatcgcagctcttcgtgccgaacatgcagaacagctgaagcagatcagcacggagaacacggcggcccaagtcgcggcattggaagctctgaaggcacagcacgccgatgaagctacccaagcagccgccgccttgaagctgacccatgctcaagaattggaagccttaagagccgatcacgcagatgccgcgagcaaggccgcagcggaagcaacagcgctacacgcccgagacatcgagtcactcaaatcaagtcacagtgatgcagtaagcaaggcgcttgccaatgctcaggcagctcatgccggggacgtcgaagcactcaagtccaagcatgcagagcagtcgagcaaagcaattactgaagctcaagccgcacacgcgagagatatcgaggcgctcaaggctagccacgcagatgaggctagcaaggcaactaccagtcttcaagcttcacatgatcgtgaattggaacagctcagggattctcatgctgatcagtgggttcaaaaggaatctgaaaatgctgcggcacgtgttgcggagttggaggctctgaagcttgcgcataccgagcaactggctaagcatcaagttgataccaaggccgctttcgatgtagatctggaaaatctgaaatcaagtcatgctgaagaattgaagaaatcgaaagcggatagccatgccgttcacgctgccgaactcgccgctctcgtcgccgcgcacactagccagcttgatagcacgacaaaagagctgtctgattctcattccgcagagttggacaagatcaaagccagtcatgccgaccagatcgaccaagccaagaagtcgttggatgcagaacatggtgcgcaactcgagaccatcaaagcttcgcatttggagcaaattgaagaagccaagaaatctatcggttctactcatgctgaagagcttgaatcgatgcgtgccgcacatgctcaggctttagatagtactgccaaggaaaaggacgcgttccttgccgctgaagttgctgctctgaccgccatgcacagcaagcaactcgacgaggctaagaatactctcgaagcgagtcacgcccagcagatccaatccctcaaagctgctcagattaaggaccgacacgatctcaagcaagaacacgccgataccactaagggtctcgtcgactctcataatgcacacttggaagaaacgaagcgcagcatggacacttcccaccaagagcaactcgagtctctgaaggcttcccatgctaaacagcaagcggatctgatcaaagacaaagatgctgtacacgctgttgcgcttgtagctcttgcagcagctcatagtaaacaattagacacccacaaggccgaaaatgaagctactatggcaaaggagcttgctgcgctcaaggactcacatgcgcatgagattgagacactgaacagccagcatgccgccgatcaagctaaggcgcttgaaggatttgaggcagcgttggcgaaacaagtcgagtcatcaaagatggcaggcgattctgctcatactcagcaaattgaggccctcaacgccgcacacgccgagattgtcgagacccacaaacgcgacagcgagaaagcccaagcccaggcactcgaggctctgaggtcatcacatgaacgacaatttgaggttctgaatggagagcatggcgctgcaaagacgagggaattagaagagctggccgccaaacactccaaggacatggatgccctgagagctgagaatgaagctctaaaggctgagctgctaggagagcttgcgacaactcattcgaaggagttggaagggctccgccaagagctggaagcctctcacgcaaaagatatcgagacaatcgaggccaatcatgcccagaatcttgacacgctaaagaaagagcatgaggcaagcatgtcccgaaaacaacaagaattggtagaacatcattcgcagcaaatggatggtctccggaaagaaagcagccaagctaaatccaaggaactggctgatctaagtgcaagccacgccgaggctctggcggttttgacagccggacacgatactggtctagcgcagagattgagtgagcttggtgaatctcacgctcgcgatcttgaaaaccagcgccagtcaaatgaacagtccaaatccgaagagctggcggccttagcagcgaagcacaccgggttggttgaggctttgaaggctgaacatgaagctcgcatgtctcagaacttgcaagaggctgcagataaccacgcccgggaattggagaagctgcgtcaagaaggcgaatcaaaccaagcccgcgaattttctgtgttgagcagcaatcatctggatgacctagagaaactcaagaatgagcatgaagttgcacgccagcaagaactaggcgaacttaaatcagcccatgcggcggctctgacgtccctgggcgcggagcacaagtcggcgctagaacatgctgtcgagagtctcaaggcggaccatgctcgggctcttgaatctctcaagcgtgagagagatctcggtcaatcggaagctttcagtgtcttgggtctcgagcattccaagcaactggaacaattgaaacaggagagcgatgccacacttgcacgcgaacttgatactctcgctgctcaacatgacaatgacctcaaagcacgggcacaggacagcgatgctgctcttgctcgcgagcttgagtctataaaggcccagcacgcacgcgacatggaatcccacatacaacagacctcagccgaaaaggaacgtctgattgccagtcatgctgctgagctcgaggctctcaagaagagcttgacagtagagcgaccggctcttgcttactcaccattgagctcgattgaaactgaacccgtcgagccaccagagctcaagagcccaagacgagaagcgttcattattccacaagatcgggaaccatcgacgccctttggtgggaaaaagacaaggaatgctggtacgccgattatcgccgaagatgacaccagacaatctcccagtgccgttggcgagtccaataccccagaatctcagcgaccattcaaggagatcacagccaatgccgaagctcgaccattacggaagctgcagaccgagacgtctcaccagagctctcagaccacgctcacagccgaaagtctagatcgcctagtgaagaaccaacggcgccagtctcaagattcggtcacaataaccacagatcggggccaggtcgttatcacaccattcgacgatgctgctactggttctccttccactgttcgtatcaggcgctcatcactagacagccaaggaagtgtagcacgcgcaagacaccgcatccccgactctggcattgtcgctgctcctgagcccgttcctccacgacgacctggcagctcggcaagtactcgcacggctactcgtgacagaccaccactaccggcgaatcaccgtgaagccattgaagctgctcgctcgggatcggcacatggccgtacgggaagcatgggtccacctcttgttcccgcgtcagcctaccgcaacccgagttcccgccctcaaactccaagtgccagaccgcccccgtcgccgattaccgcgaagggtactcccacgccccgcgccggcaggtcgacagtcttctatttctcttttgcatcggaaattgactcacggtttaacatccgggatggcatgggcttggaagcagccggctttggacccagcaccgatcctcgcatgatccaagccatcactcagaccatgattggcgagtacttatggaagtatacccgcaaagctggacgtggacaaatgtccgaaaaccgacacaggcgatacttctgggtacacccatatactcgcaccctctattggagtgatcgtgatccatctactggcggtcggtcagaattgaaggccaagagcgtgcccatcgaagccgttcgtgtggtagcagatgacaacatcatgcctcctggacttcatcggaagagcttgatcgttatttcacctggccgtaccgtcaagttcacttgtacaacaggccagcgacacgagacatggttcaatgcgctttcgtacttgctcctgcggacgggtaacgaagaccaggctagcagtgaacaagtggccgggaacttaacgcaggaagacgtcgacgagttcaatccatccatcagcagggcaccggccaacggtaaccgaccacaaataccaccatctctgtcctcatacaactctcgaactacccgtaacgaatcgccggccatggatatatcgtccatgagcatccccaccttgacaccgactcatgagaggggcgtttcgcgcaccggcagcaccagcacgctaggcaggatcagcgggtactggaaaaccagcaagttcggtagcatgcgcagcactcggggtcacgcaccctacacggaggctatttacgaagcgaacgaagtgcaagatagcgccgaggatcttaggcagatgctggagcagcacgatcgtgattccaataggctcgagaatgttcgcgcttgttgtgatggaaaacatgatgttggcacattacctcatatctcgaaacgaggacgtctttcgggacgtcactcgcatacccaaacacatccgcatacgcacccggcctcgcattccatgggtagtgtgaggtccacacgtgcgtga

SEQ ID NO: 4598 - protein, 2376 aa, Muscodor strobelii
  misc_feature: SGI Peptide ID NO. 561227
  misc_feature (2071)..(2181): Pfam Id: PF00169 Pfam Desc: PH domain
  misc_feature (24)..(812): NCBI GI: 145609824 Blast Desc: MGG_02961 [Magnaporthe grisea 70-15] gi|149210523|ref|XP_001522636.1| MGCH7_ch7g736 [Magnaporthe grisea 70-15] gi|86196691|gb|EAQ71329.1| MGCH7_ch7g736 grisea
  misc_feature (76)..(796): NCBI GI: 261353441 Blast Desc: anucleate primary sterigmata protein A [Verticillium albo-atrum VaMs.102]
  misc_feature (1760)..(2373): NCBI GI: 261353441 Blast Desc: anucleate primary sterigmata protein A [Verticillium albo-atrum VaMs.102]
  misc_feature (7)..(798): NCBI GI: 256733737 Blast Desc: NECHADRAFT_36716 [Nectria haematococca mpVI 77-13-4]
  misc_feature (7)..(884): NCBI GI: 46130600 Blast Desc: FG08904.1 [Gibberella zeae PH-1]
  misc_feature (27)..(744): NCBI GI: 164429572 Blast Desc: NCU01953 [Neurospora crassa OR74A] gi|157073533|gb|EAA35001.2| NCU01953 [Neurospora crassa OR74A]
  misc_feature (7)..(759): NCBI GI: 156040902 Blast Desc: SS1G_11429 [Sclerotinia sclerotiorum 1980] gi|154695813|gb|EDN95551.1| SS1G_11429 [Sclerotinia sclerotiorum 1980]
  misc_feature (31)..(743): NCBI GI: 116193745 Blast Desc: CHGG_06590 [Chaetomium globosum CBS 148.51] gi|88182503|gb|EAQ89971.1| CHGG_06590 [Chaetomium globosum CBS 148.51]
  misc_feature (7)..(728): NCBI GI: 8250512 Blast Desc: AMI1 protein [Podospora anserina]
  misc_feature (7)..(728): NCBI GI: 171676131 Blast Desc: protein product [Podospora anserina] gi|170936131|emb|CAP60791.1| protein product [Podospora anserina]
MATTPPAADEPSVAIAPATHSQDNDPFHSSFSASGAARNHRWSHFDSSNFAHGSFASPAQARRVLEAHLAETDRRMEEAGKVGTALLQQRQVIMDHMEEVDKVEAEGELSEDLRDKLVEIEKDYNEVARESARAFLPKSRVSSSEAAVGSPFVPEGKGGRRSVSPSKFEAQATGSPTKLSVPNRKIRNQPSNRIHDIEFAAEISTSLISQVRNLQGLLAEKEEELRDTRAEQSRLEYEAEGFQQRLKALDDSEHRYKEENWNLETKLQELMVKDRDASDRETKLGQTLKLLQAEKNAAQRELDEIKLSHSRLSEEHAASVKHLDIELGTAKRNMVMGESERAAMQRKIEDLTGQNQELAKAVSASQRGRVLERESIFGMSDEDFQTANDHTTPEHSPPPSPVKGTPRHSMLESETLKTSLAHAQRTIQSLRNNVHREKTDRMETRRLLQEARDEIERLRSDPPAPNRRARKTDSKEFKKPPRLLGNLRSARSEIFMDDPNWEDQGEPASHPQSSPVSRETTIYEPVAEHTEHTDQFETANETSDAAFETANEHTDDFHTGAEEFSSDDVETETDSPTKRRTLKGRPPNLTWQRSTSFDSTASTEDEDYSYEDTRTPTSIPPLHTKFPLRVSRGAFRRSRQASEEPAFQSSPASFANSSNMGTPQQTGQSLAAELGDFDGSDNESNMSATPSRRSVHVRASTPPPAMPPLPKVIMVDSGMMTEPSEQDDSATASGLRPISMNTVASGYSVDSNYSDAGVADLDEKLARFPSPPTSPPKRDFPPLPELAMSTLHSHHVEPIAEPDTHAAEIAALRAEHAEQLKQISTENTAAQVAALEALKAQHADEATQAAAALKLTHAQELEALRADHADAASKAAAEATALHARDIESLKSSHSDAVSKALANAQAAHAGDVEALKSKHAEQSSKAITEAQAAHARDIEALKASHADEASKATTSLQASHDRELEQLRDSHADQWVQKESENAAARVAELEALKLAHTEQLAKHQVDTKAAFDVDLENLKSSHAEELKKSKADSHAVHAAELAALVAAHTSQLDSTTKELSDSHSAELDKIKASHADQIDQAKKSLDAEHGAQLETIKASHLEQIEEAKKSIGSTHAEELESMRAAHAQALDSTAKEKDAFLAAEVAALTAMHSKQLDEAKNTLEASHAQQIQSLKAAQIKDRHDLKQEHADTTKGLVDSHNAHLEETKRSMDTSHQEQLESLKASHAKQQADLIKDKDAVHAVALVALAAAHSKQLDTHKAENEATMAKELAALKDSHAHEIETLNSQHAADQAKALEGFEAALAKQVESSKMAGDSAHTQQIEALNAAHAEIVETHKRDSEKAQAQALEALRSSHERQFEVLNGEHGAAKTRELEELAAKHSKDMDALRAENEALKAELLGELATTHSKELEGLRQELEASHAKDIETIEANHAQNLDTLKKEHEASMSRKQQELVEHHSQQMDGLRKESSQAKSKELADLSASHAEALAVLTAGHDTGLAQRLSELGESHARDLENQRQSNEQSKSEELAALAAKHTGLVEALKAEHEARMSQNLQEAADNHARELEKLRQEGESNQAREFSVLSSNHLDDLEKLKNEHEVARQQELGELKSAHAAALTSLGAEHKSALEHAVESLKADHARALESLKRERDLGQSEAFSVLGLEHSKQLEQLKQESDATLARELDTLAAQHDNDLKARAQDSDAALARELESIKAQHARDMESHIQQTSAEKERLIASHAAELEALKKSLTVERPALAYSPLSSIETEPVEPPELKSPRREAFIIPQDREPSTPFGGKKTRNAGTPIIAEDDTRQSPSAVGESNTPESQRPFKEITANAEARPLRKLQTETSHQSSQTTLTAESLDRLVKNQRRQSQDSVTITTDRGQVVITPFDDAATGSPSTVRIRRSSLDSQGSVARARHRIPDSGIVAAPEPVPPRRPGSSASTRTATRDRPPLPANHREAIEAARSGSAHGRTGSMGPPLVPASAYRNPSSRPQTPSARPPPSPITAKGTPTPRAGRSTVFYFSFASEIDSRFNIRDGMGLEAAGFGPSTDPRMIQAITQTMIGEYLWKYTRKAGRGQMSENRHRRYFWVHPYTRTLYWSDRDPSTGGRSELKAKSVPIEAVRVVADDNIMPPGLHRKSLIVISPGRTVKFTCTTGQRHETWFNALSYLLLRTGNEDQASSEQVAGNLTQEDVDEFNPSISRAPANGNRPQIPPSLSSYNSRTTRNESPAMDISSMSIPTLTPTHERGVSRTGSTSTLGRISGYWKTSKFGSMRSTRGHAPYTEAIYEANEVQDSAEDLRQMLEQHDRDSNRLENVRACCDGKHDVGTLPHISKRGRLSGRHSHTQTHPHTHPASHSMGSVRSTRA

SEQ ID NO: 4599 - DNA, 9189 bp, Muscodor strobelii
  misc_feature: SGI EST ID NO. CUFF.11700.0
  misc_feature: Variant of the nucleotide sequence at SEQ ID NO 4597
ccagtgtctcgatgtttgaataaacattcttcagcatcgttccaacatacccgtcttctccctttctctacccctccgaaccctcgtttcctctcccatctccgggtcatctacgtcaaaggcaaaccctcaagacaattggcctcatcgaccgctcccgcttcccgtttatcgtcgtgggaatcccggcacgcgtctcactctggcgtcaccaagctgagctgcattcttgcgcttgtcattcattgaaacaacattcctttggactctctcttctacctctgatacttgacagttgccattctctccatcgtagtagtctttaatgttacttttgcccttttttcgccgccgtgtaatttgaatctggtaatccgtcgtcgcgattctggaaattgtcgaatataataagaattacactttgcgacccgttcctctagcccactattgtctcaacgggttcctgagacaagaccggccacgttccaggccattggttcacatatccagacacgcagagctagtcggagcggcacatcttggcgccagatacagcaccgcacgcctcatcagccaaacgggcgaggatagataccagcaagatcgagcgcagctaaagacagcatcgtgtgttgttccgatctgaatccctcccccttttcccaagcgtcagtcatctggtcttagagcagcccaatccgcaatccttggtgggaaaaagagaggacggacgactacctcgaatttctcacccccctgtaaccaataatctcccgaaaaagcccactgatcttctggcttttgccattgcagccagtcattctgttccacgccggaatacgtcgtggtgacaggtgttttccgtgattccgatctatctcatcgagtcatcgacgaccgaccgtctggcgaaacgatatccagaacgtttttaggaattgcgctagcaacgacgcttgatacccgaatccaacagtagtccacttcttgatttgtttttgcagatcacttttctaacatcgcgtcgcatctctacgtaatttctattgtcgtcttggggtcgtgaatcaatagtcgaccaccgatcttgcatttcgcgcattcagctgtcaaaagtctcaactactgcagctgggtctgcgcacaccttgcatcgacattccgcacccgcacctgccgccagcatcaccaccattggccattttcggcgggccattcctcatcactcatctgtgctttttgcaggtgcattgctgctcgctcattcagcttgggctttacaattctaggtcttaccattgccgaataacgccggcatcgtacttgccttcccatcgcgattgctcccgcccttccagctgaatgccacgcctgtagtctagggagactgttgcctccttgttgttgttgttgttgttctcccggcccgtgccagcagcaaccatggcgacgacaccacccgcagccgacgaaccgtcggttgccattgcgcctgccacccacagccaagacaacgaccctttccattcctccttctccgcgtcaggcgcagcaagaaaccaccgatggtcccatttcgactcgtccaacttcgcacatggctcctttgcctcgcccgcccaagcgagacgcgttctcgaggcacatctagccgagacggaccggagaatggaagaagccggcaaggttggcacggcgctactgcaacaacgccaggtcatcatggaccacatggaagaggtcgacaaggttgaggccgaaggcgagctatcggaggacttgcgcgacaaactggtcgagatcgaaaaggactacaacgaggtcgcccgcgagagcgctcgtgcattcctgcccaagtcacgcgtctctagtagtgaggcggctgtgggctcacctttcgtgccagagggcaaaggtggcaggcgttccgtgagtccctccaaattcgaagcccaagcgacaggctcgcctacgaagctgagcgtgcccaaccgtaaaatccggaaccagccgtccaatcgcatccacgacatcgagttcgccgccgaaatcagcacttcgctcatttcccaggtgcgcaatctgcaaggcttgcttgccgaaaaggaggaagagctgagagacacgcgagccgagcagtcaagactcgaatatgaggccgagggtttccagcaacgactcaaggccctcgacgacagtgaacatcgctacaaggaggaaaactggaacctcgaaaccaaacttcaggagctcatggtcaaggatagagatgcctcggaccgcgagacgaaactgggccagaccctcaagcttctccaggccgagaaaaacgcagcccagcgagaactggatgagatcaagctgagccactcccgactctccgaagagcatgccgccagtgtcaagcatctcgacatcgagctcggcacggccaagcgaaacatggtcatgggcgagtccgagagggccgctatgcagcgcaagatagaggatctgacagggcagaatcaagagctcgccaaggcggtctcagcgtctcagcgtggccgggtgttggaacgggagtccatcttcggtatgagcgacgaggacttccagaccgccaacgaccacaccactcccgagcactccccacccccatcgcctgtcaagggcacacctcgtcactccatgctcgagtctgaaaccttgaagacatctctggctcacgcccaacgaaccatccaaagtctgcggaacaatgtccatcgagagaagacggaccggatggaaacgagaagactccttcaagaagcccgtgacgagatcgaaaggcttcgtagcgaccctcccgcgcctaaccgtcgtgcccgaaagaccgactcgaaagaattcaagaagcccccgcgtttgctgggtaatctacgcagtgctcgcagcgagattttcatggacgaccccaactgggaagaccagggcgagcctgcttcccaccctcagtcttcacctgtgtcccgcgagacgaccatctacgaacctgtcgccgaacataccgaacataccgatcagttcgagacggccaacgagacgagcgacgctgccttcgagactgctaatgagcataccgacgacttccacacgggtgccgaggagttctctagtgacgatgtcgagaccgagacggatagtcctaccaaacgccgcactttgaagggaagaccgccgaacctcacatggcagcgaagcacttcattcgacagcacggcatctaccgaggacgaggattactcctacgaagacacgaggacacccacttcgatcccgcccctgcacacaaaattccccctccgtgttagccgtggagccttccgcagatcgcgccaggccagcgaggagccagcgttccagagcagcccagcaagcttcgccaacagcagcaacatggggacgcctcagcaaacaggccagagcttggctgccgagctgggcgactttgatggcagtgataatgagtctaacatgtccgcgacacctagcaggagatcggttcatgttcgggccagtaccccaccgccagcgatgcccccattgcctaaggtgatcatggtggatagtggtatgatgacagagccgtcagaacaagacgattccgcgaccgcgagcggcctccgtcctatctctatgaacaccgtcgctagcggatactcggttgactccaactacagcgacgctggtgtggcagacttggacgagaagttagcgaggttcccgtcgcctcctacatcacctcctaagcgagatttccctccgctaccagagctggccatgtccacattgcactctcatcatgtcgaaccgattgctgaacctgacacccatgcggccgagatcgcagctcttcgtgccgaacatgcagaacagctgaagcagatcagcacggagaacacggcggcccaagtcgcggcattggaagctctgaaggcacagcacgccgatgaagctacccaagcagccgccgccttgaagctgacccatgctcaagaattggaagccttaagagccgatcacgcagatgccgcgagcaaggccgcagcggaagcaacagcgctacacgcccgagacatcgagtcactcaaatcaagtcacagtgatgcagtaagcaaggcgcttgccaatgctcaggcagctcatgccggggacgtcgaagcactcaagtccaagcatgcagagcagtcgagcaaagcaattactgaagctcaagccgcacacgcgagagatatcgaggcgctcaaggctagccacgcagatgaggctagcaaggcaactaccagtcttcaagcttcacatgatcgtgaattggaacagctcagggattctcatgctgatcagtgggttcaaaaggaatctgaaaatgctgcggcacgtgttgcggagttggaggctctgaagcttgcgcataccgagcaactggctaagcatcaagttgataccaaggccgctttcgatgtagatctggaaaatctgaaatcaagtcatgctgaagaattgaagaaatcgaaagcggatagccatgccgttcacgctgccgaactcgccgctctcgtcgccgcgcacactagccagcttgatagcacgacaaaagagctgtctgattctcattccgcagagttggacaagatcaaagccagtcatgccgaccagatcgaccaagccaagaagtcgttggatgcagaacatggtgcgcaactcgagaccatcaaagcttcgcatttggagcaaattgaagaagccaagaaatctatcggttctactcatgctgaagagcttgaatcgatgcgtgccgcacatgctcaggctttagatagtactgccaaggaaaaggacgcgttccttgccgctgaagttgctgctctgaccgccatgcacagcaagcaactcgacgaggctaagaatactctcgaagcgagtcacgcccagcagatccaatccctcaaagctgctcagattaaggaccgacacgatctcaagcaagaacacgccgataccactaagggtctcgtcgactctcataatgcacacttggaagaaacgaagcgcagcatggacacttcccaccaagagcaactcgagtctctgaaggcttcccatgctaaacagcaagcggatctgatcaaagacaaagatgctgtacacgctgttgcgcttgtagctcttgcagcagctcatagtaaacaattagacacccacaaggccgaaaatgaagctactatggcaaaggagcttgctgcgctcaaggactcacatgcgcatgagattgagacactgaacagccagcatgccgccgatcaagctaaggcgcttgaaggatttgaggcagcgttggcgaaacaagtcgagtcatcaaagatggcaggcgattctgctcatactcagcaaattgaggccctcaacgccgcacacgccgagattgtcgagacccacaaacgcgacagcgagaaagcccaagcccaggcactcgaggctctgaggtcatcacatgaacgacaatttgaggttctgaatggagagcatggcgctgcaaagacgagggaattagaagagctggccgccaaacactccaaggacatggatgccctgagagctgagaatgaagctctaaaggctgagctgctaggagagcttgcgacaactcattcgaaggagttggaagggctccgccaagagctggaagcctctcacgcaaaagatatcgagacaatcgaggccaatcatgcccagaatcttgacacgctaaagaaagagcatgaggcaagcatgtcccgaaaacaacaagaattggtagaacatcattcgcagcaaatggatggtctccggaaagaaagcagccaagctaaatccaaggaactggctgatctaagtgcaagccacgccgaggctctggcggttttgacagccggacacgatactggtctagcgcagagattgagtgagcttggtgaatctcacgctcgcgatcttgaaaaccagcgccagtcaaatgaacagtccaaatccgaagagctggcggccttagcagcgaagcacaccgggttggttgaggctttgaaggctgaacatgaagctcgcatgtctcagaacttgcaagaggctgcagataaccacgcccgggaattggagaagctgcgtcaagaaggcgaatcaaaccaagcccgcgaattttctgtgttgagcagcaatcatctggatgacctagagaaactcaagaatgagcatgaagttgcacgccagcaagaactaggcgaacttaaatcagcccatgcggcggctctgacgtccctgggcgcggagcacaagtcggcgctagaacatgctgtcgagagtctcaaggcggaccatgctcgggctcttgaatctctcaagcgtgagagagatctcggtcaatcggaagctttcagtgtcttgggtctcgagcattccaagcaactggaacaattgaaacaggagagcgatgccacacttgcacgcgaacttgatactctcgctgctcaacatgacaatgacctcaaagcacgggcacaggacagcgatgctgctcttgctcgcgagcttgagtctataaaggcccagcacgcacgcgacatggaatcccacatacaacagacctcagccgaaaaggaacgtctgattgccagtcatgctgctgagctcgaggctctcaagaagagcttgacagtagagcgaccggctcttgcttactcaccattgagctcgattgaaactgaacccgtcgagccaccagagctcaagagcccaagacgagaagcgttcattattccacaagatcgggaaccatcgacgccctttggtgggaaaaagacaaggaatgctggtacgccgattatcgccgaagatgacaccagacaatctcccagtgccgttggcgagtccaataccccagaatctcagcgaccattcaaggagatcacagccaatgccgaagctcgaccattacggaagctgcagaccgagacgtctcaccagagctctcagaccacgctcacagccgaaagtctagatcgcctagtgaagaaccaacggcgccagtctcaagattcggtcacaataaccacagatcggggccaggtcgttatcacaccattcgacgatgctgctactggttctccttccactgttcgtatcaggcgctcatcactagacagccaaggaagtgtagcacgcgcaagacaccgcatccccgactctggcattgtcgctgctcctgagcccgttcctccacgacgacctggcagctcggcaagtactcgcacggctactcgtgacagaccaccactaccggcgaatcaccgtgaagccattgaagctgctcgctcgggatcggcacatggccgtacgggaagcatgggtccacctcttgttcccgcgtcagcctaccgcaacccgagttcccgccctcaaactccaagtgccagaccgcccccgtcgccgattaccgcgaagggtactcccacgccccgcgccggcagggtaggtggaaacgcagatgtccagtccccgacacggatgcccatgcgcagtcgacagtcttctatttctcttttgcatcggaaattgactcacggtttaacatccgggatggcatgggcttggaagcagccggctttggacccagcaccgatcctcgcatgatccaagccatcactcagaccatgattggcgagtacttatggaagtatacccgcaaagctggacgtggacaaatgtccgaaaaccgacacaggcgatacttctgggtacacccatatactcgcaccctctattggagtgatcgtgatccatctactggcggtcggtcagaattgaaggccaagagcgtgcccatcgaagccgttcgtgtggtagcagatgacaacatcatgcctcctggacttcatcggaagagcttgatcgttatttcacctggccgtaccgtcaagttcacttgtacaacaggccagcgacacgagacatggttcaatgcgctttcgtacttgctcctgcggacgggtaacgaagaccaggctagcagtgaacaagtggccgggaacttaacgcaggaagacgtcgacgagttcaatccatccatcagcagggcaccggccaacggtaaccgaccacaaataccaccatctctgtcctcatacaactctcgaactacccgtaacgaatcgccggccatggatatatcgtccatgagcatccccaccttgacaccgactcatgagaggggcgtttcgcgcaccggcagcaccagcacgctaggcaggatcagcgggtactggaaaaccagcaagttcggtagcatgcgcagcactcggggtcacgcaccctacacggaggctatttacgaagcgaacgaagtgcaagatagcgccgaggatcttaggcagatgctggagcagcacgatcgtgattccaataggctcgagaatgttcgcgcttgttgtgatggaaaacatgatgttggcacattacctcatatctcgaaacgaggacgtctttcgggacgtcactcgcatacccaaacacatccgcatacgcacccggcctcgcattccatgggtagtgtgaggtccacacgtgcgtgatgtacgaaatttttgtcttcatcgattgtattatagctgctacgccatgcggtataagcgaagactttttttccaacccggaaggaactacaaaacacagcaacgtcattacttttgttaatttttattgctctctccttgttacatgtcgtcgatcttgatcgacggtcattcactcactcaaacaaatcactcggtgcgcgttacgaaagacccgttcgggatctgtatgatgcctacgaatttccttttgtcttttcagaatttttatttgtcgatggccctaatacttgttcaaagtttgggtcatggagagaaggtggaaggcattgctgtagtagagtggaaattgcatcgtggagttgtcgttgcgttgcgttgcattgttgtacatgcactgctcttggtcggttgatgcgagagttggtggagtttagggaaattacttgcattactacattgtaattaatgtattgtgttttttctgagactgctgtgctgtacatactgagactgagtggatggtagattattcatagggaatagagaggagattgatcgatac

SEQ ID NO: 4600 - DNA, 987 bp, Muscodor strobelii
  misc_feature: SGI cDNA ID NO. 561228
  misc_feature: Reduced expression when VOC is produced
  misc_feature: Encodes the peptide sequence at SEQ ID NO 4601
atggcagatcaagaaacggctaccgcgcctatcgccccggttgctgtcttcaagaaacgaggcgcaaagggcaaagccaacatccgaaagcgacctgccaccccgccgcctgccgacagcgacgacgatgacgagtccggccagcgcgtcaagaggcgcaagaagaacgccgtcgtcaccgcatcctccaagagcaatacatcctccaacccaagcgaacacgctgccgtcgtcttcgaggccgatcgcagcgtccccataacaagcacaaacgacgccaccaagcgtgttgactggtacgacgaagatacgaatctactaggcaagactcggcccttgcccaagcccaaagatggcgacaccggcccggacgggacatataagggcttggccaacaaaaccaccttcatccagaagaaccccaatgcgccaaaccgtcaggtcggtcccatcaaggcagctaccaatatccgcaccatcaccgtcaccgatttcgcccccgacgtctgcaaggattacaagcagaccggcttctgtgggttcggagacaattgcaagttcttgcacgcccgcgaagactataaacaagggtggcaactggacaaggagtgggagagcgtgaccaaaggcaagaaaaacatcggcggcaaggtcgtagccagcgcaaatcgcgatgcgatgggggacgacgacgacgacgacgatgattccgcgttgaaggacattccattcgcctgcatcatttgcaaaggtccatacaaagagcccatagtcactagatgtggccattacttctgccttccttgcgcattacagaggtatagaaaagagcctagctgtgcggcgtgtgggtcgggaactaacggtgtgttcaacactgccaaggatttgaagaaacatctagataagaagaagaaaagacaggagatcaagcggcagaaagctatagaggctggggaagaggtgcccgaagaagatgagacttag

SEQ ID NO: 4601 - protein, 328 aa, Muscodor strobelii
  misc_feature: SGI Peptide ID NO. 561228
  misc_feature (246)..(283): Pfam Id: PF00097 Pfam Desc: Zinc finger, C3HC4 type (RING finger)
  misc_feature (165)..(191): Pfam Id: PF00642 Pfam Desc: Zinc finger C-x8-C-x5-C-x3-H type (and similar)
  misc_feature (9)..(319): NCBI GI: 39970987 Blast Desc: MGG_02960 [Magnaporthe grisea 70-15] gi|149210519|ref|XP_001522634.1| MGCH7_ch7g734 [Magnaporthe grisea 70-15] gi|86196689|gb|EAQ71327.1| MGCH7_ch7g734 grisea
  misc_feature (1)..(293): NCBI GI: 46130594 Blast Desc: FG08901.1 [Gibberella zeae PH-1]
  misc_feature (11)..(321): NCBI GI: 156040898 Blast Desc: SS1G_11427 [Sclerotinia sclerotiorum 1980] gi|154695811|gb|EDN95549.1| SS1G_11427 [Sclerotinia sclerotiorum 1980]
  misc_feature (1)..(321): NCBI GI: 116193743 Blast Desc: CHGG_06589 [Chaetomium globosum CBS 148.51] gi|88182502|gb|EAQ89970.1| CHGG_06589 [Chaetomium globosum CBS 148.51]
  misc_feature (1)..(294): NCBI GI: 256734238 Blast Desc: [Nectria haematococca mpVI 77-13-4]
  misc_feature (10)..(319): NCBI GI: 145232419 Blast Desc: An02g05190 [Aspergillus niger] gi|134056572|emb|CAK37626.1| protein product [Aspergillus niger]
  misc_feature (14)..(305): NCBI GI: 85112063 Blast Desc: pre-mRNA splicing factor cwc24 [Neurospora crassa OR74A] gi|74696667|sp|Q7SDY3.1|CWC24_NEUCR RecName: Full=Pre-mRNA-splicing factor cwc-24 gi|28926011|gb|EAA35002.1|
  misc_feature (4)..(327): NCBI GI: 70998280 Blast Desc: CCCH and RING finger protein (Znf183) [Aspergillus fumigatus Af293] gi|74673091|sp|Q4WUA0.1|CWC24_ASPFU RecName: Full=Pre-mRNA-splicing factor cwc24 gi|66851500|gb|EAL91826.1|
  misc_feature (10)..(319): NCBI GI: 154305163 Blast Desc: BC1G_08876 [Botryotinia fuckeliana B05.10] gi|150853618|gb|EDN28810.1| BC1G_08876 [Botryotinia fuckeliana B05.10]
  misc_feature (3)..(316): NCBI GI: 119182191 Blast Desc: CIMG_06140 [Coccidioides immitis RS]
  misc_feature: Useful for introducing or modulating the production of volatile compounds
MADQETATAPIAPVAVFKKRGAKGKANIRKRPATPPPADSDDDDESGQRVKRRKKNAVVTASSKSNTSSNPSEHAAVVFEADRSVPITSTNDATKRVDWYDEDTNLLGKTRPLPKPKDGDTGPDGTYKGLANKTTFIQKNPNAPNRQVGPIKAATNIRTITVTDFAPDVCKDYKQTGFCGFGDNCKFLHAREDYKQGWQLDKEWESVTKGKKNIGGKVVASANRDAMGDDDDDDDDSALKDIPFACIICKGPYKEPIVTRCGHYFCLPCALQRYRKEPSCAACGSGTNGVFNTAKDLKKHLDKKKKRQEIKRQKAIEAGEEVPEEDET

SEQ ID NO: 4602 - DNA, 1277 bp, Muscodor strobelii
  misc_feature: SGI EST ID NO. CUFF.11687.0
  misc_feature: Variant of the nucleotide sequence at SEQ ID NO 4600
cgtcatcgcccactgcagtagccaagcaagcagagacgcgggatcattcgagttccatcgctttgattacgtttgttacacttacaaacgccatggcagatcaagaaacggctaccgcgcctatcgccccggttgctgtcttcaagaaacgaggcgcaaagggcaaagccaacatccgaaagcgacctgccaccccgccgcctgccgacagcgacgacgatgacgagtccggccagcgcgtcaagaggcgcaagaagaacgccgtcgtcaccgcatcctccaagagcaatacatcctccaacccaagcgaacacgctgccgtcgtcttcgaggccgatcgcagcgtccccataacaagcacaaacgacgccaccaagcgtgttgactggtacgacgaagatacgaatctactaggcaagactcggcccttgcccaagcccaaagatggcgacaccggcccggacgggacatataagggcttggccaacaaaaccaccttcatccagaagaaccccaatgcgccaaaccgtcaggtcggtcccatcaaggcagctaccaatatccgcaccatcaccgtcaccgatttcgcccccgacgtctgcaaggattacaagcagaccggcttctgtgggttcggagacaattgcaagttcttgcacgcccgcgaagactataaacaagggtggcaactggacaaggagtgggagagcgtgaccaaaggcaagaaaaacatcggcggcaaggtcgtagccagcgcaaatcgcgatgcgatgggggacgacgacgacgacgacgatgattccgcgttgaaggacattccattcgcctgcatcatttgcaaaggtccatacaaagagcccatagtcactagatgtggccattacttctgccttccttgcgcattacagaggtatagaaaagagcctagctgtgcggcgtgtgggtcgggaactaacggtgtgttcaacactgccaaggatttgaagaaacatctagataagaagaagaaaagacaggagatcaagcggcagaaagctatagaggctggggaagaggtgcccgaagaagatgagacttagcgccgaggcgtgtgctcgggtgtatatctctgtacttgtatcttgaaaagcggttacgtgtggcgtctatgaaatataccctgattcatttttccattgtaatcaatttcggtgactgccattttgaaaattgaaggccgagacctgaatttgagttcatcagttgagcgaccaaatctcgaggctaaatcatacgag

SEQ ID NO: 4603 - DNA, 960 bp, Muscodor strobelii
  misc_feature: SGI cDNA ID NO. 561229
  misc_feature: Elevated expression when VOC is produced
  misc_feature: Encodes the peptide sequence at SEQ ID NO 4604
atggcggaccatatagatcaagagtcgaaagtatcctctaaggaggatgagcgactagctgtctacgcacgactcttggagctagcatctgcgatgaacagagatgataatctagcaatcgtgcgccgctttggagatctgagcatgctccatctcttgactttgcagaccgaattggacatcttaagacgaaacttccgaaaactttgggacgtcgatcagcaaactcatgaatctgacttattccgttatctagctgccgatctaagtcctcaagaccccatagatgactcagataaagcaagcgccagcagagaagcagcaaaaagagagctgtatcagcaaatccgcattaagtttaaagagtacaattcgcaccctagaccccccgacaaaggcgatatcgactacctacgggcttggatcacacctgatatcggaggggctacgatggacgaggtagaccgaaattgctggggcgagcaacacagcgacgatctcgtctttctgaagaatcccgagtggaagcaaaaccaggttctgacacacataaagctcgctggtcacgtaatccagcacaagctctggagatttagaaccgccgtctccgatcaaatcgactcccacgtaatcaaattagggagcgaaaagggtcgagcaggaagctcagcattacgaaggaagtccgctttctcctcccgactcgcgatggccttgtttggcgggatcgccttgatagtgccaactatcatcatggcactacatcagagcgtgcaagtatgcctgataaccacgtcggtcgccacggtcgtgttcgccgtgatacttgctttcggagctcgtgatgccaccggaaaagatgtcctggctgccaccgctgcatacacagctgtcttagtggttttcttgggaagtagtgtttccggcggttctggaggcggcggtacgggacagggatga

SEQ ID NO: 4604 - protein, 319 aa, Muscodor strobelii
  misc_feature: SGI Peptide ID NO. 561229
  misc_feature (229)..(311): NCBI GI: 261356877 Blast Desc: conserved [Verticillium albo-atrum VaMs.102]
  misc_feature (229)..(316): NCBI GI: 116199569 Blast Desc: [Chaetomium globosum CBS 148.51] gi|88179219|gb|EAQ86687.1| [Chaetomium globosum CBS 148.51]
  misc_feature (27)..(306): NCBI GI: 256720608 Blast Desc: NECHADRAFT_85466 [Nectria haematococca mpVI 77-13-4]
  misc_feature (233)..(306): NCBI GI: 119499267 Blast Desc: NFIA_040700 [Neosartorya fischeri NRRL 181] gi|119414555|gb|EAW24494.1| conserved [Neosartorya fischeri NRRL 181]
  misc_feature (231)..(309): NCBI GI: 212528158 Blast Desc: conserved [Penicillium marneffei ATCC 18224] gi|210073634|gb|EEA27721.1| conserved [Penicillium marneffei ATCC 18224]
  misc_feature (234)..(304): NCBI GI: 116195502 Blast Desc: CHGG_04349 [Chaetomium globosum CBS 148.51] gi|88180262|gb|EAQ87730.1| CHGG_04349 [Chaetomium globosum CBS 148.51]
  misc_feature (226)..(306): NCBI GI: 256731928 Blast Desc: NECHADRAFT_41924 [Nectria haematococca mpVI 77-13-4]
  misc_feature (28)..(306): NCBI GI: 261358949 Blast Desc: VDBG_07487 [Verticillium albo-atrum VaMs.102]
  misc_feature (234)..(303): NCBI GI: 169605669 Blast Desc: SNOG_05859 [Phaeosphaeria nodorum SN15] gi|111065803|gb|EAT86923.1| SNOG_05859 [Phaeosphaeria nodorum SN15]
  misc_feature (27)..(308): NCBI GI: 156050485 Blast Desc: [Sclerotinia sclerotiorum 1980] gi|154692230|gb|EDN91968.1| [Sclerotinia sclerotiorum 1980]
  misc_feature: Useful for introducing or modulating the production of volatile compounds
MADHIDQESKVSSKEDERLAVYARLLELASAMNRDDNLAIVRRFGDLSMLHLLTLQTELDILRRNFRKLWDVDQQTHESDLFRYLAADLSPQDPIDDSDKASASREAAKRELYQQIRIKFKEYNSHPRPPDKGDIDYLRAWITPDIGGATMDEVDRNCWGEQHSDDLVFLKNPEWKQNQVLTHIKLAGHVIQHKLWRFRTAVSDQIDSHVIKLGSEKGRAGSSALRRKSAFSSRLAMALFGGIALIVPTIIMALHQSVQVCLITTSVATVVFAVILAFGARDATGKDVLAATAAYTAVLVVFLGSSVSGGSGGGGTGQG

SEQ ID NO: 4605 - DNA, 1204 bp, Muscodor strobelii
  misc_feature: SGI EST ID NO. CUFF.11691.0
  misc_feature: Variant of the nucleotide sequence at SEQ ID NO 4603
caaaaagagagctgtatcagcaaatccgcattaagtttaaagagtacaatgaagccctcttaatggaaaggcagattcgcaccctagaccccccgacaaaggcgatatcgactacctacgggcttggatcacacctgatatcggaggggctacgatggacgaggtagaccgaaattgctggggcgagcaacacagcgacgatctcgtctttctgaagaatcccgagtggaagcaaaaccaggttctgacacacataaagctcgctggtcacgtaatccagcacaagctctggagatttagaaccgccgtctccgatcaaatcgactcccacgtaatcaaattagggagcgaaaagggtcgagcaggaagctcagcattacgaaggaagtccgctttctcctcccgactcgcgatggccttgtttggcgggatcgccttgatagtgccaactatcatcatggcactacatcagagcgtgcaagtatgcctgataaccacgtcggtcgccacggtcgtgttcgccgtgatacttgctttcggagctcgtgatgccaccggaaaagatgtcctggctgccaccgctgcatacacagctgtcttagtggttttcttgggaagtagtgtttccggcggttctggaggcggcggtacgggacagggatgactttacggatgtgagagaggaccgattggggaagctcgggaggcgctacggatatatatacacctctagactgctgtatcatgtcttcccgggcttagacaactacgttctggaggagctcaacaagtgtgctactttttaacatttaaagaagttagaagcacggtgaaattgaagttgacagatggagacaccaccacggagtataccgtaggcgacgagtactgtgtgatgatgcttcacagtgggtttcaagggtaagctctgccggcaaggaggacgaacgccggatagaagagcttgttacgacccggaaaatacgttcagagcgagtcggtagttgaatattcgagggcgatacgtgcttgacgcttgtctttttcttagttgttgttttcgaatttgtgttgcacaatagtatgtcattggtgggctcaaggttttgacattaacatgtgagaatcggcggtgttatgtcacacctggattaaggtcatcgttcggaaactacctaggtagacagaaaaaagaattcgccca

SEQ ID NO: 4606 - DNA, 1815 bp, Muscodor strobelii
  misc_feature: SGI cDNA ID NO. 561230
  misc_feature: Elevated expression when VOC is produced
  misc_feature: Encodes the peptide sequence at SEQ ID NO 4607
atggtagatgggtttgacgcttacgaaggcgatatcagcgacattgtcttcttattcacggaaatgatccggttaaaccacgtaaagcttgttgtctcttgccgggatttagctcatggtgtctctgagcaaacactcgagaactgtccaggtctgaaacttgacgagttgaatccaggagatatcgagaagctgatcgtgagataccttactcgcaattgcgccacaagaacattaagcgatatcattgagccggtcgctagagaagtcgcccagcggtcgcagggactcttcacttgggcaaaagtcgcggcccgaccgctgaaaaccggactgctggaaggacaaacccttgagcaactccaggagcaggtgaatgatcgcccagacgatcttcacatgctctgtgatcaattgttcagggaaattgatgattccagcaagccgtatgtggcccgtatcctgcaaatactcttagagtggaacaaggtgcaggtatcatttgacccaggtaccgaattcctgggttctattccactattcgatttaactttggccgacggacatgcatcccaggttgttaaaaccataaacatgagtcaatctatgacaggaccactctgccaaatgatggagcgaaggataagaatgacagagtactcggaatttatcgacatacacacccctgtcaacttacgcaatgttgcttgcaagcggccaaccatggtcaaattcatgaacagaacgatttcggatcactttgaacagcgaacggagctacttcgagaagccactagaagcatggattttagtccatctctgtcgctcctcaaatctgtaattcatcggctcaagatattaggcgccccagattcgcgtcagaccatctgggacttggcgatcgcagcactcatttatgcaaatcacgcggaatcagtcttgtcagcccgagagaagacacgtgaggagtcgcaggagaaagtggtgcaagtatacgataatgagaaagcagtccaggacagccaaataccagaatcttgcaggcgcgacgagaaggtctacttcgagctcctttcagagctcgacaagactatgcaagagagccatattaagctcctcaaggatgagaacggttggatagagaggacatatctcatgggaaatacgacgagaagtgacaaaggttcgcgatccaaaagattggcgcgcgcacattggtcgaacttccaccccaccataccacagccactaaactggaaaaatgattttctttcaataatcgtgcagtttggactgagaagatatctaatacatcgactactcgaagacccaaaaactgtgcggacgaagaagggccgtcctttgcttgactatgcgacatgccctctcgacccagtatgctatggtctcatcacaagcggtgttgtcgaagatcttctaggttttggggcaagaccacagcaaaagttctataataaaacctcatgggaaactgccttgagttgggaatacaagtattctgagtcccagaacgaccacgcgtccctttacgagccggccacgctgaacgatacgcgcctcaagatctacgaccttttattaaagaatggcgcagatcccgaagccaggtgcagcgtgaatggtcaggagatctcgcttgaagatctcctacatgggcgatttagaagctgtagtgcaccacttgtcggagaattgaaagttgccatttctaaagctcgcagtgacagaaaaaagaaatcgggattcttgagcgacttatatgacctggccggacaacacaacaagtctaaatag

SEQ ID NO: 4607 - protein, 604 aa, Muscodor strobelii
  misc_feature: SGI Peptide ID NO. 561230
  misc_feature (2)..(497): NCBI GI: 256726514 Blast Desc: NECHADRAFT_79534 [Nectria haematococca mpVI 77-13-4]
  misc_feature (1)..(539): NCBI GI: 256728066 Blast Desc: NECHADRAFT_83494 [Nectria haematococca mpVI 77-13-4]
  misc_feature (1)..(549): NCBI GI: 225684243 Blast Desc: conserved [Paracoccidioides brasiliensis Pb03]
  misc_feature (1)..(549): NCBI GI: 226293863 Blast Desc: conserved [Paracoccidioides brasiliensis Pb18]
  misc_feature (1)..(510): NCBI GI: 46111055 Blast Desc: FG02409.1 [Gibberella zeae PH-1]
  misc_feature (1)..(216): NCBI GI: 256722211 Blast Desc: NECHADRAFT_86865 [Nectria haematococca mpVI 77-13-4]
  misc_feature (2)..(311): NCBI GI: 39979126 Blast Desc: [Neurospora crassa]
  misc_feature (2)..(311): NCBI GI: 164425886 Blast Desc: NCU08565 [Neurospora crassa OR74A] gi|157071107|gb|EAA33591.2| [Neurospora crassa OR74A]
  misc_feature (1)..(221): NCBI GI: 256734179 Blast Desc: NECHADRAFT_35981 [Nectria haematococca mpVI 77-13-4]
  misc_feature (1)..(267): NCBI GI: 46133835 Blast Desc: FG09057.1 [Gibberella zeae PH-1]
  misc_feature: Useful for introducing or modulating the production of volatile compounds
MVDGFDAYEGDISDIVFLFTEMIRLNHVKLVVSCRDLAHGVSEQTLENCPGLKLDELNPGDIEKLIVRYLTRNCATRTLSDIIEPVAREVAQRSQGLFTWAKVAARPLKTGLLEGQTLEQLQEQVNDRPDDLHMLCDQLFREIDDSSKPYVARILQILLEWNKVQVSFDPGTEFLGSIPLFDLTLADGHASQVVKTINMSQSMTGPLCQMMERRIRMTEYSEFIDIHTPVNLRNVACKRPTMVKFMNRTISDHFEQRTELLREATRSMDFSPSLSLLKSVIHRLKILGAPDSRQTIWDLAIAALIYANHAESVLSAREKTREESQEKVVQVYDNEKAVQDSQIPESCRRDEKVYFELLSELDKTMQESHIKLLKDENGWIERTYLMGNTTRSDKGSRSKRLARAHWSNFHPTIPQPLNWKNDFLSIIVQFGLRRYLIHRLLEDPKTVRTKKGRPLLDYATCPLDPVCYGLITSGVVEDLLGFGARPQQKFYNKTSWETALSWEYKYSESQNDHASLYEPATLNDTRLKIYDLLLKNGADPEARCSVNGQEISLEDLLHGRFRSCSAPLVGELKVAISKARSDRKKKSGFLSDLYDLAGQHNKSK

SEQ ID NO: 4608 - DNA, 3385 bp, Muscodor strobelii
  misc_feature: SGI EST ID NO. CUFF.11696.0
  misc_feature: Variant of the nucleotide sequence at SEQ ID NO 4606
cttaattaatcagttgatcagcgaagaccacttgaaaattgcctcgttgccctgcactatgcaattgagtcgaacctagctccaattctctgagaaaatgccaacaacgatgaacgatatggagctcgagctccaagagttcctgaattcaacggcgaaggcactgaaagagatgatggacgcacttgagcattgaatacaacacaaatcctaacctgcaaagcggctgcagtcatagcagatgagacaatcgccgtatcaaacgccactacgcgggattctaatctatatgtctgcagacagttaataaaaataatcgatctatctagacgcgatctagagttgttgtcccgctcatgtctagctttcacatggctgtcaagaaaacgcgagaccatttcaagcaaactgagacactaccgccaaatggttttctccatgctagacattctccttctcaactcctggctaaggatggaaacaagattggaaagaatcgaatactctttagaaagaatcgaatgcaatccgccaagagactttagacaaattgaagattttgacggaaccgggaccgacgacgcggagacgtcgaagcatctacaagaggtaacccttacatggctcaaagctcatgcaaatcactcccagtttgaaggaatcgaggatcgatacgcagacaccttttcgtggatctgggaccgtaagctcttggatcctaggctgcagcacattccatggtctgacttccgggagtggcttgaaaggcccaactctggcctttattttgtaaagggccgggaagggtccggaaagtcaacgttgctgagatatatatggcaggcgccagaaatgagagaatgtcttagcgcatggcaaggtacatccgaactcctcactgccgtgttctcgtttcctagacaaggaagctcgttgaaaaggtcaccgatgggcctcctgaattcaatgctctgcatatttctttcccaggcgccggatctgatgccgcttctatcgacattccaacggtcaatgtctaaatcccgagtcagcaatgcaaccacattaccgcacggactggcagcctcgacaatacgagcgttcgtatcagccttcaacggagcaataaaaaggaaggaaggagctacctgtcaaatttttcattatggtagatgggtttgacgcttacgaaggcgatatcagcgacattgtcttcttattcacggaaatgatccggttaaaccacgtaaagcttgttgtctcttgccgggatttagctcatggtgtctctgagcaaacactcgagaactgtccaggtctgaaacttgacgagttgaatccaggagatatcgagaagctgatcgtgagataccttactcgcaattgcgccacaagaacattaagcgatatcattgagccggtcgctagagaagtcgcccagcggtcgcagggactcttcacttgggcaaaagtcgcggcccgaccgctgaaaaccggactgctggaaggacaaacccttgagcaactccaggagcaggtgaatgatcgcccagacgatcttcacatgctctgtgatcaattgttcagggaaattgatgattccagcaagccgtatgtggcccgtatcctgcaaatactcttagagtggaacaaggtgcaggtatcatttgacccaggtaccgaattcctgggttctattccactattcgatttaactttggccgacggacatgcatcccaggttgttaaaaccataaacatgagtcaatctatgacaggaccactctgccaaatgatggagcgaaggataagaatgacagagtactcggaatttatcgacatacacacccctgtcaacttacgcaatgttgcttgcaagcggccaaccatggtcaaattcatgaacagaacgatttcggatcactttgaacagcgaacggagctacttcgagaagccactagaagcatggattttagtccatctctgtcgctcctcaaatctgtaattcatcggctcaagatattaggcgccccagattcgcgtcagaccatctgggacttggcgatcgcagcactcatttatgcaaatcacgcggaatcagtcttgtcagcccgagagaagacacgtgaggagtcgcaggagaaagtggtgcaagtatacgataatgagaaagcagtccaggacagccaaataccagaatcttgcaggcgcgacgagaaggtctacttcgagctcctttcagagctcgacaagactatgcaagagagccatattaagctcctcaaggatgagaacggttggatagagaggacatatctcatgggaaatacgacgagaagtgacaaaggttcgcgatccaaaagattggcgcgcgcacattggtcgaacttccaccccaccataccacagccactaaactggaaaaatgattttctttcaataatcgtgcagtttggactgagaagatatctaatacatcgactactcgaagacccaaaaactgtgcggacgaagaagggccgtcctttgcttgactatgcgacatgccctctcgacccagtatgctatggtctcatcacaagcggtgttgtcgaagatcttctaggttttggggcaagaccacagcaaaagttctataataaaacctcatgggaaactgccttgagttgggaatacaagtattctgagtcccagaacgaccacgcgtccctttacgagccggccacgctgaacgatacgcgcctcaagatctacgaccttttattaaagaatggcgcagatcccgaagccaggtgcagcgtgaatggtcaggagatctcgcttgaagatctcctacatgggcgatttagaagctgtagtgcaccacttgtcggagaattgaaagttgccatttctaaagctcgcagtgacagaaaaaagaaatcgggattcttgagcgacttatatgacctggccggacaacacaacaagtctaaatagaattgttaaactgagaggacgacgacggcatgtgcgcatagagacatagggtagcccaaatactgctcatgagtccatcttttggtggtgcccaagccgtaggaggcacatagacaataccatactggtcatataagcggcataaatccaattcaagcccagcccagtcctgacggattagaaaatacaatagaaaaagaaggaaaaaaaaaaaaacaaggggcggggagagtatgtcggattctaatttagttgtaaaatccctttgcctgaagtaggagacattccgactgcctatcggtccgaggggcttattgcatcggaagacaattacgagagaggatagaaattgctcataggaaggaataatgataactgttcgctagaatacagccacttgtatag

SEQ ID NO: 4609 - DNA, 1335 bp, Muscodor strobelii
  misc_feature: SGI cDNA ID NO. 561231
  misc_feature: Reduced expression when VOC is produced
  misc_feature: Encodes the peptide sequence at SEQ ID NO 4610
atggctgcaaccacgaccgtcacacggccattgccagccctggccgagggctggtcggccgagaaggacttcaaaccgatcgcgtccatcacggcgtcaacgcagcgcacgatcgagcccgtcggcccgcacttcctcgcccacgcccgccgagctcgacacaagcgcaccttctccgaggacgataggatccaggcccaggagaaggcccagaaggtcgagaaggatgaggagagcgaggagtccgaggccgaggaccccatgatgctgcagcgtgaagccaaggactggaagtcgcaagaccactaccaggtgctcggcctgtccaagtaccgctacaaggccaccgaagaccagatcaagcgcgctcaccgcaagaaggtcctcaagcatcaccccgacaagaaggccgcccagggcaacaccgaggacgacaacttcttcaagtgcatccagaaggccaccgaagtcctgctcgaccccgtcaagcgccgccagttcgactccgtcgacgagaaggccgacgtcgaccccccctccaagaaggaggccgccaagggcaactacctcaagctctggggccgcgtcttcaaggccgaggcccgcttctccagcgcccagcccgtgcccctgctcggcgacgacaaatcgaccaaggaagacgtcgacgctttctacaacttctggtacaacttcgactcctggcgcacctttgagtacctcgacgaggatgtcccggacgacaacgagaaccgcgaccagaagcgccacaccgagcgcaagaacgccaacgcccgcaagaagagaaaggtcgaggacaacgcccgcctgcgcaagttgctcgacgactgctccgccggcgacgagcgcatcaagcgcttccgtcaggaggccaacgccgccaagaacaagaagaagaacgaccgtgaggccgccgagcgtcaggctaaagaagacgccagactgaagaaggaggccgaggagaaggctgccaaggaagctgaggagaaggccaaggctgaccgtgaggctgggaagaaggctaaagaggcggccaagaacgccctcaagaagaacaagcgtgtactcaagagctccgtcaaggacgccaactactttgccagtggcgacgcatcggctgcccagattgacggtgtgctgaacgacgttgagctagtgcagggcaagatcgacgttgatgagattgccgccctcgctggcaagttgaacggcttgaaggtggccgatgagatcaaaggcgtttggagcgctgaggttgctcgtcttgttggtgctgggaagctgaaggatggcgaggctaagaatttggcttag

SEQ ID NO: 4610 - protein, 444 aa, Muscodor strobelii
  misc_feature: SGI Peptide ID NO. 561231
  misc_feature (101)..(168): Pfam Id: PF00226 Pfam Desc: DnaJ domain
  misc_feature (5)..(444): NCBI GI: 116192843 Blast Desc: CHGG_06139 [Chaetomium globosum CBS 148.51] gi|88182052|gb|EAQ89520.1| CHGG_06139 [Chaetomium globosum CBS 148.51]
  misc_feature (1)..(444): NCBI GI: 261353374 Blast Desc: zuotin [Verticillium albo-atrum VaMs.102]
  misc_feature (1)..(444): NCBI GI: 46111807 Blast Desc: FG02785.1 [Gibberella zeae PH-1]
  misc_feature (4)..(444): NCBI GI: 9367275 Blast Desc: zuotin [Neurospora crassa]
  misc_feature (1)..(441): NCBI GI: 171684163 Blast Desc: protein product [Podospora anserina] gi|170942042|emb|CAP67694.1| protein product [Podospora anserina]
  misc_feature (1)..(444): NCBI GI: 39969913 Blast Desc: MGG_10565 [Magnaporthe grisea 70-15] gi|149209241|ref|XP_001521995.1| MGCH7_ch7g113 [Magnaporthe grisea 70-15] gi|86196068|gb|EAQ70706.1| MGCH7_ch7g113 grisea
  misc_feature (1)..(444): NCBI GI: 154308327 Blast Desc: BC1G_07909 [Botryotinia fuckeliana B05.10] gi|150852994|gb|EDN28186.1| BC1G_07909 [Botryotinia fuckeliana B05.10]
  misc_feature (1)..(444): NCBI GI: 156058918 Blast Desc: SS1G_03471 [Sclerotinia sclerotiorum 1980] gi|154701258|gb|EDO00997.1| SS1G_03471 [Sclerotinia sclerotiorum 1980]
  misc_feature (1)..(444): NCBI GI: 121714487 Blast Desc: ribosome associated DnaJ chaperone Zuotin, [Aspergillus clavatus NRRL 1] gi|119403008|gb|EAW13428.1| ribosome associated DnaJ chaperone Zuotin, [Aspergillus clavatus
  misc_feature (1)..(443): NCBI GI: 169782966 Blast Desc: [Aspergillus oryzae RIB40] gi|238492703|ref|XP_002377588.1| ribosome associated DnaJ chaperone Zuotin, [Aspergillus flavus NRRL3357] protein product
  misc_feature: Useful for introducing or modulating the production of volatile compounds
MAATTTVTRPLPALAEGWSAEKDFKPIASITASTQRTIEPVGPHFLAHARRARHKRTFSEDDRIQAQEKAQKVEKDEESEESEAEDPMMLQREAKDWKSQDHYQVLGLSKYRYKATEDQIKRAHRKKVLKHHPDKKAAQGNTEDDNFFKCIQKATEVLLDPVKRRQFDSVDEKADVDPPSKKEAAKGNYLKLWGRVFKAEARFSSAQPVPLLGDDKSTKEDVDAFYNFWYNFDSWRTFEYLDEDVPDDNENRDQKRHTERKNANARKKRKVEDNARLRKLLDDCSAGDERIKRFRQEANAAKNKKKNDREAAERQAKEDARLKKEAEEKAAKEAEEKAKADREAGKKAKEAAKNALKKNKRVLKSSVKDANYFASGDASAAQIDGVLNDVELVQGKIDVDEIAALAGKLNGLKVADEIKGVWSAEVARLVGAGKLKDGEAKNLA

SEQ ID NO: 4611 - DNA, 1701 bp, Muscodor strobelii
  misc_feature: SGI EST ID NO. CUFF.11718.0
  misc_feature: Variant of the nucleotide sequence at SEQ ID NO 4609
ccgatctctgaatttgctgctgccaaaaaaatatccagccccacgttctttttttcggtgtcatcgtctggtgcaggtggttattctgacatcccatctcttcttttcccttgccattctgcactctctgttcgcaaccaacacacacgaacagtcaacatggctgcaaccacgaccgtcacacggccattgccagccctggccgagggctggtcggccgagaaggacttcaaaccgatcgcgtccatcacggcgtcaacgcagcgcacgatcgagcccgtcggcccgcacttcctcgcccacgcccgccgagctcgacacaagcgcaccttctccgaggacgataggatccaggcccaggagaaggcccagaaggtcgagaaggatgaggagagcgaggagtccgaggccgaggaccccatgatgctgcagcgtgaagccaaggactggaagtcgcaagaccactaccaggtgctcggcctgtccaagtaccgctacaaggccaccgaagaccagatcaagcgcgctcaccgcaagaaggtcctcaagcatcaccccgacaagaaggccgcccagggcaacaccgaggacgacaacttcttcaagtgcatccagaaggccaccgaagtcctgctcgaccccgtcaagcgccgccagttcgactccgtcgacgagaaggccgacgtcgaccccccctccaagaaggaggccgccaagggcaactacctcaagctctggggccgcgtcttcaaggccgaggcccgcttctccagcgcccagcccgtgcccctgctcggcgacgacaaatcgaccaaggaagacgtcgacgctttctacaacttctggtacaacttcgactcctggcgcacctttgagtacctcgacgaggatgtcccggacgacaacgagaaccgcgaccagaagcgccacaccgagcgcaagaacgccaacgcccgcaagaagagaaaggtcgaggacaacgcccgcctgcgcaagttgctcgacgactgctccgccggcgacgagcgcatcaagcgcttccgtcaggaggccaacgccgccaagaacaagaagaagaacgaccgtgaggccgccgagcgtcaggctaaagaagacgccagactgaagaaggaggccgaggagaaggctgccaaggaagctgaggagaaggccaaggctgaccgtgaggctgggaagaaggctaaagaggcggccaagaacgccctcaagaagaacaagcgtgtactcaagagctccgtcaaggacgccaactactttgccagtggcgacgcatcggctgcccagattgacggtgtgctgaacgacgttgagctagtgcagggcaagatcgacgttgatgagattgccgccctcgctggcaagttgaacggcttgaaggtggccgatgagatcaaaggcgtttggagcgctgaggttgctcgtcttgttggtgctgggaagctgaaggatggcgaggctaagaatttggcttagtgtggtggttttgtgagaacgaaagagtgagaggaaaggaaatggcattggcaacggcattagacatgaagcgtatgatacatggtagatggctatagactggttacaatcactaatcagatgaattcatgagcatttcattacgctcagtctgcgagttttgatgaggtgtgatgattttctgtctgcttgatttatgaagcgagg

SEQ ID NO: 4612 - DNA, 339 bp, Muscodor strobelii
  misc_feature: SGI cDNA ID NO. 561232
  misc_feature: Encodes the peptide sequence at SEQ ID NO 4613
atgtcaactgcgcttccagcctacaggtcgttgtggcgagctgccagagtcgctttccaaggtgaccaaagaatgctcagcgctgcccaatcctccatacgcgacggcttccgcgccaacgccgccctcgaaccctcgaaccctgaattttccaccgccatccagcacgcccaagaagtcgccaccatactacgccagaacgtcgttcagggtgcaaagcaaaccgatgagacatacaaattacggatacacgaagacacggaacgaggggacaacgacaccgtcaagttcgccgccaactccctcagcggcaccggcgtcaagtgctgtagtagttag

SEQ ID NO: 4613 - protein, 112 aa, Muscodor strobelii
  misc_feature: SGI Peptide ID NO. 561232
  misc_feature (3)..(112): NCBI GI: 85118149 Blast Desc: NCU03008 [Neurospora crassa OR74A] gi|16945379|emb|CAB97291.2| conserved [Neurospora crassa] gi|28927202|gb|EAA36158.1| conserved [Neurospora crassa OR74A]
  misc_feature (3)..(110): NCBI GI: 261353375 Blast Desc: conserved [Verticillium albo-atrum VaMs.102]
  misc_feature (1)..(109): NCBI GI: 149209243 Blast Desc: MGCH7_ch7g114 [Magnaporthe grisea 70-15] gi|86196069|gb|EAQ70707.1| MGCH7_ch7g114 [Magnaporthe grisea 70-15]
  misc_feature (4)..(95): NCBI GI: 256721926 Blast Desc: [Nectria haematococca mpVI 77-13-4]
  misc_feature (4)..(112): NCBI GI: 169610675 Blast Desc: SNOG_08445 [Phaeosphaeria nodorum SN15] gi|160702126|gb|EAT84721.2| SNOG_08445 [Phaeosphaeria nodorum SN15]
  misc_feature (25)..(111): NCBI GI: 171684161 Blast Desc: protein product [Podospora anserina] gi|170942041|emb|CAP67693.1| protein product [Podospora anserina]
  misc_feature (4)..(98): NCBI GI: 46111805 Blast Desc: FG02784.1 [Gibberella zeae PH-1]
  misc_feature (4)..(110): NCBI GI: 156058914 Blast Desc: SS1G_03469 [Sclerotinia sclerotiorum 1980] gi|154701256|gb|EDO00995.1| SS1G_03469 [Sclerotinia sclerotiorum 1980]
  misc_feature (4)..(112): NCBI GI: 189205142 Blast Desc: PTRG_08574 [Pyrenophora tritici-repentis Pt-1C-BFP] gi|187986005|gb|EDU51493.1| PTRG_08574 [Pyrenophora tritici-repentis Pt-1C-BFP]
  misc_feature (4)..(97): NCBI GI: 154308323 Blast Desc: BC1G_07907 [Botryotinia fuckeliana B05.10] gi|150852992|gb|EDN28184.1| BC1G_07907 [Botryotinia fuckeliana B05.10]
MSTALPAYRSLWRAARVAFQGDQRMLSAAQSSIRDGFRANAALEPSNPEFSTAIQHAQEVATILRQNVVQGAKQTDETYKLRIHEDTERGDNDTVKFAANSLSGTGVKCCSS

SEQ ID NO: 4614 - DNA, 2150 bp, Muscodor strobelii
  misc_feature: SGI EST ID NO. CUFF.11838.0
  misc_feature: Variant of the nucleotide sequence at SEQ ID NO 4612
taacactatgatagattcgaggctgcaagattgtattagaaacgttcctagaaagcgtaattgctgctctgtacattgatcttcgcataactatagacccgcattatcaactaatttcattttccaacccaccctttacttcagcaacgatgtcaactgcgcttccagcctacaggtcgttgtggcgagctgccagagtcgctttccaaggtgaccaaagaatgctcagcgctgcccaatcctccatacgcgacggcttccgcgccaacgccgccctcgaaccctcgaaccctgaattttccaccgccatccagcacgcccaagaagtcgccaccatactacgccagaacgtcgttcagggtgcaaagcaaaccgatgagacatacaaattacggatacacgaagacacggaacgaggggacaacgacaccgtcaagttcgccgccaactccctcagcggcaccggcgtcaagtgctgtagtagttagatgtgtggatggacgaagggattcgaagcccctttttcattctttgtattatatcaattgtgataccctgtgtaccaacaaacacctcgccccatgatcatgaccatcatgaccttttttctgcagaattggaaacgctacatgtacaaattaacccgagtcgcctttccctggtggtcttccttgaacgcctgtgatgcaataatatagctggttgtgtcgatctgagtgatgtttggaacatgcgtcttcgtcgcaaagagtgcttagtctcctgccaaactggcatagttgacgtcgctggcgcccggtggtgcagcgatggccgacattttggccgcatccgcctgttgctgtccttcctgtgtcgatgctccgccctcgatcgctttcctcccgccggccgggccccgacgctgatctgcaaatgctgaccttccgtcgcgtatcatctcgcctctctcttcgcggttcatggtgccgatcggcttgggctgtgaccatcgcactctcaacggacatcccgcaatgacggcgcgcccctggcatgcctcggccgcccgctcggccccttctctcgtttcgtagttgatgaatgcgcagtgtgacatgtggctgcagatgagcgacttgatcttgccgtgctccttgaagaagtctcggattttgtactcgggcaggtcatcctcaacacccgtcacgaataggctcatgatcgacttgtcgttgggcggtatatagtctttcgggccaggcggcagctgcgatgcgctagggaagggtcgtcggccgcccggtcgtgcgccagcggcggcggcggctcttgaatcgcgtgatcggatgggtcctggccctcccacgccggctccaacggcagcgttgccacctgtcgcactccccgttgcatttggtgatgacgatgacgaggctgctccactgttgctaccgtcctcgatggtgcgacctttgcggaagtagggtttgcttgtggcgaggcggcgcagcagttcgcgggccttctcgtcagccttatcgtactcctcggtgccgtgtccctcctcgatggccttctcgttgttctgggcgtagtactcgcggttgatctccgaggtgggcccgggggcgaccatcttgagggcggcgtcgcgcagctggatgggcaggccgaactgcaggtcgagcatgcagcactggcagcagttcttcatgcgggcgcaggtcaggcagatgttggtgcgcttcttgcggccgtgcgcgcgatccgccggccacgagaacaccgtgaacggccgtgtgcagatcttgcactcggctccgtagtcttccttgagcatcttgacgtaggggttgggcggcaggcagttctcgcagacggaggggaagtcggtcgtctcccaccccgaccggttgaggtcttgcttgatctgcggcggcatcgtgcgagcttctcaacgttgttgacggtgttgaagctgcgcaagtcgtgtgtatgagcgagacacaaggtgcagagacctaggtaatgcgtacgtagataaagacgattgtagctctagctttcttgttgcggcagatgcaatcattgattgtggctgatgttttgtcttgcaattgaggtggcggccttaggtaatcaggttcttatcaatagggctccctcag

SEQ ID NO: 4615 - DNA, 1170 bp, Muscodor strobelii
  misc_feature: SGI cDNA ID NO. 561233
  misc_feature: Reduced expression when VOC is produced
  misc_feature: Encodes the peptide sequence at SEQ ID NO 4616
atgccgccgcagatcaagcaagacctcaaccggtcggggtgggagacgaccgacttcccctccgtctgcgagaactgcctgccgcccaacccctacgtcaagatgctcaaggaagactacggagccgagtgcaagatctgcacacggccgttcacggtgttctcgtggccggcggatcgcgcgcacggccgcaagaagcgcaccaacatctgcctgacctgcgcccgcatgaagaactgctgccagtgctgcatgctcgacctgcagttcggcctgcccatccagctgcgcgacgccgccctcaagatggtcgcccccgggcccacctcggagatcaaccgcgagtactacgcccagaacaacgagaaggccatcgaggagggacacggcaccgaggagtacgataaggctgacgagaaggcccgcgaactgctgcgccgcctcgccacaagcaaaccctacttccgcaaaggtcgcaccatcgaggacggtagcaacagtggagcagcctcgtcatcgtcatcaccaaatgcaacggggagtgcgacaggtggcaacgctgccgttggagccggcgtgggagggccaggacccatccgatcacgcgattcaagagccgccgccgccgctggcgcacgaccgggcggccgacgacccttccctagcgcatcgcagctgccgcctggcccgaaagactatataccgcccaacgacaagtcgatcatgagcctattcgtgacgggtgttgaggatgacctgcccgagtacaaaatccgagacttcttcaaggagcacggcaagatcaagtcgctcatctgcagccacatgtcacactgcgcattcatcaactacgaaacgagagaaggggccgagcgggcggccgaggcatgccaggggcgcgccgtcattgcgggatgtccgttgagagtgcgatggtcacagcccaagccgatcggcaccatgaaccgcgaagagagaggcgagatgatacgcgacggaaggtcagcatttgcagatcagcgtcggggcccggccggcgggaggaaagcgatcgagggcggagcatcgacacaggaaggacagcaacaggcggatgcggccaaaatgtcggccatcgctgcaccaccgggcgccagcgacgtcaactatgccagtttggcaggagactaa

SEQ ID NO: 4616 - protein, 389 aa, Muscodor strobelii
  misc_feature: SGI Peptide ID NO. 561233
  misc_feature (244)..(310): Pfam Id: PF00076 Pfam Desc: RNA recognition motif. (a.k.a. RRM, RBD, or RNP domain)
  misc_feature (1)..(389): NCBI GI: 171684159 Blast Desc: protein product [Podospora anserina] gi|170942040|emb|CAP67692.1| protein product [Podospora anserina]
  misc_feature (1)..(389): NCBI GI: 164427549 Blast Desc: pre-mRNA splicing factor slt11 [Neurospora crassa OR74A] gi|189034064|sp|Q7RUX3.2|SLT11_NEUCR RecName: Full=Pre-mRNA-splicing factor slt-11 gi|157071790|gb|EAA36157.2|
  misc_feature (1)..(389): NCBI GI: 256721888 Blast Desc: NECHADRAFT_103897 [Nectria haematococca mpVI 77-13-4]
  misc_feature (1)..(389): NCBI GI: 116192845 Blast Desc: CHGG_06140 [Chaetomium globosum CBS 148.51] gi|88182053|gb|EAQ89521.1| CHGG_06140 [Chaetomium globosum CBS 148.51]
  misc_feature (1)..(389): NCBI GI: 154308321 Blast Desc: BC1G_07906 [Botryotinia fuckeliana B05.10] gi|150852991|gb|EDN28183.1| BC1G_07906 [Botryotinia fuckeliana B05.10]
  misc_feature (1)..(389): NCBI GI: 156058912 Blast Desc: SS1G_03468 [Sclerotinia sclerotiorum 1980] gi|154701255|gb|EDO00994.1| SS1G_03468 [Sclerotinia sclerotiorum 1980]
  misc_feature (2)..(389): NCBI GI: 70982045 Blast Desc: pre-RNA splicing factor Slt11 [Aspergillus fumigatus Af293] gi|74666312|sp|Q4W9V0.1|SLT11_ASPFU RecName: Full=Pre-mRNA-splicing factor slt11 gi|66844174|gb|EAL84513.1|
  misc_feature (2)..(389): NCBI GI: 119487176 Blast Desc: pre-RNA splicing factor Slt11, [Neosartorya fischeri NRRL 181] gi|119410600|gb|EAW20546.1| pre-RNA splicing factor Slt11, [Neosartorya fischeri NRRL 181]
  misc_feature (2)..(389): NCBI GI: 145248892 Blast Desc: An14g01580 [Aspergillus niger] gi|134081458|emb|CAK46471.1| protein product [Aspergillus niger]
  misc_feature (1)..(389): NCBI GI: 255933816 Blast Desc: Pc12g14830 [Penicillium chrysogenum Wisconsin 54-1255] gi|211582906|emb|CAP81110.1| Pc12g14830 [Penicillium chrysogenum Wisconsin 54-1255]
  misc_feature: Useful for introducing or modulating the production of volatile compounds
MPPQIKQDLNRSGWETTDFPSVCENCLPPNPYVKMLKEDYGAECKICTRPFTVFSWPADRAHGRKKRTNICLTCARMKNCCQCCMLDLQFGLPIQLRDAALKMVAPGPTSEINREYYAQNNEKAIEEGHGTEEYDKADEKARELLRRLATSKPYFRKGRTIEDGSNSGAASSSSSPNATGSATGGNAAVGAGVGGPGPIRSRDSRAAAAAGARPGGRRPFPSASQLPPGPKDYIPPNDKSIMSLFVTGVEDDLPEYKIRDFFKEHGKIKSLICSHMSHCAFINYETREGAERAAEACQGRAVIAGCPLRVRWSQPKPIGTMNREERGEMIRDGRSAFADQRRGPAGGRKAIEGGASTQEGQQQADAAKMSAIAAPPGASDVNYASLAGD

SEQ ID NO: 4617 - DNA, 2280 bp, Muscodor strobelii
  misc_feature: SGI EST ID NO. CUFF.11838.1
  misc_feature: Variant of the nucleotide sequence at SEQ ID NO 4615
ctgagggagccctattgataagaacctgattacctaaggccgccacctcaattgcaagacaaaacatcagccacaatcaatgattgcatctgccgcaacaagaaagctagagctacaatcgtctttatctacgtacgcattacctaggtctctgcaccttgtgtctcgctcatacacacgacttgcgcagcttcaacaccgtcaacaacgttgagaagctcgcacgatgccgccgcagatcaagcaagacctcaaccggtcggggtgggagacgaccgacttcccctccgtctgcgagaactgcctgccgcccaacccctacgtcaagatgctcaaggaagactacggagccgagtgcaagatctgcacacggccgttcacggtgttctcgtggccggcggatcgcgcgcacggccgcaagaagcgcaccaacatctgcctgacctgcgcccgcatgaagaactgctgccagtgctgcatgctcgacctgcagttcggcctgcccatccagctgcgcgacgccgccctcaagatggtcgcccccgggcccacctcggagatcaaccgcgagtactacgcccagaacaacgagaaggccatcgaggagggacacggcaccgaggagtacgataaggctgacgagaaggcccgcgaactgctgcgccgcctcgccacaagcaaaccctacttccgcaaaggtcgcaccatcgaggacggtagcaacagtggagcagcctcgtcatcgtcatcaccaaatgcaacggggagtgcgacaggtggcaacgctgccgttggagccggcgtgggagggccaggacccatccgatcacgcgattcaagagccgccgccgccgctggcgcacgaccgggcggccgacgacccttccctagcgcatcgcagctgccgcctggcccgaaagactatataccgcccaacgacaagtcgatcatgagcctattcgtgacgggtgttgaggatgacctgcccgagtacaaaatccgagacttcttcaaggagcacggcaagatcaagtcgctcatctgcagccacatgtcacactgcgcattcatcaactacgaaacgagagaaggggccgagcgggcggccgaggcatgccaggggcgcgccgtcattgcgggatgtccgttgagagtgcgatggtcacagcccaagccgatcggcaccatgaaccgcgaagagagaggcgagatgatacgcgacggaaggtcagcatttgcagatcagcgtcggggcccggccggcgggaggaaagcgatcgagggcggagcatcgacacaggaaggacagcaacaggcggatgcggccaaaatgtcggccatcgctgcaccaccgggcgccagcgacgtcaactatgccagtttggcaggagactaagcactctttgcgacgaagacgcatgttccaaacatcactcagatcgacacaaccagctatattattgcatcacaggcgttcaaggaagaccaccagggaaaggcgactcgggttaatttgtacatgtagcgtttccaattctgcagaaaaaaggtcatgatggtcatgatcatggggcgaggtgtttgttggtacacagggtatcacaattgatataatacaaagaatgaaaaaggggcttcgaatcccttcgtccatccacacatctaactactacagcacttgacgccggtgccgctgagggagttggcggcgaacttgacggtgtcgttgtcccctcgttccgtgtcttcgtgtatccgtaattctaatcgtgttgccaagtcagctgagagtgtaggtacggtcgaaaatagaaaagactgactgtatgtctcatcggtttgctttgcaccctgaacgacgttctggcgtagtatggtggcgacttcttgggcgtgctggatggcggtggaaaattcagggttcgagggttcgagggcggcgttggcgcggaagccgtcgcgtatggaggattgggcagcgctgagcattctttggtcacctgtggtactcgagagtcagtctatggctcaaagaggatcaacacttctgtgacatcgtcgttggcgcaccttggaaagcgactctggcagctcgccacaacgacctgtaggctggaagcgcagttgacatcgttgctgaagtaaagggtgggttggaaaatgaaattagttgataatgcgggtctatagttatgcgaagatcaatgtacagagcagcaattacgctttctaggaacgtttctaatacaatcttgcagcctcgaatctatcatagtgtta

SEQ ID NO: 4618 - DNA, 1935 bp, Muscodor strobelii
  misc_feature: SGI cDNA ID NO. 561234
  misc_feature: Encodes the peptide sequence at SEQ ID NO 4619
atgccaataacttctcttttttcacacctggtggccgcacgccaagcccacattcaggtgctaccatggctaaatacactcaagtatggtattgttgcacatgcggcgaaggtccattcactgtcgcactatttcctgcctgcccccattgcggagttcaacgctgtagctattgccctattgaaacaatcaaatccaagagaaaacaaagctcatttccggtacaagtatgagcattcctcgggccagtctttcatccgagtatccatgcaagattctcgcgcatctcagcgattcctatgcagaattgatcacttggagaacttctgcgggaaggcggatttagagactctgaggaacggcacaaatgcacaggcaatccgtcctgttgctctgattgatgatagaaaggtagatctcatcagcattagtgatgcgggtatttgcagaacgtcaaaaggcctcctcagtccccaacaacttcatcgtgttctcagcctgccacgatatacaactggcggcgcttctacatctgcaggtacagggactgagactgatattgaagtagatgctgaacggcggacaatctacataacaaacctcaactcgtttgctgttctcgctctcctgcacacagtatcattcaatcaagcgaatgttttgcgcgattttatttacaaccacctttgtttcacggcgtcatttggagtcacgataccgcttcgctttaagacatttgcttttgagtttcatttacctttctatgcatggagaaggggtcccatagctattgaagatgaacgacacatgtctgacggacgacccttaagacgatcccaatatcttggctttctcgacgtctctcctttcggcgaccgttcaagtaatgacaagacaagcgacgattacatttacgaagctcaaatgtcctgtctcgtcgcaggcttggacaattcatcttggattgcatatgcttttgttgatacttaccacaacggcccacgaaaggaggatagtgggtcaggaaacgattcggatggcgacagtgacgccgaggatgatgacgacgacgatgaagatagcgtgcaatattatcatagaatggctagagatagcgaccgggtggctaaagatcctttgagtggaggaactttgccagctgatttacccgaatgggatccacgcatgtacttcctgagagttctgctagcaagaatggatcaggtcaaacatgagtggatcaatgttgtgtcaatgatcaagaagaaaacatgcccctatacgcaagactaccacttgtcacgcaatttatataactctccagacacaaagaatcgcggtgagcgtatgaaacagtttcatgactggacagtggcttctctacgtctgctgggcgaaattatccacgtcctatcgggatctatccaagtctgggatcgattcaaaagtcgtgaggccgagtatctcctagacgaaaacataccaaaagacaggccatcttcatcccggtgcctgatcgccattgacaaacactttgacgaaatgagagatcaattacgtgttttagagtaccaggaaaaagtctgcaacaacatctcaagagaactcgagtcctaccttcaactagaagatcgcaactcaactctcatccagcttcgcaccaacgagaatctaaaagccatcactattctcgcactgcttgtgacacctccggcagttgctgccgcgatctacagcatgcaagatggggtgcttccctgggagcctagtacgctcgcctggggacttaccacattgacattgtatgctttcgtcggcttggtcctactatttcttctcaactggtcgcttgctaaaacagaccgagaactacaaggccatgagccgctaccaccgctcagatctcacacgcacgtggacttggacttcgtctaa

SEQ ID NO: 4619 - protein, 644 aa, Muscodor strobelii
  misc_feature: SGI Peptide ID NO. 561234
  misc_feature (68)..(616): NCBI GI: 256732348 Blast Desc: NECHADRAFT_80835 [Nectria haematococca mpVI 77-13-4]
  misc_feature (128)..(619): NCBI GI: 169601690 Blast Desc: SNOG_03716 [Phaeosphaeria nodorum SN15] gi|160705992|gb|EAT88921.2| SNOG_03716 [Phaeosphaeria nodorum SN15]
  misc_feature (228)..(505): NCBI GI: 116191399 Blast Desc: CHGG_05417 [Chaetomium globosum CBS 148.51] gi|88181330|gb|EAQ88798.1| CHGG_05417 [Chaetomium globosum CBS 148.51]
  misc_feature (90)..(430): NCBI GI: 212544228 Blast Desc: conserved [Penicillium marneffei ATCC 18224] gi|210065237|gb|EEA19331.1| conserved [Penicillium marneffei ATCC 18224]
  misc_feature (246)..(578): NCBI GI: 256731898 Blast Desc: NECHADRAFT_80737 [Nectria haematococca mpVI 77-13-4]
  misc_feature (190)..(612): NCBI GI: 169601682 Blast Desc: SNOG_03712 [Phaeosphaeria nodorum SN15] gi|111067797|gb|EAT88917.1| SNOG_03712 [Phaeosphaeria nodorum SN15]
  misc_feature (190)..(425): NCBI GI: 189193771 Blast Desc: [Pyrenophora tritici-repentis Pt-1C-BFP] gi|187978788|gb|EDU45414.1| [Pyrenophora tritici-repentis Pt-1C-BFP]
  misc_feature (234)..(579): NCBI GI: 146324089 Blast Desc: conserved [Aspergillus fumigatus Af293] gi|129558074|gb|EAL91904.2| conserved [Aspergillus fumigatus Af293]
  misc_feature (249)..(421): NCBI GI: 159126325 Blast Desc: conserved [Aspergillus fumigatus A1163]
  misc_feature (252)..(359): NCBI GI: 46114796 Blast Desc: FG03240.1 [Gibberella zeae PH-1]
MPITSLFSHLVAARQAHIQVLPWLNTLKYGIVAHAAKVHSLSHYFLPAPIAEFNAVAIALLKQSNPRENKAHFRYKYEHSSGQSFIRVSMQDSRASQRFLCRIDHLENFCGKADLETLRNGTNAQAIRPVALIDDRKVDLISISDAGICRTSKGLLSPQQLHRVLSLPRYTTGGASTSAGTGTETDIEVDAERRTIYITNLNSFAVLALLHTVSFNQANVLRDFIYNHLCFTASFGVTIPLRFKTFAFEFHLPFYAWRRGPIAIEDERHMSDGRPLRRSQYLGFLDVSPFGDRSSNDKTSDDYIYEAQMSCLVAGLDNSSWIAYAFVDTYHNGPRKEDSGSGNDSDGDSDAEDDDDDDEDSVQYYHRMARDSDRVAKDPLSGGTLPADLPEWDPRMYFLRVLLARMDQVKHEWINVVSMIKKKTCPYTQDYHLSRNLYNSPDTKNRGERMKQFHDWTVASLRLLGEIIHVLSGSIQVWDRFKSREAEYLLDENIPKDRPSSSRCLIAIDKHFDEMRDQLRVLEYQEKVCNNISRELESYLQLEDRNSTLIQLRTNENLKAITILALLVTPPAVAAAIYSMQDGVLPWEPSTLAWGLTTLTLYAFVGLVLLFLLNWSLAKTDRELQGHEPLPPLRSHTHVDLDFV

SEQ ID NO: 4620 - DNA, 2910 bp, Muscodor strobelii
  misc_feature: SGI EST ID NO. CUFF.11712.0
  misc_feature: Variant of the nucleotide sequence at SEQ ID NO 4618
tttaggcagtgagggaggcaatttcccatcagttgggcagtgcagaagcagatgatacttgaagcattgcaaggcagcgaatcgcgttcttctcatatcaattcttcatcttcagctttttattctgtatgttagctgagtttgcaaggtcggctccccgcacagatcgacatcttggtatgcaccttgaacaccgacaccacaagactcgggcacctccataagacggcggagtgcatcatttattgtgatattgtctagcaccgccaccacatccatcgtcaaattcgcgtgggagcaaatctaactcgagggcattatccattatcctcgacgacttgttatatacctacttctgcgcatttccatgccaataacttctcttttttcacacctggtggccgcacgccaagcccacattcaggtgctaccatggctaaatacactcaagtatggtattgttgcacatgcggcgaaggtccattcactgtcgcactatttcctgcctgcccccattgcggagttcaacgctgtagctattgccctattgaaacaatcaaatccaagagtaagagatagcaaggcttagttcaaaatgaccagctttggacaagcacaaagtcggccaccatattactcttggaccaatgaatttgagaagcgcagatcagctcgtacttatctccaggaaaacaaagctcatttccggtacaagtatgagcattcctcgggccagtctttcatccgagtatccatgcaagattctcgcgcatctcagcgattcctatgcagaattgatcacttggagaacttctgcgggaaggcggatttagagactctgaggaacggcacaaatgcacaggcaatccgtcctgttgctctgattgatgatagaaaggtagatctcatcagcattagtgatgcgggtatttgcagaacgtcaaaaggcctcctcagtccccaacaacttcatcgtgttctcagcctgccagtgagtgaattagcaaagcttagagtaaccgttttcagactcaccttaaaacctatagcgatatacaactggcggcgcttctacatctgcaggtacagggactgagactgatattgaagtagatgctgaacggcggacaatgtgggttagcaggcaattcgctaactgagaaagtgttgacaatttcaacatagctacataacaaacctcaactcgtttgctgttctcgctctcctgcacacagtatcattcaatcaagcgaatgttttgcgcgattttatttacaaccacctttgtttcacggcgtcatttggagtcacgataccggtttgtcattgaagctgaggtcaagaaaggaatacaatctaataattgtgtatagcttcgctttaagacatttgcttttgagtttcatttacctttctatgcatggagaaggggtcccatagctattgaagatgaacgacacatgtctgacggacgacccttaagacgatcccaatatcttggctttctcgacgtctctcctttcggcgaccgttcaagtaatgacaagacaagcgacgattacatttacgaagctcaaatgtcctgtctcgtcgcaggcttggacaattcatcttggattgcatatgcttttgttgatacttaccacaacggcccacgaaaggaggatagtgggtcaggaaacgattcggatggcgacagtgacgccgaggatgatgacgacgacgatgaagatagcgtgcaatattatcatagaatggctagagatagcgaccgggtggctaaagatcctttgagtggaggaactttgccagctgatttacccgaatgggatccacgcatgtacttcctgagagttctgctagcaagaatggatcaggtcaaacatgagtggatcaatgttgtgtcaatgatcaagaagaaaacatgcccctatacgcaagactaccacttgtcacgcaatttatataactctccagacacaaagaatcgcggtgagcgtatgaaacagtttcatgactggacagtggcttctctacgtctgctgggcgaaattatccacgtcctatcgggatctatccaagtctgggatcgattcaaaagtcgtgaggccgagtatctcctagacgaaaacataccaaaagacaggccatcttcatcccggtgcctgatcgccattgacaaacactttgacgaaatgagagatcaattacgtgttttagagtaccaggaaaaagtctgcaacaacatctcaagagaactcgagtcctaccttcaactagaagatcgcaactcaactctcatccagcttcgcaccaacgagaatctaaaagccatcactattctcgcactgcttgtgacacctccggcagttgctgccgcgatctacagcatgcaagatggggtgcttccctgggagcctagtacgctcgcctggggacttaccacattgacattgtatgctttcgtcggcttggtcctactatttcttctcaactggtcgcttgctaaaacagaccgagaactacaaggccatgagccgctacgtaaggattcaagacatagatctggcgcgtttcggccctggtcgaggaacatacgcaggaggtcctctatcgcattttctcgtcatgtaaataatgagagatatgacgatgatatagaactaagcgagataggaagccccgtaagagcagctagcttagtatagttgtcaatcagcaccgctcagatctcacacgcacgtggacttggacttcgtctaaattacatctacaatccactaacgtgttgctttatgtcttacggctcgcgttatactgagagattccgctggcgcatgtgttagtcaatgcccgatgacagtctaccaaattctagcgatatccgaagatcgatcttacgtatatctt

SEQ ID NO: 4621 - DNA, 1875 bp, Muscodor strobelii
  misc_feature: SGI cDNA ID NO. 561235
  misc_feature: Encodes the peptide sequence at SEQ ID NO 4622
atggcaaggctaaatacactcaagtatggtattgttgcacatgcggcgaaggtccattcactgtcgcactatttcctgcctgcccccattgcggagttcaacgctgtagctattgccctattgaaacaatcaaatccaagagaaaacaaagctcatttccggtacaagtatgagcattcctcgggccagtctttcatccgagtatccatgcaagattctcgcgcatctcagcgattcctatgcagaattgatcacttggagaacttctgcgggaaggcggatttagagactctgaggaacggcacaaatgcacaggcaatccgtcctgttgctctgattgatgatagaaaggtagatctcatcagcattagtgatgcgggtatttgcagaacgtcaaaaggcctcctcagtccccaacaacttcatcgtgttctcagcctgccacgatatacaactggcggcgcttctacatctgcaggtacagggactgagactgatattgaagtagatgctgaacggcggacaatctacataacaaacctcaactcgtttgctgttctcgctctcctgcacacagtatcattcaatcaagcgaatgttttgcgcgattttatttacaaccacctttgtttcacggcgtcatttggagtcacgataccgcttcgctttaagacatttgcttttgagtttcatttacctttctatgcatggagaaggggtcccatagctattgaagatgaacgacacatgtctgacggacgacccttaagacgatcccaatatcttggctttctcgacgtctctcctttcggcgaccgttcaagtaatgacaagacaagcgacgattacatttacgaagctcaaatgtcctgtctcgtcgcaggcttggacaattcatcttggattgcatatgcttttgttgatacttaccacaacggcccacgaaaggaggatagtgggtcaggaaacgattcggatggcgacagtgacgccgaggatgatgacgacgacgatgaagatagcgtgcaatattatcatagaatggctagagatagcgaccgggtggctaaagatcctttgagtggaggaactttgccagctgatttacccgaatgggatccacgcatgtacttcctgagagttctgctagcaagaatggatcaggtcaaacatgagtggatcaatgttgtgtcaatgatcaagaagaaaacatgcccctatacgcaagactaccacttgtcacgcaatttatataactctccagacacaaagaatcgcggtgagcgtatgaaacagtttcatgactggacagtggcttctctacgtctgctgggcgaaattatccacgtcctatcgggatctatccaagtctgggatcgattcaaaagtcgtgaggccgagtatctcctagacgaaaacataccaaaagacaggccatcttcatcccggtgcctgatcgccattgacaaacactttgacgaaatgagagatcaattacgtgttttagagtaccaggaaaaagtctgcaacaacatctcaagagaactcgagtcctaccttcaactagaagatcgcaactcaactctcatccagcttcgcaccaacgagaatctaaaagccatcactattctcgcactgcttgtgacacctccggcagttgctgccgcgatctacagcatgcaagatggggtgcttccctgggagcctagtacgctcgcctggggacttaccacattgacattgtatgctttcgtcggcttggtcctactatttcttctcaactggtcgcttgctaaaacagaccgagaactacaaggccatgagccgctaccaccgctcagatctcacacgcacgtggacttggacttcgtctaa

SEQ ID NO: 4622 - protein, 624 aa, Muscodor strobelii
  misc_feature: SGI Peptide ID NO. 561235
  misc_feature (48)..(596): NCBI GI: 256732348 Blast Desc: NECHADRAFT_80835 [Nectria haematococca mpVI 77-13-4]
  misc_feature (108)..(599): NCBI GI: 169601690 Blast Desc: SNOG_03716 [Phaeosphaeria nodorum SN15] gi|160705992|gb|EAT88921.2| SNOG_03716 [Phaeosphaeria nodorum SN15]
  misc_feature (208)..(485): NCBI GI: 116191399 Blast Desc: CHGG_05417 [Chaetomium globosum CBS 148.51] gi|88181330|gb|EAQ88798.1| CHGG_05417 [Chaetomium globosum CBS 148.51]
  misc_feature (70)..(408): NCBI GI: 212544228 Blast Desc: conserved [Penicillium marneffei ATCC 18224] gi|210065237|gb|EEA19331.1| conserved [Penicillium marneffei ATCC 18224]
  misc_feature (226)..(558): NCBI GI: 256731898 Blast Desc: NECHADRAFT_80737 [Nectria haematococca mpVI 77-13-4]
  misc_feature (170)..(592): NCBI GI: 169601682 Blast Desc: SNOG_03712 [Phaeosphaeria nodorum SN15] gi|111067797|gb|EAT88917.1| SNOG_03712 [Phaeosphaeria nodorum SN15]
  misc_feature (170)..(405): NCBI GI: 189193771 Blast Desc: [Pyrenophora tritici-repentis Pt-1C-BFP] gi|187978788|gb|EDU45414.1| [Pyrenophora tritici-repentis Pt-1C-BFP]
  misc_feature (214)..(559): NCBI GI: 146324089 Blast Desc: conserved [Aspergillus fumigatus Af293] gi|129558074|gb|EAL91904.2| conserved [Aspergillus fumigatus Af293]
  misc_feature (229)..(401): NCBI GI: 159126325 Blast Desc: conserved [Aspergillus fumigatus A1163]
  misc_feature (232)..(339): NCBI GI: 46114796 Blast Desc: FG03240.1 [Gibberella zeae PH-1]
MARLNTLKYGIVAHAAKVHSLSHYFLPAPIAEFNAVAIALLKQSNPRENKAHFRYKYEHSSGQSFIRVSMQDSRASQRFLCRIDHLENFCGKADLETLRNGTNAQAIRPVALIDDRKVDLISISDAGICRTSKGLLSPQQLHRVLSLPRYTTGGASTSAGTGTETDIEVDAERRTIYITNLNSFAVLALLHTVSFNQANVLRDFIYNHLCFTASFGVTIPLRFKTFAFEFHLPFYAWRRGPIAIEDERHMSDGRPLRRSQYLGFLDVSPFGDRSSNDKTSDDYIYEAQMSCLVAGLDNSSWIAYAFVDTYHNGPRKEDSGSGNDSDGDSDAEDDDDDDEDSVQYYHRMARDSDRVAKDPLSGGTLPADLPEWDPRMYFLRVLLARMDQVKHEWINVVSMIKKKTCPYTQDYHLSRNLYNSPDTKNRGERMKQFHDWTVASLRLLGEIIHVLSGSIQVWDRFKSREAEYLLDENIPKDRPSSSRCLIAIDKHFDEMRDQLRVLEYQEKVCNNISRELESYLQLEDRNSTLIQLRTNENLKAITILALLVTPPAVAAAIYSMQDGVLPWEPSTLAWGLTTLTLYAFVGLVLLFLLNWSLAKTDRELQGHEPLPPLRSHTHVDLDFV

SEQ ID NO: 4623 - DNA, 2910 bp, Muscodor strobelii; identical to SEQ ID NO: 4620
  misc_feature: SGI EST ID NO. CUFF.11712.0
  misc_feature: Variant of the nucleotide sequence at SEQ ID NO 4621

SEQ ID NO: 4624 - DNA, 825 bp, Muscodor strobelii
  misc_feature: SGI cDNA ID NO. 561237
  misc_feature: Encodes the peptide sequence at SEQ ID NO 4625
atgaccaaaaaatcggattttgaggttctaatctgtcatggacccgacgagacgccgacggtctacgggcctctaattgaatctttgaaaacggtcgggattgaagctcactgtcctcaactaccgcttcaactaccgggatctagtctgaagaagctaagcctcggagatgcaaatgatcctgttcatgatgtgagatctggcgagggcgagcccactgaagaagaagaggaagtcagcgtcatcttcagcgaattgatgtcgttagtcatgaagcagtcaaaaagagttttgctagtcacacattcgacaaggagccggatcgctacgcaggctgcaaaagaaggactccatgaacagatacggagacaatgggggctgatcggaggcgtcatcggtatcttctacatggaattcgagatcccagttgtagagtcaatgcagacctttttagcggctagaagcgatgctgaggttattcctggtctattcaacctttggaaaaacggctcaggcggccaatcagccgcaagtagcgataatgagcaacagaaagacgccgacgtcggccagcagagagaattgggacggtcaccagcaacaacttccacttcgaatgggagcatgaagctcgcggatgcaacttatagtcctttaccgagcgcgtacctctttttggaggacagtataagactgcccagagattctcacgaagaagggggttccactatttatcgatgtgctcctaatccttcgccacacttgagttggactaagaatactgtcgagaaggtcgttagtttcagcaacaagctctcgaattag

SEQ ID NO: 4625 - protein, 274 aa, Muscodor strobelii
  misc_feature: SGI Peptide ID NO. 561237
  misc_feature (1)..(272): NCBI GI: 238482275 Blast Desc: conserved [Aspergillus flavus NRRL3357] gi|220700426|gb|EED56764.1| conserved [Aspergillus flavus NRRL3357]
  misc_feature (1)..(272): NCBI GI: 255950782 Blast Desc: Pc22g22640 [Penicillium chrysogenum Wisconsin 54-1255] gi|211593175|emb|CAP99552.1| Pc22g22640 [Penicillium chrysogenum Wisconsin 54-1255]
  misc_feature (1)..(272): NCBI GI: 116203245 Blast Desc: [Chaetomium globosum CBS 148.51] gi|88178025|gb|EAQ85493.1| [Chaetomium globosum CBS 148.51]
  misc_feature (9)..(272): NCBI GI: 145257235 Blast Desc: An04g02910 [Aspergillus niger] gi|134058570|emb|CAK96457.1| protein product [Aspergillus niger]
  misc_feature (1)..(161): NCBI GI: 169765692 Blast Desc: [Aspergillus oryzae RIB40] gi|83765172|dbj|BAE55315.1| protein product [Aspergillus oryzae]
  misc_feature (9)..(235): NCBI GI: 169765482 Blast Desc: [Aspergillus oryzae RIB40] gi|83765067|dbj|BAE55210.1| protein product [Aspergillus oryzae]
  misc_feature (9)..(235): NCBI GI: 238482035 Blast Desc: conserved [Aspergillus flavus NRRL3357] gi|220700306|gb|EED56644.1| conserved [Aspergillus flavus NRRL3357]
  misc_feature (10)..(137): NCBI GI: 145240765 Blast Desc: An08g09180 [Aspergillus niger] gi|134077553|emb|CAK96697.1| protein product [Aspergillus niger]
  misc_feature (9)..(151): NCBI GI: 169773097 Blast Desc: [Aspergillus oryzae RIB40] gi|83768878|dbj|BAE59015.1| protein product [Aspergillus oryzae]
  misc_feature (18)..(256): NCBI GI: 255955955 Blast Desc: Pc21g17320 [Penicillium chrysogenum Wisconsin 54-1255] gi|211590441|emb|CAP96629.1| Pc21g17320 [Penicillium chrysogenum Wisconsin 54-1255]
MTKKSDFEVLICHGPDETPTVYGPLIESLKTVGIEAHCPQLPLQLPGSSLKKLSLGDANDPVHDVRSGEGEPTEEEEEVSVIFSELMSLVMKQSKRVLLVTHSTRSRIATQAAKEGLHEQIRRQWGLIGGVIGIFYMEFEIPVVESMQTFLAARSDAEVIPGLFNLWKNGSGGQSAASSDNEQQKDADVGQQRELGRSPATTSTSNGSMKLADATYSPLPSAYLFLEDSIRLPRDSHEEGGSTIYRCAPNPSPHLSWTKNTVEKVVSFSNKLSN

SEQ ID NO: 4626 - DNA, 1472 bp, Muscodor strobelii
  misc_feature: SGI EST ID NO. CUFF.11733.0
  misc_feature: Variant of the nucleotide sequence at SEQ ID NO 4624
ggaaaggctccggaaacccggggataatccagtgaggctggccaaataacctccaaaccgttatccttgtacgagaactaagtatatcatcattacatacacggacaaccaagcttaccattaacgatattagtttggcaagactcgtcatggaggtaaccgaagaggagtataacaagtcaccctatcttccatccgtgaagcatcacttttgaaggtctaagcttatcttcaatcattgctttatgtcttgccgtttgagcgtcgcccatttatgacattagataatcatgaccaaaaaatcggattttgaggttctaatctgtcatggacccgacgagacgccgacggtctacgggcctctaattgaatctttgaaaacggtcgggattgaagctcactgtcctcaactaccgcttcaactaccgggatctagtctgaagaagctaagcctcggagatgcaaatgatcctgttcatgatgtgagatctggcgagggcgagcccactgaagaagaagaggaagtcagcgtcatcttcagcgaattgatgtcgttagtcatgaagcagtcaaaaagagttttgctagtcacacattcgacaaggagccggatcgctacgcaggctgcaaaagaaggactccatgaacagatacggagacaatgggggctgatcggaggcgtcatcggtatcttctacatggaattcgagatcccagttgtagagtcaatgcagacctttttagcggctagaagcgatgctgaggttattcctggtctattcaacctttggaaaaacggctcaggcggccaatcagccgcaagtagcgataatgagcaacagaaagacgccgacgtcggccagcagagagaattgggacggtcaccagcaacaacttccacttcgaatgggagcatgaagctcgcggatgcaacttatagtcctttaccgagcgcgtacctctttttggaggacagtataagactgcccagagattctcacgaagaagggggttccactatttatcgatgtgctcctaatccttcgccacacttgagttggactaagaatactgtcgagaaggtcgttagtttcagcaacaagctctcgaattaggatgagctccagtcttgaaatcggtcagcgtttgtacttaacggaggcgggttccctcgatgactatgatgtttcatctgtcaatattgaaatatgatagttgatttctttcctttgtttcacgacgttcagcggaccgaatatgtccaggacataatgcgaaatacggattttcagatcacgagactaatgcgttcgtcttggtattctttgaacgtcagaacgactgagaatccaatagtgatcattgtggatccatgtttcgacatgtctatgtcagtgacgcaaaccatggcgagcggtagaagtttcctcgatacgcaactttcaataaatatagtagtaatttccttttcc

SEQ ID NO: 4627 - DNA, 2082 bp, Muscodor strobelii
  misc_feature: SGI cDNA ID NO. 561238
  misc_feature: Elevated expression when VOC is produced
  misc_feature: Encodes the peptide sequence at SEQ ID NO 4628
atgtttctgaaacagactggcctccgtagaggagttggagtgacaggaccgcctccggagccgcagaatggacctctacgggcaatatgttccattgtcactcccgttggcatgcttggctacggattcgacgaggctgcaacctgggatgcagtgctgaacagcacccaagccggcatccctacagccctcattttggactcaggttcaaccgatagtggtccgtcgaagctagcactcggcgaaatgtcttgtccccgcctgtcatattatcgcgatctggcaaagctcctacacatcgtgcacgccttcaaagtccctctgattataggctctgccggcggagccggtactgatgagcaagtcgacacattcgttgagattatcaaggagatttcctcaaagaacaggacctacaaattcaaaacccttgtcatttacgctaaggtcgacaaagcttttctcttgagccgaataaaattccctcaagttgacgacaatgagctggctccctgcggtccatcaattccagatgttaccagagacgatgttgcagatacccgatgtgtcgtggcacagatggggccggagccttttcttcatacgatgactgtggaaccaaacttcgacatcataatcgcggggcgtgcgttcgacccgtcgccctatattgcctatgcctgccacaaggcaaagctgccaattgaagcattcgggagctcgtgggggcaattaggaggttttgctcacatgggcaaaatcatggaatgcggtggcgcttgcgctaccccgaagtgtcaaggcgcaatcgcgacagtgtaccaggatgggaccttcgacatcactcctctcgacgacaaatcacgttgcacgcccatctctgtcgcagctcatgcgctttatgaaaaatcgcggcccgatatctcacatggtcccggcggttggctagatatgacctcagcaacctacgaggagctggacgatgggaaaagcgtgagggtgcatgggagccaattctattattccactactaatggacagaattatcaagttaagttggaaggggcgaagatcgtcggctatcgttctattttcatgggaagtttcaaagatccaatcttgattggccaactagacagcttgttgtcccgcgtcaaggcgtacatcaaagagcagcacagtcaaacggaagaggaataccagtttgattttcatgtatacccaaagtcacgtcagcgacatgatcctcagtcacgagtcccaccccctgaagtattcgtcatcggagaagctactgcttcaacacaggagctagctaatgacgtcgcctcgagaggcaaaattgcttgtacgcatgggccctatgctggacagaaagcgaacgctggcaacttcgctttcggcatcggaagtagcggatgtgagtatggcaatttcgatgcggcagcgaccgcgagtatcgccttgggaaaatgcccccagtggtcgttgtatcatcttctcagccttcgatctaatgagcatcaaagcatctttcgtaaagaatatctagatattggtaacggccaacctttttccggtacgggcgaagacataccacgccggcctatttccaacggtactaaatctaaagcggcgcaattcccgccaaacccagcagccgctagaaattatgtgccttcgggtacactgggtgaaatagccagtgtcttgagatcaaaaaatgctggtcccttcgagatcacgttcgacatcatgttcgattcaaaaacgacatacaaattggtcaaagattcgggattcctaacgaaagagtcagctgcggaagttctttatatacctgcagacgtggtaacctgggctggatactttgatcccgcccaggcttttaagatcaccgttccccgtagcatggttggcagccgtcaccacggtggattcatggaagacgacatgcacagttcccagcattatcttccactaatgtatatgaagatcccagataccctcatgagcaggctgtatgaagaatcgatgaaggactcatttcgtatggtggaaacgatggcgctgcgagattga

SEQ ID NO: 4628 - protein, 693 aa, Muscodor strobelii
  misc_feature: SGI Peptide ID NO. 561238
  misc_feature (27)..(674): NCBI GI: 256727232 Blast Desc: NECHADRAFT_90636 [Nectria haematococca mpVI 77-13-4]
  misc_feature (27)..(673): NCBI GI: 46110859 Blast Desc: FG02311.1 [Gibberella zeae PH-1]
  misc_feature (32)..(667): NCBI GI: 242797742 Blast Desc: conserved [Talaromyces stipitatus ATCC 10500] gi|218716369|gb|EED15790.1| conserved [Talaromyces stipitatus ATCC 10500]
  misc_feature (31)..(667): NCBI GI: 242780637 Blast Desc: beta-N-acetylglucosaminidase, [Talaromyces stipitatus ATCC 10500] gi|218719785|gb|EED19204.1| beta-N-acetylglucosaminidase, [Talaromyces stipitatus ATCC 10500]
  misc_feature (32)..(666): NCBI GI: 171677460 Blast Desc: protein product [Podospora anserina] gi|170936798|emb|CAP61456.1| protein product [Podospora anserina]
  misc_feature (31)..(667): NCBI GI: 256722026 Blast Desc: NECHADRAFT_97034 [Nectria haematococca mpVI 77-13-4]
  misc_feature (250)..(667): NCBI GI: 238495220 Blast Desc: CAIB/BAIF family enzyme [Aspergillus flavus NRRL3357] gi|220695496|gb|EED51839.1| CAIB/BAIF family enzyme [Aspergillus flavus NRRL3357]
  misc_feature (250)..(667): NCBI GI: 169777975 Blast Desc: [Aspergillus oryzae RIB40] gi|83772190|dbj|BAE62320.1| protein product [Aspergillus oryzae]
  misc_feature (32)..(516): NCBI GI: 261408113 Blast Desc: GYMC10_4321 [Geobacillus sp. Y412MC10] gi|261284576|gb|ACX66547.1| conserved [Geobacillus sp. Y412MC10]
  misc_feature (25)..(523): NCBI GI: 228470110 Blast Desc: conserved [Porphyromonas uenonis 60-3] gi|228308248|gb|EEK17103.1| conserved [Porphyromonas uenonis 60-3]
  misc_feature: Useful for introducing or modulating the production of volatile compounds
MFLKQTGLRRGVGVTGPPPEPQNGPLRAICSIVTPVGMLGYGFDEAATWDAVLNSTQAGIPTALILDSGSTDSGPSKLALGEMSCPRLSYYRDLAKLLHIVHAFKVPLIIGSAGGAGTDEQVDTFVEIIKEISSKNRTYKFKTLVIYAKVDKAFLLSRIKFPQVDDNELAPCGPSIPDVTRDDVADTRCVVAQMGPEPFLHTMTVEPNFDIIIAGRAFDPSPYIAYACHKAKLPIEAFGSSWGQLGGFAHMGKIMECGGACATPKCQGAIATVYQDGTFDITPLDDKSRCTPISVAAHALYEKSRPDISHGPGGWLDMTSATYEELDDGKSVRVHGSQFYYSTTNGQNYQVKLEGAKIVGYRSIFMGSFKDPILIGQLDSLLSRVKAYIKEQHSQTEEEYQFDFHVYPKSRQRHDPQSRVPPPEVFVIGEATASTQELANDVASRGKIACTHGPYAGQKANAGNFAFGIGSSGCEYGNFDAAATASIALGKCPQWSLYHLLSLRSNEHQSIFRKEYLDIGNGQPFSGTGEDIPRRPISNGTKSKAAQFPPNPAAARNYVPSGTLGEIASVLRSKNAGPFEITFDIMFDSKTTYKLVKDSGFLTKESAAEVLYIPADVVTWAGYFDPAQAFKITVPRSMVGSRHHGGFMEDDMHSSQHYLPLMYMKIPDTLMSRLYEESMKDSFRMVETMALRD

SEQ ID NO: 4629 - DNA, 1696 bp, Muscodor strobelii
  misc_feature: SGI EST ID NO. CUFF.11741.0
  misc_feature: Variant of the nucleotide sequence at SEQ ID NO 4627
atgtaccaacgcgctgcatatgcaactgtttgcgactaccttaggttggaggtcatgacgattcgtgccacttcgccgccgatagcccagccaaattgagctttatcagctatggtgattgggcggtggatcgataggccgtttcgcctacctacataccttagctatgtatgtacatcaagatgaactctttaagatgcctgtctagacaggtaaggtattccagctgcgaaagtgtggatggcataatatcgccattaaaaaggcaatgatattccaataaaagaaaacaatcaagacaaaaatgagacagataattcttgctcatttttgaatacgatggcgaggcaccgtactgaagtggcgctactggtagttcccttaggtgcctcaggcgctgcttactaggtaggcaatcccagacactgcgccacctatcaagcatcatccaccatttcgaacaagacatctcattcatttcaactttgcagctacattacattcggtaatttaggcagaccattatgcagatattactctgatagctatcagaactttactcggctgactattcgatatgttattcgacatgttatcccagtgtagatgtgatgccagttatttcattgctgcagttggctccgaaatgcgacattcgctctgccgggcgagattcgggtcgtatgtcgagagaacagcctgcattgtcacaaaagatgtggtgactaagggtagatggctatgctgtctatctcagtgcttagacacgatcgcacatacctagtactatgtgatgcatagggtttctttctgaatttggcgctatgtgacttagtcgccttccgtcgccttccagaactacatttgggccttccaaacgggtatggagtatagagacacatgtatatggagctacaccagataccctcggtatgtgagaagataaacgtctctagtatatcaacatcccaattacatccgttgtcgatcacgacgaaagtcctatactacctgtatcctactgcaacccaaataaacattctcagtggtgttgctcaatatgtttctgaaacagactggcctccgtagaggagttggagtgacaggaccgcctccggagccgcagaatggacctctacgggcaatatgttccattgtcactcccgttggcatgcttggctacggattcgacgaggctgcaacctgggatgcagtgctgaacagcacccaagccggcatccctacagccctcattttggactcaggttcaaccgatagtggtccgtcgaagctagcactcggcgaaatgtcttgtccccgcctgtcatattatcgcgatctggcaaagctcctacacatcgtgcacgccttcaaagtccctctgattataggctctgccggcggagccggtactgatgagcaagtcgacacattcgttgagattatcaaggagatttcctcaaagaacaggacctacaaattcaaaacccttgtcatttacgctaaggtcgacaaagcttttctcttgagccgaataaaattccctcaagttgacgacaatgagctggctccctgcggtccatcaattccagatgttaccagagacgatgttgcagatacccgatgtgtcgtggcacagatggggccggagccttttcttcatacgatgactgtggaaccaaacttcgacatcata

SEQ ID NO: 4630 - DNA, 1065 bp, Muscodor strobelii
  misc_feature: SGI cDNA ID NO. 561241
  misc_feature: Reduced expression when VOC is produced
  misc_feature: Encodes the peptide sequence at SEQ ID NO 4631
atgatggcaggttcaattccgaagacaacggcgcaatggaacgtcgtaggcacagacggcccaacgtctcttaaacttaccgaggagcagccagtaagtaagttgggtgataacgaggtcctagtgaaattgcatggcgcgtctgtgaactaccgcgacattgttatttcacatggccaataccctttcggagcgaccgccggcacggtcccagggtcagatggagctgggattgtgctcgctgttgggcgacacgtaacccgctttgcccccggtgacaaatgcatcacgatgttgcagcagggtcacatcgccggaccaccaacgcaagcaaacacgtcccgacaacttggtgcaacagttcacgggacatttcgcagtataggtgcattcgacgagcagggcctcgttcgcatgcccgagggcttgtcgttcatcgaagccgccacattgagttgcgcgggcctcacggcgtggaatgcgctatttggaggagggcgtccgcttttaccgggcaactggcttctcacccaaggcactgggggtgtaagtctattcgcggtgcagttcgcgaagcttataggggccagagttatttctactacgagttcacagtttaaggcggagctcctgaagagtctcggggcagatcatgttctgaattatcgcgagacacccaattggggtttagaggctaaacgccttactgggggcgcaggcgtagatctcgtggtagatgtcactgggccgtcgggcttgggacaaagcacagatagtcttagactggatggaatcatatctgtggtaggtgccatcgccggaaatggaggtgacgcgaaggtgccgactctcctagatgcgtggatgaatttattcacatgtcgtgggatttgggtcggcagtagacaacagatggaagatatgtgccgcgcgatcgatggtaacgtcgagcgattaaggccggtgctcgatcagaatgtattcaagctcgaagagttgaaagatgcttatgaatatctggaagcaggaaggcatattggaaaagtgtgcattaatattccatga

SEQ ID NO: 4631 - protein, 354 aa, Muscodor strobelii
  misc_feature: SGI Peptide ID NO. 561241
  misc_feature (37)..(139): Pfam Id: PF08240 Pfam Desc: Alcohol dehydrogenase GroES-like domain
  misc_feature (171)..(314): Pfam Id: PF00107 Pfam Desc: Zinc-binding dehydrogenase
  misc_feature (37)..(96): Pfam Id: PF08240 Pfam Desc: Alcohol dehydrogenase GroES-like domain
  misc_feature (2)..(353): NCBI GI: 242767515 Blast Desc: alcohol dehydrogenase, [Talaromyces stipitatus ATCC 10500] gi|218724580|gb|EED23997.1| alcohol dehydrogenase, [Talaromyces stipitatus ATCC 10500]
  misc_feature (2)..(353): NCBI GI: 46124441 Blast Desc: FG06598.1 [Gibberella zeae PH-1]
  misc_feature (1)..(353): NCBI GI: 256726373 Blast Desc: [Nectria haematococca mpVI 77-13-4]
  misc_feature (7)..(353): NCBI GI: 169610812 Blast Desc: SNOG_08513 [Phaeosphaeria nodorum SN15] gi|111062561|gb|EAT83681.1| SNOG_08513 [Phaeosphaeria nodorum SN15]
  misc_feature (2)..(353): NCBI GI: 261189326 Blast Desc: zinc-containing alcohol dehydrogenase [Ajellomyces dermatitidis SLH14081] gi|239591651|gb|EEQ74232.1| zinc-containing alcohol dehydrogenase [Ajellomyces dermatitidis
  misc_feature (2)..(353): NCBI GI: 239609037 Blast Desc: zinc-containing alcohol dehydrogenase [Ajellomyces dermatitidis ER-3]
  misc_feature (2)..(353): NCBI GI: 154283971 Blast Desc: conserved [Ajellomyces capsulatus NAm1] gi|150410961|gb|EDN06349.1| conserved [Ajellomyces capsulatus NAm1]
  misc_feature (2)..(353): NCBI GI: 225562116 Blast Desc: alcohol dehydrogenase [Ajellomyces capsulatus G186AR]
  misc_feature (2)..(353): NCBI GI: 240273086 Blast Desc: alcohol dehydrogenase [Ajellomyces capsulatus H143]
  misc_feature (7)..(353): NCBI GI: 189206043 Blast Desc: alcohol dehydrogenase [Pyrenophora tritici-repentis Pt-1C-BFP] gi|187975449|gb|EDU42075.1| alcohol dehydrogenase [Pyrenophora tritici-repentis Pt-1C-BFP]
  misc_feature (26)..(353): SWISSPROT Homolog: EC 1.1.1.1 Alcohol dehydrogenase
  misc_feature: Useful for introducing or modulating the production of volatile compounds
MMAGSIPKTTAQWNVVGTDGPTSLKLTEEQPVSKLGDNEVLVKLHGASVNYRDIVISHGQYPFGATAGTVPGSDGAGIVLAVGRHVTRFAPGDKCITMLQQGHIAGPPTQANTSRQLGATVHGTFRSIGAFDEQGLVRMPEGLSFIEAATLSCAGLTAWNALFGGGRPLLPGNWLLTQGTGGVSLFAVQFAKLIGARVISTTSSQFKAELLKSLGADHVLNYRETPNWGLEAKRLTGGAGVDLVVDVTGPSGLGQSTDSLRLDGIISVVGAIAGNGGDAKVPTLLDAWMNLFTCRGIWVGSRQQMEDMCRAIDGNVERLRPVLDQNVFKLEELKDAYEYLEAGRHIGKVCINIP

SEQ ID NO: 4632 - DNA, 1249 bp, Muscodor strobelii
  misc_feature: SGI EST ID NO. CUFF.11832.1
  misc_feature: Variant of the nucleotide sequence at SEQ ID NO 4630
ataaatgatcctcgaaattaaacatgagatgcattgtcgattgttacttacaggtcagcagagattcgtatgatggcaggttcaattccgaagacaacggcgcaatggaacgtcgtaggcacagacggcccaacgtctcttaaacttaccgaggagcagccagtaagtaagttgggtgataacgaggtcctagtgaaattgcatggcgcgtctgtgaactaccgcgacattgttatttcacatggccaataccctttcggagcgaccgccggcacggtcccagggtcagatggagctgggattgtgctcgctgttgggcgacacgtaacccgctttgcccccggtgacaaatgcatcacgatgttgcagcagggtcacatcgccggaccaccaacgcaagcaaacacgtcccgacaacttggtgcaacagttcacgggacatttcgcagtataggtgcattcgacgagcagggcctcgttcgcatgcccgagggcttgtcgttcatcgaagccgccacattgagttgcgcgggcctcacggcgtggaatgcgctatttggaggagggcgtccgcttttaccgggcaactggcttctcacccaaggcactgggggtgtaagtctattcgcggtgcagttcgcgaagcttataggggccagagttatttctactacgagttcacagtttaaggcggagctcctgaagagtctcggggcagatcatgttctgaattatcgcgagacacccaattggggtttagaggctaaacgccttactgggggcgcaggcgtagatctcgtggtagatgtcactgggccgtcgggcttgggacaaagcacagatagtcttagactggatggaatcatatctgtggtaggtgccatcgccggaaatggaggtgacgcgaaggtgccgactctcctagatgcgtggatgaatttattcacatgtcgtgggatttgggtcggcagtagacaacagatggaagatatgtgccgcgcgatcgatggtaacgtcgagcgattaaggccggtgctcgatcagaatgtattcaagctcgaagagttgaaagatgcttatgaatatctggaagcaggaaggcatattggaaaagtgtgcattaatattccatgaattgttatttagaccgcccaccatgtaacatttcgcttctgattgtgtacatttcgactgctggcaataataaggcactggacttatagactcaagtctacgtgttgtactgtcg

SEQ ID NO: 4633 - DNA, 975 bp, Muscodor strobelii
  misc_feature: SGI cDNA ID NO. 561242
  misc_feature: Encodes the peptide sequence at SEQ ID NO 4634
atgtccgcatctcagaacgtctcgttcaaaattaatgagctcttctccgttaaaggcaaagtcgttgtaatcacaggtggtggctcggggttgggcaaggccattgccgaaggctttaccattaatggtgcaaaggtttatatcgtaggtcggagaaagcagacgcttgaaacagctgcaaagcagattggtggtgatattcatatcattgctggcgatcagcagacgaaggcaggatgtcaaaagatcgttgagactgtgaaagcaaatgagtcccatattgatacactcataaattgtgcgggtgtcaacagcccttggaggacagtggcgaaggatcacaataacccggatcaagtcgagaacatgttgataaatggtctagacgaggaagacttcgatcgcagcaatcagagtgagtatggccatccggaagggatcagattgcgctcacctcttttgttttggtgcctagttaatgtcaatggagtatatttcctcacggtcaacttcgttcccctcctgaggaaatctgcggaccccaatgtttgtgtgattgcatctctagcagcactggcgaacattcgttcaatgggatctttgacttacggcgtctcgaaagccgcagtagttgttcatcttgccaaacttcttgctggcagattgcatcccatgaagattcgcgtcaacaccatctgcccgggaatatttccatctgagatgacaggtactgtagctggtaaacatgaatacaccatcaatcaccaagctgaaaaagcagccctccgatgcacagcagggcgccccggtcggcctgaggagatggtcggtcctgtactactattatcgagtgctggcggagcatacatgaatcatgcacttttgacggttgatgggggtagattaatgggtgcttcaatcaatgatggaatccggatgccagacgaaacttacactgacgagattctgggctga

SEQ ID NO: 4634 - protein, 324 aa, Muscodor strobelii
  misc_feature: SGI Peptide ID NO. 561242
  misc_feature (20)..(223): Pfam Id: PF00106 Pfam Desc: short chain dehydrogenase
  misc_feature (20)..(103): Pfam Id: PF00106 Pfam Desc: short chain dehydrogenase
  misc_feature (3)..(324): NCBI GI: 212539910 Blast Desc: short-chain dehydrogenase, [Penicillium marneffei ATCC 18224] gi|210067409|gb|EEA21501.1| short-chain dehydrogenase, [Penicillium marneffei ATCC 18224]
  misc_feature (7)..(309): NCBI GI: 134119118 Blast Desc: CNBN2390 [Cryptococcus neoformans var. neoformans B-3501A] gi|50254394|gb|EAL17147.1| CNBN2390 [Cryptococcus neoformans var. neoformans B-3501A]
  misc_feature (7)..(303): NCBI GI: 145234993 Blast Desc: An03g02500 [Aspergillus niger] gi|134057821|emb|CAK38216.1| protein product [Aspergillus niger]
  misc_feature (159)..(318): NCBI GI: 145607858 Blast Desc: MGG_10023 [Magnaporthe grisea 70-15] gi|145015347|gb|EDJ99883.1| MGG_10023 [Magnaporthe grisea 70-15]
  misc_feature (167)..(303): NCBI GI: 58262626 Blast Desc: CNN02360 [Cryptococcus neoformans var. neoformans JEC21] gi|57230897|gb|AAW47206.1| CNN02360 [Cryptococcus neoformans var. neoformans JEC21]
  misc_feature (4)..(305): NCBI GI: 70987152 Blast Desc: short chain dehydrogenase/reductase family [Aspergillus fumigatus Af293] gi|66846686|gb|EAL87018.1| short chain dehydrogenase/reductase family [Aspergillus fumigatus short
  misc_feature (1)..(305): NCBI GI: 145248007 Blast Desc: An13g01130 [Aspergillus niger] gi|134080999|emb|CAK41513.1| protein product [Aspergillus niger]
  misc_feature (6)..(305): NCBI GI: 119482694 Blast Desc: short-chain dehydrogenase [Neosartorya fischeri NRRL 181] gi|119409530|gb|EAW19478.1| short-chain dehydrogenase [Neosartorya fischeri NRRL 181]
  misc_feature (1)..(305): NCBI GI: 255944789 Blast Desc: Pc20g06330 [Penicillium chrysogenum Wisconsin 54-1255] gi|211587897|emb|CAP85962.1| Pc20g06330 [Penicillium chrysogenum Wisconsin 54-1255]
  misc_feature (1)..(304): NCBI GI: 67540208 Blast Desc: AN6274.2 [Aspergillus nidulans FGSC A4] gi|40739468|gb|EAA58658.1| AN6274.2 [Aspergillus nidulans FGSC A4] gi|259479514|tpe|CBF69805.1| TPA: short chain family nidulans
  misc_feature (31)..(300): SWISSPROT Homolog: EC 1.1.1.100 3-oxoacyl-[acyl-carrier-protein] reductase
MSASQNVSFKINELFSVKGKVVVITGGGSGLGKAIAEGFTINGAKVYIVGRRKQTLETAAKQIGGDIHIIAGDQQTKAGCQKIVETVKANESHIDTLINCAGVNSPWRTVAKDHNNPDQVENMLINGLDEEDFDRSNQSEYGHPEGIRLRSPLLFWCLVNVNGVYFLTVNFVPLLRKSADPNVCVIASLAALANIRSMGSLTYGVSKAAVVVHLAKLLAGRLHPMKIRVNTICPGIFPSEMTGTVAGKHEYTINHQAEKAALRCTAGRPGRPEEMVGPVLLLSSAGGAYMNHALLTVDGGRLMGASINDGIRMPDETYTDEILG

SEQ ID NO: 4635 - DNA, 1210 bp, Muscodor strobelii
  misc_feature: SGI EST ID NO. CUFF.11756.0
  misc_feature: Variant of the nucleotide sequence at SEQ ID NO 4633
ccggcagttcgtgtctctttaataatggaagataaccgggtttggttggccggtctggggggtttccacaagccacgacaaccttaggtaccctacgaggttcagtatcgtattccatgggaggtagttgttgcgactgagactctagagaagtgaaacacctcggcaagtgtttacttctgtgatcaatttgattggccaatgcatgctgatgtgcaattgtcaattgaaagaaacatcgagatatattaggactcaagatatacatcatctgacttcctgatcagctttgtcgtgttgacgaacaagacaccaccactcgagaccgtcgagccctcatcttaatcagcgtgtcgcaggtattgcaatcgccttacttagtgaatcgctgtaaatgctggaatagcaagagcaatagcgtcgcgaaacgaagcgaggccgtagaattgatgggcttttggcacccccgcaggcgatcacccgatcggaagccaacgaaagatggggatcggatcctgagcaattaggtgcatagcatcctccacgtatgacttaatatcggagccccaacttgatatccaataagccacagctttttttccagttacacttaatcttcaaaacggttgaatccttaaaggcattatcgaaaccaacttcggaagcgacgcaacgatgtccgcatctcagaacgtctcgttcaaaattaatgagctcttctccgttaaaggcaaagtcgttgtaatcacaggtggtggctcggggttgggcaaggccattgccgaaggctttaccattaatggtgcaaaggtttatatcgtaggtcggagaaagcagacgcttgaaacagctgcaaagcagattggtggtgatattcatatcattgctggcgatcagcagacgaaggcaggatgtcaaaagatcgttgagactgtgaaagcaaatgagtcccatgtttatcgcgccgagacaatgatatattgaaagagcccgaatgttgctaaaactcgctagattgatacactcataaattgtgcgggtgtcaacagcccttggaggacagtggcgaaggatcacaataacccggatcaagtcgagaacatgttgataaatggtctagacgagtaaggttaccaacactgtaactggtgacgtgtcaactaatacactacagggaagacttcgatcgcagcaatcagagtgagtatgg

SEQ ID NO: 4636 - DNA, 912 bp, Muscodor strobelii
  misc_feature: SGI cDNA ID NO. 561243
  misc_feature: Encodes the peptide sequence at SEQ ID NO 4637
atgtccgcatctcagaacgtctcgttcaaaattaatgagctcttctccgttaaaggcaaagtcgttgtaatcacaggtggtggctcggggttgggcaaggccattgccgaaggctttaccattaatggtgcaaaggtttatatcgtaggtcggagaaagcagacgcttgaaacagctgcaaagcagattggtggtgatattcatatcattgctggcgatcagcagacgaaggcaggatgtcaaaagatcgttgagactgtgaaagcaaatgagtcccatattgatacactcataaattgtgcgggtgtcaacagcccttggaggacagtggcgaaggatcacaataacccggatcaagtcgagaacatgttgataaatggtctagacgaggaagacttcgatcgcagcaatcagattaatgtcaatggagtatatttcctcacggtcaacttcgttcccctcctgaggaaatctgcggaccccaatgtttgtgtgattgcatctctagcagcactggcgaacattcgttcaatgggatctttgacttacggcgtctcgaaagccgcagttgttcatcttgccaaacttcttgctggcagattgcatcccatgaagattcgcgtcaacaccatctgcccgggaatatttccatctgagatgacaggtactgtagctggtaaacatgaatacaccatcaatcaccaagctgaaaaagcagccctccgatgcacagcagggcgccccggtcggcctgaggagatggtcggtcctgtactactattatcgagtgctggcggagcatacatgaatcatgcacttttgacggttgatgggggtagattaatgggtgcttcaatcaatgatggaatccggatgccagacgaaacttacactgacgagattctgggctga

SEQ ID NO: 4637 - protein, 303 aa, Muscodor strobelii
  misc_feature: SGI Peptide ID NO. 561243
  misc_feature (20)..(202): Pfam Id: PF00106 Pfam Desc: short chain dehydrogenase
  misc_feature (20)..(103): Pfam Id: PF00106 Pfam Desc: short chain dehydrogenase
  misc_feature (3)..(303): NCBI GI: 212539910 Blast Desc: short-chain dehydrogenase, [Penicillium marneffei ATCC 18224] gi|210067409|gb|EEA21501.1| short-chain dehydrogenase, [Penicillium marneffei ATCC 18224]
  misc_feature (7)..(288): NCBI GI: 134119118 Blast Desc: CNBN2390 [Cryptococcus neoformans var. neoformans B-3501A] gi|50254394|gb|EAL17147.1| CNBN2390 [Cryptococcus neoformans var. neoformans B-3501A]
  misc_feature (139)..(297): NCBI GI: 145607858 Blast Desc: MGG_10023 [Magnaporthe grisea 70-15] gi|145015347|gb|EDJ99883.1| MGG_10023 [Magnaporthe grisea 70-15]
  misc_feature (7)..(282): NCBI GI: 145234993 Blast Desc: An03g02500 [Aspergillus niger] gi|134057821|emb|CAK38216.1| protein product [Aspergillus niger]
  misc_feature (4)..(284): NCBI GI: 70987152 Blast Desc: short chain dehydrogenase/reductase family [Aspergillus fumigatus Af293] gi|66846686|gb|EAL87018.1| short chain dehydrogenase/reductase family [Aspergillus fumigatus short
  misc_feature (6)..(284): NCBI GI: 119482694 Blast Desc: short-chain dehydrogenase [Neosartorya fischeri NRRL 181] gi|119409530|gb|EAW19478.1| short-chain dehydrogenase [Neosartorya fischeri NRRL 181]
  misc_feature (1)..(284): NCBI GI: 145248007 Blast Desc: An13g01130 [Aspergillus niger] gi|134080999|emb|CAK41513.1| protein product [Aspergillus niger]
  misc_feature (1)..(283): NCBI GI: 67540208 Blast Desc: AN6274.2 [Aspergillus nidulans FGSC A4] gi|40739468|gb|EAA58658.1| AN6274.2 [Aspergillus nidulans FGSC A4] gi|259479514|tpe|CBF69805.1| TPA: short chain family nidulans
  misc_feature (1)..(284): NCBI GI: 255944789 Blast Desc: Pc20g06330 [Penicillium chrysogenum Wisconsin 54-1255] gi|211587897|emb|CAP85962.1| Pc20g06330 [Penicillium chrysogenum Wisconsin 54-1255]
  misc_feature (147)..(282): NCBI GI: 58262626 Blast Desc: CNN02360 [Cryptococcus neoformans var. neoformans JEC21] gi|57230897|gb|AAW47206.1| CNN02360 [Cryptococcus neoformans var. neoformans JEC21]
  misc_feature (31)..(279): SWISSPROT Homolog: EC 1.1.1.100 3-oxoacyl-[acyl-carrier-protein] reductase
MSASQNVSFKINELFSVKGKVVVITGGGSGLGKAIAEGFTINGAKVYIVGRRKQTLETAAKQIGGDIHIIAGDQQTKAGCQKIVETVKANESHIDTLINCAGVNSPWRTVAKDHNNPDQVENMLINGLDEEDFDRSNQINVNGVYFLTVNFVPLLRKSADPNVCVIASLAALANIRSMGSLTYGVSKAAVVHLAKLLAGRLHPMKIRVNTICPGIFPSEMTGTVAGKHEYTINHQAEKAALRCTAGRPGRPEEMVGPVLLLSSAGGAYMNHALLTVDGGRLMGASINDGIRMPDETYTDEILG

SEQ ID NO: 4638 - DNA, 1210 bp, Muscodor strobelii; identical to SEQ ID NO: 4635
  misc_feature: SGI EST ID NO. CUFF.11756.0
  misc_feature: Variant of the nucleotide sequence at SEQ ID NO 4636

SEQ ID NO: 4639 - DNA, 969 bp, Muscodor strobelii
  misc_feature: SGI cDNA ID NO. 561244
  misc_feature: Encodes the peptide sequence at SEQ ID NO 4640
atggctccaatcgatgcacctaaagccatcgtccttacggacgaggagagagatagcgggataatgagcgacaaaaagctatacgatgcgatagaagctttcttcacagacggattagtcattgtcgaaaatgcaattgacgtaactataatcgacaagctgaacaagcgaatgctccaagatacagaaaagctgttgaacggtgaaggcttcgcccatttcaatcatctgaatgaaaacgcaaagaccaaaggcgcgaaagctgggggaaatctgtcgcaagtaccaccgatagagaaggaatggttatttcctgaagtatatgcaaacagacacggcgcgcgcattgtctctaatatccttggacctcggcctgaaatccacttcatccgctcgaacaccctccttggtaccgacgagcgacaaatggtacatgccgacttgcgttttgagcacccagagcacccatttgccatcgcttttaatacctgcctcatcgatgtagggccagagaacgggtcaacagagttatggctcggcacccagaacacaaatctggattatcaccgtgaactcggcgagccgatgatcgccgaatccaaactagaggaaagacgggaggtcagggggccaatctaccctttcatcaagagaggttcaattgtactccgagacctccgactctggcacgccggaatgcctaatcccacgcaagaaacgcgcatcatgctggctatcgtctactatgctgcctggtacaagaatggtgttgcgactccgtttcccgaatcactaaagtcgaccgtcgaagctttagaagaatcggcgcagatcaagattgcgactgagtgggtcccggatgagggctataactacttggacctcaaattcagcaataacttcagctctacactgacaccgtgggtttgggagaaaatccagcatatcaagacggtgaagggttactag

SEQ ID NO: 4640 - protein, 322 aa, Muscodor strobelii
  misc_feature: SGI Peptide ID NO. 561244
  misc_feature (32)..(243): Pfam Id: PF05721 Pfam Desc: Phytanoyl-CoA dioxygenase (PhyH)
  misc_feature (141)..(243): Pfam Id: PF05721 Pfam Desc: Phytanoyl-CoA dioxygenase (PhyH)
  misc_feature (22)..(301): NCBI GI: 134114496 Blast Desc: CNBH0030 [Cryptococcus neoformans var. neoformans B-3501A] gi|50256710|gb|EAL19431.1| CNBH0030 [Cryptococcus neoformans var. neoformans B-3501A]
  misc_feature (7)..(316): NCBI GI: 189205983 Blast Desc: phytanoyl-CoA dioxygenase family protein [Pyrenophora tritici-repentis Pt-1C-BFP] gi|187975419|gb|EDU42045.1| phytanoyl-CoA dioxygenase family protein [Pyrenophora Pt-1C-BFP]
  misc_feature (22)..(301): NCBI GI: 58271198 Blast Desc: [Cryptococcus neoformans var. neoformans JEC21] gi|57229014|gb|AAW45448.1| expressed protein [Cryptococcus neoformans var. neoformans JEC21]
  misc_feature (7)..(288): NCBI GI: 145604661 Blast Desc: MGG_07831 [Magnaporthe grisea 70-15] gi|145012627|gb|EDJ97281.1| MGG_07831 [Magnaporthe grisea 70-15]
  misc_feature (2)..(301): NCBI GI: 85109970 Blast Desc: NCU09596 [Neurospora crassa OR74A] gi|28881117|emb|CAD70289.1| conserved [Neurospora crassa] gi|28924840|gb|EAA33938.1| conserved [Neurospora crassa OR74A]
  misc_feature (7)..(307): NCBI GI: 119467047 Blast Desc: phytanoyl-CoA dioxygenase, [Neosartorya fischeri NRRL 181] gi|119405482|gb|EAW15433.1| phytanoyl-CoA dioxygenase, [Neosartorya fischeri NRRL 181]
  misc_feature (7)..(301): NCBI GI: 169610882 Blast Desc: SNOG_08549 [Phaeosphaeria nodorum SN15] gi|111062597|gb|EAT83717.1| SNOG_08549 [Phaeosphaeria nodorum SN15]
  misc_feature (10)..(302): NCBI GI: 115383854 Blast Desc: conserved [Aspergillus terreus NIH2624] gi|114196166|gb|EAU37866.1| conserved [Aspergillus terreus NIH2624]
  misc_feature (10)..(307): NCBI GI: 145240539 Blast Desc: An08g08010 [Aspergillus niger] gi|134077438|emb|CAK45692.1| protein product [Aspergillus niger]
  misc_feature (7)..(307): NCBI GI: 169785817 Blast Desc: [Aspergillus oryzae RIB40] gi|238506719|ref|XP_002384561.1| conserved [Aspergillus flavus NRRL3357] gi|83776117|dbj|BAE66236.1| protein product oryzae]
MAPIDAPKAIVLTDEERDSGIMSDKKLYDAIEAFFTDGLVIVENAIDVTIIDKLNKRMLQDTEKLLNGEGFAHFNHLNENAKTKGAKAGGNLSQVPPIEKEWLFPEVYANRHGARIVSNILGPRPEIHFIRSNTLLGTDERQMVHADLRFEHPEHPFAIAFNTCLIDVGPENGSTELWLGTQNTNLDYHRELGEPMIAESKLEERREVRGPIYPFIKRGSIVLRDLRLWHAGMPNPTQETRIMLAIVYYAAWYKNGVATPFPESLKSTVEALEESAQIKIATEWVPDEGYNYLDLKFSNNFSSTLTPWVWEKIQHIKTVKGY

SEQ ID NO: 4641 - DNA, 1596 bp, Muscodor strobelii
  misc_feature: SGI cDNA ID NO. 561245
  misc_feature: Encodes the peptide sequence at SEQ ID NO 4642
atgaccgccatccaggagaaggagcttttagctttggcaaatgatgttccagtgcttcctgtcgctgacgagaagactcctgcgcctactcacctcgaatcgaatctaaaagagatacaagatggcgtgccgaagccagagaggatcaaagatctctctgacgaagacattgaaagtatgcggaagaaaatggtgcgaaagatagactgtttcattatgcctatcatggctgttctttacattcttaactacgtcgatcgatctgccctagctgcaagcagagtttatggaattacagaagacctcaatatgactactgagcagttcgccactgctatctcgattctcttcgttggctatctccctttccagatcccctcgaatttgatcatgaccaaagttccccggcctggcctctatatttgcagtgctgcaatcgtctggggtgcagtcagtgcatcaaccgccgcggcacagaattatcacgacctgctcgtcgttcgcgtctttttaggtgtcactgaagctgtcttttttcccggtatgctctacttcctttcggcatggtacaccaaaaacgaacttggaaaacgtcttgcagctcttttcatcttccagatgattggcagcgcctttggcggtttcgttgctgctgcttgtctgacattggacggtcgatacggtattgctggttggagatggctcttcatagtcgaaggggtagctactattggcagtggtctaatctctgccgctgtcatgcccgagtatccccacaatgcgcgtatcttgagtccaattgagcgagactttgcagtgtggcgattagagatggaagcaggagccggcgaagcgcacgaggacacgacgactctaaaagggttcaaactcgcacttttggacttgaaggtgtggacactcgtcttctgcagcatgttggctatggctatggggagcgtcgtgaacttcttccccactattgttggaagtctgggtttcaacaagacggatacactgctcctaaccgcacctccctacatcgtagccgctattgtgttctacatcatctcattcatcagcgacgtaagttacctgtttctttgctcgtcttgctatattaatcaaatgcagcgcaaaaataccatgtaccctataatcataggatgtctgttagtcggaatcggcgcatacgttatcgcaatagccacgctgaacaccggtgctcgctactttgcaatgttgctaatgccggctgctgcttccggtccgcaggtgatgctctacaagacgggtaatctacacattgctcgtccattccctaagcgtgcagctaccgtcgcaatgattaatgctctgggtggaataagtaatgtgtgggctagttacctgtattattcatcgcctcatttctacgcggcattcggaacaattattgctgccgatttgattttcgccgcgacaattacgggatacaaattccacgtcagacatctcaacaaacagcttggtggcagtatagaggaacagcagaaagcaatgaaaagcggagtcacagcacagcaggtagaactgaactggcggtatattggctactaa

SEQ ID NO: 4642 - protein, 531 aa, Muscodor strobelii
  misc_feature: SGI Peptide ID NO. 561245
  misc_feature (76)..(461): Pfam Id: PF07690 Pfam Desc: Major Facilitator Superfamily
  misc_feature (24)..(531): NCBI GI: 238506779 Blast Desc: pantothenate transporter, [Aspergillus flavus NRRL3357] gi|220689304|gb|EED45655.1| pantothenate transporter, [Aspergillus flavus NRRL3357]
  misc_feature (30)..(474): NCBI GI: 212534428 Blast Desc: conserved [Penicillium marneffei ATCC 18224] gi|210069769|gb|EEA23859.1| conserved [Penicillium marneffei ATCC 18224]
  misc_feature (46)..(528): NCBI GI: 255956033 Blast Desc: Pc21g17720 [Penicillium chrysogenum Wisconsin 54-1255] gi|211590480|emb|CAP96669.1| Pc21g17720 [Penicillium chrysogenum Wisconsin 54-1255]
  misc_feature (24)..(528): NCBI GI: 145246656 Blast Desc: An12g05060 [Aspergillus niger] gi|134080298|emb|CAK46220.1| protein product [Aspergillus niger]
  misc_feature (33)..(528): NCBI GI: 242806311 Blast Desc: allantoate permease, [Talaromyces stipitatus ATCC 10500] gi|218715343|gb|EED14765.1| allantoate permease, [Talaromyces stipitatus ATCC 10500]
  misc_feature (12)..(531): NCBI GI: 134114489 Blast Desc: CNBG4730 [Cryptococcus neoformans var. neoformans B-3501A] gi|50256806|gb|EAL19526.1| CNBG4730 [Cryptococcus neoformans var. neoformans B-3501A]
  misc_feature (40)..(531): NCBI GI: 67538750 Blast Desc: AN5545.2 [Aspergillus nidulans FGSC A4] gi|40743060|gb|EAA62250.1| AN5545.2 [Aspergillus nidulans FGSC A4] gi|259485000|tpe|CBF81700.1| TPA: conserved [Aspergillus FGSC
  misc_feature (23)..(531): NCBI GI: 256720660 Blast Desc: [Nectria haematococca mpVI 77-13-4]
  misc_feature (24)..(531): NCBI GI: 169785871 Blast Desc: [Aspergillus oryzae RIB40] gi|83776144|dbj|BAE66263.1| protein product [Aspergillus oryzae]
  misc_feature (44)..(531): NCBI GI: 58260478 Blast Desc: [Cryptococcus neoformans var. neoformans JEC21] gi|134117333|ref|XP_772893.1| CNBK2640 [Cryptococcus neoformans var. neoformans B-3501A] gi|50255511|gb|EAL18246.1| CNBK2640 var.
MTAIQEKELLALANDVPVLPVADEKTPAPTHLESNLKEIQDGVPKPERIKDLSDEDIESMRKKMVRKIDCFIMPIMAVLYILNYVDRSALAASRVYGITEDLNMTTEQFATAISILFVGYLPFQIPSNLIMTKVPRPGLYICSAAIVWGAVSASTAAAQNYHDLLVVRVFLGVTEAVFFPGMLYFLSAWYTKNELGKRLAALFIFQMIGSAFGGFVAAACLTLDGRYGIAGWRWLFIVEGVATIGSGLISAAVMPEYPHNARILSPIERDFAVWRLEMEAGAGEAHEDTTTLKGFKLALLDLKVWTLVFCSMLAMAMGSVVNFFPTIVGSLGFNKTDTLLLTAPPYIVAAIVFYIISFISDVSYLFLCSSCYINQMQRKNTMYPIIIGCLLVGIGAYVIAIATLNTGARYFAMLLMPAAASGPQVMLYKTGNLHIARPFPKRAATVAMINALGGISNVWASYLYYSSPHFYAAFGTIIAADLIFAATITGYKFHVRHLNKQLGGSIEEQQKAMKSGVTAQQVELNWRYIGY

SEQ ID NO: 4643 - DNA, 1092 bp, Muscodor strobelii
  misc_feature: SGI cDNA ID NO. 561246
  misc_feature: Encodes the peptide sequence at SEQ ID NO 4644
atgaagtctaaaatcctccttcttaacaccttagtgtcgattgctggggcttcgcctcttgaagcacgacagcttctcaatttcggcttattggacgatacgcctgaccccgtaactgcatcgatcccggtgggaccaacagcagcgactcagacttataacctcgccgcagccacgcagtctgccatctctgagcctctcgtgcagaagcgcgaagtgagtaagagagatgattgtagtcctgaacctgctggacctggcccagtcccagatcctgacacggccgaagcattcttggcgttcccagacctatcagacgcggcaaagaatgctgcggtgcccgctggatatgtcaaaacttttacagactcgcaagcttctaactctgcttacgggtatcttggattctccaacctcgattcctacgatccagctgcgtgcgccgcaaagtgcaacagcattggcgatgcatgctctggcatcaacatctatttcgagcgagacccttcactgacccctggtgctggctgcctcaaccctgcgtctaccaccaacatcaagtgtgtcttttggggcggttctcttaacgcggcaaattcgaagaataccggtcaacccaggggtcagtttgaggttgttatagcaggctccaatggctacatgaagacccgcgttcccaaggtcactggttacaatggtgtcagcctcggagacgttgccgtcaatgctccccgtaactgcttgggtcaagatactttcatgggttccaaagtcttcagcacaagctactttgaccctaacttgtgtgctgctgcctgtgaatcacagacacagtacaacattgagcacccatctgctggagagactcccaagatctgcaactacttcgttacgttcctggctgcagagaacggtaacccacaaggccagtactgttcgctttacactcaatcttgggacaagtcatacgctatcaatgatggacaatggcgcggcaacgaccattacaccaacgagtatgccttcgcatacacaaactccatctgtggtggcaaccctgcttgccccaaaggcacgcatgatgattactaa

SEQ ID NO: 4644 - protein, 363 aa, Muscodor strobelii
  misc_feature: SGI Peptide ID NO. 561246
  misc_feature (24)..(358): NCBI GI: 154308896 Blast Desc: BC1G_07976 [Botryotinia fuckeliana B05.10] gi|150852602|gb|EDN27794.1| BC1G_07976 [Botryotinia fuckeliana B05.10]
  misc_feature (1)..(347): NCBI GI: 156055144 Blast Desc: SS1G_04923 [Sclerotinia sclerotiorum 1980] gi|154702708|gb|EDO02447.1| SS1G_04923 [Sclerotinia sclerotiorum 1980]
  misc_feature (12)..(346): NCBI GI: 156048538 Blast Desc: SS1G_09000 [Sclerotinia sclerotiorum 1980] gi|154693397|gb|EDN93135.1| SS1G_09000 [Sclerotinia sclerotiorum 1980]
  misc_feature (24)..(347): NCBI GI: 154289727 Blast Desc: BC1G_15977 [Botryotinia fuckeliana B05.10] gi|150848792|gb|EDN23985.1| BC1G_15977 [Botryotinia fuckeliana B05.10]
  misc_feature (10)..(356): NCBI GI: 169618509 Blast Desc: SNOG_12445 [Phaeosphaeria nodorum SN15] gi|160703625|gb|EAT80258.2| SNOG_12445 [Phaeosphaeria nodorum SN15]
  misc_feature (1)..(345): NCBI GI: 189210375 Blast Desc: conserved [Pyrenophora tritici-repentis Pt-1C-BFP] gi|187977612|gb|EDU44238.1| conserved [Pyrenophora tritici-repentis Pt-1C-BFP]
  misc_feature (72)..(345): NCBI GI: 154301419 Blast Desc: BC1G_10379 [Botryotinia fuckeliana B05.10] gi|150856119|gb|EDN31311.1| BC1G_10379 [Botryotinia fuckeliana B05.10]
  misc_feature (68)..(356): NCBI GI: 169619074 Blast Desc: SNOG_12730 [Phaeosphaeria nodorum SN15] gi|111058908|gb|EAT80028.1| SNOG_12730 [Phaeosphaeria nodorum SN15]
  misc_feature (79)..(347): NCBI GI: 156033047 Blast Desc: SS1G_13599 [Sclerotinia sclerotiorum 1980] gi|154699002|gb|EDN98740.1| SS1G_13599 [Sclerotinia sclerotiorum 1980]
  misc_feature (1)..(345): NCBI GI: 156054138 Blast Desc: SS1G_05917 [Sclerotinia sclerotiorum 1980] gi|154703697|gb|EDO03436.1| SS1G_05917 [Sclerotinia sclerotiorum 1980]
MKSKILLLNTLVSIAGASPLEARQLLNFGLLDDTPDPVTASIPVGPTAATQTYNLAAATQSAISEPLVQKREVSKRDDCSPEPAGPGPVPDPDTAEAFLAFPDLSDAAKNAAVPAGYVKTFTDSQASNSAYGYLGFSNLDSYDPAACAAKCNSIGDACSGINIYFERDPSLTPGAGCLNPASTTNIKCVFWGGSLNAANSKNTGQPRGQFEVVIAGSNGYMKTRVPKVTGYNGVSLGDVAVNAPRNCLGQDTFMGSKVFSTSYFDPNLCAAACESQTQYNIEHPSAGETPKICNYFVTFLAAENGNPQGQYCSLYTQSWDKSYAINDGQWRGNDHYTNEYAFAYTNSICGGNPACPKGTHDDY

SEQ ID NO: 4645 - DNA, 401 bp, Muscodor strobelii
  misc_feature: SGI EST ID NO. CUFF.11784.0
  misc_feature: Variant of the nucleotide sequence at SEQ ID NO 4643
cccacaaggccagtactgttcgctttacactcaatcttgggacaagtcatacgctatcaatgatggacaatggcgcggcaacgaccattacaccaacgagtatgccttcgcatacacaaactccatctgtggtggcaaccctgcttgccccaaaggcacgcatgatgattactaagcaatgtttggacaaagctacgatgatttgattgtagagactgaaatatgacaccagcgcatacgataaacggtgtcgaaagagcagattacatgatggtctaaattttctgacttggaagttgatcttcgtgtctagagcgtccgttgcatttggattgttgagcgtttggagcccaggcaggatagtttttatagacaatgaaatacatgccgcaagatttccg

SEQ ID NO: 4646 - DNA, 615 bp, Muscodor strobelii
  misc_feature: SGI cDNA ID NO. 561247
  misc_feature: Encodes the peptide sequence at SEQ ID NO 4647
atgggctatcagcgcttctcgtctgcaagacgtgctgcgtttttcttcgactatcttaagccacagtgggctgcgctcgtgagcaaggtcagtcttctcgctcttccgagagaagggctatatcctgagacgagttctcatgagcttctatgcttcgaagccggaaagggctttgccagccgattggagtacgtctggaggcaacttagcaagttacctgcactcagcgagcttgaactcgacgctattttcctcactagtctcgattgcgtccgggtattccgtcgtatctcgttgcgaaatctccgggctgtcaggttcacgcaaagctacgccacgcgcgctatcgatgctcctaagggctacgtatggccacaacgagcttgtagaatcgcagtcgaagatagccagtttgtagaagacgttgcgagaggcatcaagggtctcagattcggctgggttcgagggcgagatcgaggggacggggaaaatactcaaaacgaacaagagagatatcggacaagattaggcccaatcagccacgaggactatgaagtattcaagaagcaggaggcgggtattgtagccccgggagttgtgcctgcgatctactag

SEQ ID NO: 4647 - protein, 204 aa, Muscodor strobelii
  misc_feature: SGI Peptide ID NO. 561247
MGYQRFSSARRAAFFFDYLKPQWAALVSKVSLLALPREGLYPETSSHELLCFEAGKGFASRLEYVWRQLSKLPALSELELDAIFLTSLDCVRVFRRISLRNLRAVRFTQSYATRAIDAPKGYVWPQRACRIAVEDSQFVEDVARGIKGLRFGWVRGRDRGDGENTQNEQERYRTRLGPISHEDYEVFKKQEAGIVAPGVVPAIY

SEQ ID NO: 4648 - DNA, 1641 bp, Muscodor strobelii
  misc_feature: SGI cDNA ID NO. 561248
  misc_feature: Encodes the peptide sequence at SEQ ID NO 4649
atgtctcccgccaccttcataaaaacgccagactctccagtggtccaggctgtggagagcacatcaccatctggggctccccttaccaatgtcccacggagagatacgagtaacagcgccgggagtgggaacaagctgatcccgaccgtaacagagaccagatatcctgaagcggtagcaagaagcttccccagatggaagaagtggttgatcctcgtcatcatatttgtagttcaggtgtccatgaacttgaacgtcggaatattcgcaaatgctcaggccggaatcgcggaagagttcggccgaagctacgacgaagcagctcggggcgctgccgtcttcctcattacatatgctttcggatgtgagctgtgggccccatggtcggaagaactaggccggaaatatgttttacaagcatcgttaggtcttgtgaatttggcatgttttcctgtcatcttcaataggggtaatttcaaccagattgtggccttccgagctttgggcggtctcttctctgctggaggcagtgttacgctgggagtcgtgtcagatctgtacactgccgagagccaagaagcccctcttgctttcatcgtcctgtcgtcggtcgctggctctattgtcggtcctattctgggtggcattctagaggccaacatgaactggcgctcgactatctgggctcagctcatctttggtgtggccgttcaggtcgcacatctcatctggtgtgacgaaacgcgctctaccgtgctgctggaccgccaggctgccaaacttcgaaagcttgctcccgctgatgcggctagttatgtcggtccaactgaacacaaatgttggagggactacttcaagttgagggagctgtggacaatctggatgcgacctttcaagatgctcctgaccgagcctatcgtattttggctttcattactgtctggtttctccgatgcgctgatattcatgatgattcaatcattcggcgccgtgatgaaagacgtttacaagttctccaccatccaggccggattggcattcttgtcgttcggactttcgtatctcgtcgcatacgggctatatcttcgggtcatcaagcgtaaccgtgcggttcgccaacagtatccggactccgaaaaggctcaatatgagtctcgtctttggtggctattgtggtgtgcccccatgttgacattcggcctctttatgttcgctttcgttgtcaacccagggattcattggatagtcgtcatgatcgcctgcctattcattggtatagccaactatacagtctatatgacgacaatcgactacatggtgaaagcctatggggaatattctgcttcggccactggcggaaacggcttcatgcgagaccttttggccggcattctgacttttgcaaacggaccatactggcgctccattcacagtataacgtccgacaatactaaagcccttcagatagggaacgtggtatgggccggaatcagcgtgccacttgtctgtgctgtgttctacatctacgttaagggccctagcatgagagccagatctccatttgcacaaaagcttgcagaagaacaaatcgaacttcagcggacgcaacaatctcaacaggagcagaccagatcagtatga

SEQ ID NO: 4649 - protein, 546 aa, Muscodor strobelii
  misc_feature: SGI Peptide ID NO. 561248
  misc_feature (75)..(466): Pfam Id: PF07690 Pfam Desc: Major Facilitator Superfamily
  misc_feature (29)..(533): NCBI GI: 259479511 Blast Desc: TPA: MFS multidrug transporter, (AFU_orthologue; AFUA_2G12550) [Aspergillus nidulans FGSC A4]
  misc_feature (19)..(529): NCBI GI: 156060961 Blast Desc: SS1G_02623 [Sclerotinia sclerotiorum 1980] gi|154700027|gb|EDN99765.1| SS1G_02623 [Sclerotinia sclerotiorum 1980]
  misc_feature (57)..(533): NCBI GI: 121715856 Blast Desc: MFS multidrug transporter, [Aspergillus clavatus NRRL 1] gi|119403694|gb|EAW14111.1| MFS multidrug transporter, [Aspergillus clavatus NRRL 1]
  misc_feature (33)..(533): NCBI GI: 256724790 Blast Desc: [Nectria haematococca mpVI 77-13-4]
  misc_feature (33)..(539): NCBI GI: 255946423 Blast Desc: Pc20g15050 [Penicillium chrysogenum Wisconsin 54-1255] gi|211588714|emb|CAP86834.1| Pc20g15050 [Penicillium chrysogenum Wisconsin 54-1255]
  misc_feature (24)..(526): NCBI GI: 189192414 Blast Desc: multidrug transporter [Pyrenophora tritici-repentis Pt-1C-BFP] gi|187974152|gb|EDU41651.1| multidrug transporter [Pyrenophora tritici-repentis Pt-1C-BFP]
  misc_feature (3)..(532): NCBI GI: 115384082 Blast Desc: ATEG_01223 [Aspergillus terreus NIH2624] gi|114196280|gb|EAU37980.1| ATEG_01223 [Aspergillus terreus NIH2624]
  misc_feature (62)..(545): NCBI GI: 85104635 Blast Desc: NCU06519 [Neurospora crassa OR74A] gi|28923348|gb|EAA32540.1| NCU06519 [Neurospora crassa OR74A]
  misc_feature (20)..(531): NCBI GI: 46126373 Blast Desc: FG07564.1 [Gibberella zeae PH-1]
  misc_feature (50)..(533): NCBI GI: 145231624 Blast Desc: An02g01480 [Aspergillus niger] gi|134056190|emb|CAK96365.1| protein product [Aspergillus niger]
MSPATFIKTPDSPVVQAVESTSPSGAPLTNVPRRDTSNSAGSGNKLIPTVTETRYPEAVARSFPRWKKWLILVIIFVVQVSMNLNVGIFANAQAGIAEEFGRSYDEAARGAAVFLITYAFGCELWAPWSEELGRKYVLQASLGLVNLACFPVIFNRGNFNQIVAFRALGGLFSAGGSVTLGVVSDLYTAESQEAPLAFIVLSSVAGSIVGPILGGILEANMNWRSTIWAQLIFGVAVQVAHLIWCDETRSTVLLDRQAAKLRKLAPADAASYVGPTEHKCWRDYFKLRELWTIWMRPFKMLLTEPIVFWLSLLSGFSDALIFMMIQSFGAVMKDVYKFSTIQAGLAFLSFGLSYLVAYGLYLRVIKRNRAVRQQYPDSEKAQYESRLWWLLWCAPMLTFGLFMFAFVVNPGIHWIVVMIACLFIGIANYTVYMTTIDYMVKAYGEYSASATGGNGFMRDLLAGILTFANGPYWRSIHSITSDNTKALQIGNVVWAGISVPLVCAVFYIYVKGPSMRARSPFAQKLAEEQIELQRTQQSQQEQTRSV

SEQ ID NO: 4650 - DNA, 930 bp, Muscodor strobelii
  misc_feature: SGI cDNA ID NO. 561249
  misc_feature: Encodes the peptide sequence at SEQ ID NO 4651
atgacttcagatatcggcacacgtaatgcaggtgatttcgcaacagaggctcacgtcatttctcgcgatggcacacgtataggatacctacgccgggggagcggtgaaggattggtcctgatccaaggcgcaatgggtacggcttacaattacaatgacctagctgaagcactggcaaccagctttacggtctatacacctgaccgtcgcggccgtggcatgagcccaaagccctacgatgcttcgcacacaatcgctcgtgacgtcgaggatgcagatgcgatattagctgaaacaggtgcgcgccttgtcttcggtctcagttccggtgccatgattgtcttggaagccgcacgaaccttgtcgcgcgtcgatcgagccgccgtgtacgagccgccgttctatgcctcgggaatctcccacggcgacgtccagaggctcaattccgagatcgagcgaggcgaaactgccgcagccatggtcacggcacttatcgcagcccagacagcacccgcaccgatacgcatgctcccgcgatggattgtgcggctgctgtccagcgctgttctctactttgacgatcgtagagacactccttacgccaaactacgcagcatggttccaggtttgcgctacgacttcaatgacgtggcgggtatggatgggaaaataagctctgttgctaccatcgagaagcccatactggtgatcagcggaacaagcagcccaggtttcttacagcagagctgccgcgaccttcagaacgcattgccacacgcacgccacgttgagctcaacgggttcgatcattctggcccatggaatggcacccgcggtggcgatcctactatagtcgcatctacattacaaaaattcttcagcgagcacggccaggtaaagatgctcactacagtatcacagatggtgtaa

SEQ ID NO: 4651 - protein, 309 aa, Muscodor strobelii
  misc_feature: SGI Peptide ID NO. 561249
  misc_feature (62)..(286): Pfam Id: PF00561 Pfam Desc: alpha/beta hydrolase fold
  misc_feature (62)..(118): Pfam Id: PF00561 Pfam Desc: alpha/beta hydrolase fold
  misc_feature (19)..(294): NCBI GI: 91784069 Blast Desc: esterase/hydrolase [Burkholderia xenovorans LB400] gi|91688023|gb|ABE31223.1| esterase/hydrolase [Burkholderia xenovorans LB400]
  misc_feature (20)..(273): NCBI GI: 13472080 Blast Desc: mlr2262 [Mesorhizobium loti MAFF303099] gi|14022825|dbj|BAB49433.1| mlr2262 [Mesorhizobium loti MAFF303099]
  misc_feature (21)..(293): NCBI GI: 258651206 Blast Desc: esterase/hydrolase [Nakamurella multipartita DSM 44233] gi|258554431|gb|ACV77373.1| esterase/hydrolase [Nakamurella multipartita DSM 44233]
  misc_feature (18)..(293): NCBI GI: 284030100 Blast Desc: alpha/beta hydrolase fold-1 [Kribbella flavida DSM 17836] gi|283809393|gb|ADB31232.1| alpha/beta hydrolase fold-1 [Kribbella flavida DSM 17836]
  misc_feature (19)..(295): NCBI GI: 159040423 Blast Desc: alpha/beta hydrolase fold [Salinispora arenicola CNS-205] gi|157919258|gb|ABW00686.1| alpha/beta hydrolase fold [Salinispora arenicola CNS-205]
  misc_feature (19)..(293): NCBI GI: 239982446 Blast Desc: alpha/beta hydrolase fold protein [Streptomyces albus J1074]
  misc_feature (16)..(295): NCBI GI: 254400460 Blast Desc: alpha/beta hydrolase [Streptomyces sviceus ATCC 29083] gi|197709942|gb|EDY53976.1| alpha/beta hydrolase [Streptomyces sviceus ATCC 29083]
  misc_feature (19)..(294): NCBI GI: 251799490 Blast Desc: hydrolase [Paenibacillus sp. JDR-2] gi|247547116|gb|ACT04135.1| hydrolase [Paenibacillus sp. JDR-2]
  misc_feature (18)..(293): NCBI GI: 284033804 Blast Desc: alpha/beta hydrolase fold protein [Kribbella flavida DSM 17836] gi|283813097|gb|ADB34936.1| alpha/beta hydrolase fold protein [Kribbella flavida DSM 17836]
  misc_feature (19)..(248): NCBI GI: 256671645 Blast Desc: hydrolase [Streptomyces sp. AA4]
MTSDIGTRNAGDFATEAHVISRDGTRIGYLRRGSGEGLVLIQGAMGTAYNYNDLAEALATSFTVYTPDRRGRGMSPKPYDASHTIARDVEDADAILAETGARLVFGLSSGAMIVLEAARTLSRVDRAAVYEPPFYASGISHGDVQRLNSEIERGETAAAMVTALIAAQTAPAPIRMLPRWIVRLLSSAVLYFDDRRDTPYAKLRSMVPGLRYDFNDVAGMDGKISSVATIEKPILVISGTSSPGFLQQSCRDLQNALPHARHVELNGFDHSGPWNGTRGGDPTIVASTLQKFFSEHGQVKMLTTVSQMV

SEQ ID NO: 4652 - DNA, 1236 bp, Muscodor strobelii
  misc_feature: SGI EST ID NO. CUFF.11821.0
  misc_feature: Variant of the nucleotide sequence at SEQ ID NO 4650
atcacgatccagctcgggactcggacaacttagacatgcgatctagaattatatctcaacatgatgaaccatttcaagacgccagacatgtcttccaagaagtcaagttttcatggctgacttgtccagagaggtatgacttcagatatcggcacacgtaatgcaggtgatttcgcaacagaggctcacgtcatttctcgcgatggcacacgtataggatacctacgccgggggagcggtgaaggattggtcctgatccaaggcgcaatgggtacggcttacaattacaatgacctagctgaagcactggcaaccagctttacggtctatacacctgaccgtcgcggccgtggcatgagcccaaagccctacgatgcttcgcacacaatcgctcgtgacgtcgaggatgcagatgcgatattagctgaaacaggtgcgcgccttgtcttcggtctcagttccggtgccatgattgtcttggaagccgcacgaaccttgtcgcgcgtcgatcgagccgccgtgtacgagccgccgttctatgcctcgggaatctcccacggcgacgtccagaggctcaattccgagatcgagcgaggcgaaactgccgcagccatggtcacggcacttatcgcagcccagacagcacccgcaccgatacgcatgctcccgcgatggattgtgcggctgctgtccagcgctgttctctactttgacgatcgtagagacactccttacgccaaactacgcagcatggttccaggtttgcgctacgacttcaatgacgtggcgggtatggatgggaaaataagctctgttgctaccatcgagaagcccatactggtgatcagcggaacaagcagcccaggtttcttacagcagagctgccgcgaccttcagaacgcattgccacacgcacgccacgttgagctcaacgggttcgatcattctggcccatggaatggcacccgcggtggcgatcctactatagtcgcatctacattacaaaaattcttcagcgagcacggccaggtaaagatgctcactacagtatcacagatggtgtaatccgaattctttcgatgagtaaagtggctgatttgaagaaacgagtttgctatagttcagtaaaccactcaggtgccgcagacaacatacgggaataattgtatcttgtattatcggctttgtgtgtctatgacttctctcgtctagcaaatcatgcttaaccgaacgtgc

SEQ ID NO: 4653 - DNA, 1317 bp, Muscodor strobelii
  misc_feature: SGI cDNA ID NO. 561250
  misc_feature: Encodes the peptide sequence at SEQ ID NO 4654
atggaagatcagatcaattccatgaacgtgatattttcctccgcatacttgacactgatcaatctggacggcgataatgcggattggggactacctggagtatcaagatccattctccacacgaaccaaccgtcgctacgaactacgcaaggaacaattacggccacgttcattcattcgttctggctcgatgccggcaaatctccttgggacagcagagcatggacgctacaggaacggcttctttctcgtcgatgcgttatctttgcacggaaccatttcgccatggcatgcaaagaagagtattttcatgacagcattgatatgcatcccgagatctggacgagaatgggcaaggatttctaccgggaagacggctcggatatcagcttgaaaggatcggagtggagcctgaatgtctacgatgcgctggtttcgacgtattctggtcggaagctgaccgtcgaagaggatgctctcagtgcatgtctgggtgcaatcaatgtcatgagtgaaaacacaggatatactttcatacatggtctgccgaaacaagatatctggaaagccctcatctggatacctcatcatgaacatgtacccagaagaagacgacactttccatcctggtcgtggcttggctggtcggggaggaccgagtacccttactgggtcagcgatatggagttgtacgcagaggctatccttgacacaggccatccatcatttcatcgagctaagaaacggatccgtctgcgtgataattcttacgaagcacggtcgtatctaggccaagatatgacctctgctcatgtcctccgctatcctccagtagatggaacatcgccgattctagaaatttccacggcggttgtacgaatcaactgcaagctcatacgacgcaacgcaacagcacacaagaatctgagatcagactcgcagcagagcaaggtagcgatcggggaccagtggacactgctagacaaacacggggatccactgcgaaacacatcaggcgagcaccctgtattcgagccgacagatgtcttcttccgccttgatcccgccgactcagaacggctgattgagcgaggcgaccacgcggagctggtctttatccagctgtggccacagatccgagactcagaggagtcgaataactggcagttcaacatggtgagtgcattggtagctattcgcaacgaagacggaacggcggaacgtttggcttcggtgcttctagagctggatcagtggcgagactgtattgtaacgagccccaatgaccacgcggctgtatcggtcacgcttgtatga

SEQ ID NO: 4654 - protein, 438 aa, Muscodor strobelii
  misc_feature: SGI Peptide ID NO. 561250
  misc_feature (2)..(272): NCBI GI: 171691310 Blast Desc: protein product [Podospora anserina] gi|170945603|emb|CAP71716.1| protein product [Podospora anserina]
  misc_feature (5)..(261): NCBI GI: 115433588 Blast Desc: [Aspergillus terreus NIH2624] gi|114189783|gb|EAU31483.1| [Aspergillus terreus NIH2624]
  misc_feature (1)..(215): NCBI GI: 169621799 Blast Desc: SNOG_14112 [Phaeosphaeria nodorum SN15] gi|111057229|gb|EAT78349.1| SNOG_14112 [Phaeosphaeria nodorum SN15]
  misc_feature (4)..(224): NCBI GI: 169600389 Blast Desc: SNOG_03028 [Phaeosphaeria nodorum SN15] gi|111068639|gb|EAT89759.1| SNOG_03028 [Phaeosphaeria nodorum SN15]
  misc_feature (3)..(221): NCBI GI: 256723982 Blast Desc: NECHADRAFT_86266 [Nectria haematococca mpVI 77-13-4]
  misc_feature (1)..(215): NCBI GI: 256733208 Blast Desc: NECHADRAFT_79271 [Nectria haematococca mpVI 77-13-4]
  misc_feature (4)..(218): NCBI GI: 256726286 Blast Desc: NECHADRAFT_82040 [Nectria haematococca mpVI 77-13-4]
  misc_feature (1)..(218): NCBI GI: 256724998 Blast Desc: NECHADRAFT_77046 [Nectria haematococca mpVI 77-13-4]
  misc_feature (3)..(225): NCBI GI: 39956530 Blast Desc: conserved [Magnaporthe grisea 70-15] gi|145016491|gb|EDK00921.1| conserved [Magnaporthe grisea 70-15]
  misc_feature (3)..(225): NCBI GI: 54888743 Blast Desc: tol related protein [Magnaporthe grisea]
MEDQINSMNVIFSSAYLTLINLDGDNADWGLPGVSRSILHTNQPSLRTTQGTITATFIHSFWLDAGKSPWDSRAWTLQERLLSRRCVIFARNHFAMACKEEYFHDSIDMHPEIWTRMGKDFYREDGSDISLKGSEWSLNVYDALVSTYSGRKLTVEEDALSACLGAINVMSENTGYTFIHGLPKQDIWKALIWIPHHEHVPRRRRHFPSWSWLGWSGRTEYPYWVSDMELYAEAILDTGHPSFHRAKKRIRLRDNSYEARSYLGQDMTSAHVLRYPPVDGTSPILEISTAVVRINCKLIRRNATAHKNLRSDSQQSKVAIGDQWTLLDKHGDPLRNTSGEHPVFEPTDVFFRLDPADSERLIERGDHAELVFIQLWPQIRDSEESNNWQFNMVSALVAIRNEDGTAERLASVLLELDQWRDCIVTSPNDHAAVSVTLV

SEQ ID NO: 4655 - DNA, 2845 bp, Muscodor strobelii
  misc_feature: SGI EST ID NO. CUFF.11824.0
  misc_feature: Variant of the nucleotide sequence at SEQ ID NO 4653
gacgaatccaaatgccggtggctcgttcttttgctttttcctcataccgtcaatcgtgcttcaaaacaccacagcttgccagcgcacgccactatcgtacaagcggatcagctttgaaccaattcctgctctccagcattgtcgtgtcgcagctgtaacagcctccattgccaaagtcaagatgccacatttgctttctatgacgggcgagtctcgatggagcagagtcatcgttcaaacatgcaaaacgcaaacatcgacttttgtcaagattgtgccaaaataccgctaagagagatattcgacaaatggccaccttcaaagccaaagcgccatcgtgttggcgatctttttgtagctgttgaacgacaatcgtggtgtgcattttgcaaattcctcatcgaagccttccagataggccacgagcatcaatccgagcgccttggtgctaatctcactcgccgcgactcagctatatactttgcctcagatcctgacgagcttgcttggtaccggagaattggacttgacaccgacgtgcccccttgtcctttcgtttggctacaaacaggcacgcccacgatcagcggcgcaccgtttatctgcattaccctcgagtctcgggacgatggagcccacggcgttcaattccttagaccacgtcgtcgcaaccccgtggaagctttcaatggcgcactaaactacgaactcgttcgttcatggctgcagaaatgcaataatcatcatagcatcgagtgcagcagatgtgaatgacggcgggtccgagatcaacatcttgttagtggatgtttcaagtcgaaagctcgtaccaagcacgacaaaggagaaatataccgctctaagctatgtatggggcaaaggtacggaacttcgactcaggacgtcagagatgagcacacaaatgcagtctgacgcagatgccgaaggcaacacacacaaccatcgtcggtcaaatggtggtgctgtattgccggcgtcgataccccaaaccattgaggacgcgatgacttttgttcgtcggttgggcgagagatttctatgggttgacctatactgcatcgatcaaaacaattccgcagaaatggaagatcagatcaattccatgaacgtgatattttcctccgcatacttgacactgatcaatctggacggcgataatgcggattggggactacctggagtatcaagatccattctccacacgaaccaaccgtcgctacgaactacgcaaggaacaattacggccacgttcattcattcgttctggctcgatgccggcaaatctccttgggacagcagagcatggacgctacaggaacggcttctttctcgtcgatgcgttatctttgcacggaaccatttcgccatggcatgcaaagaagagtattttcatgacagcattgatatgcatcccgagatctggacgagaatgggcaaggatttctaccgggaagacggctcggatatcagcttgaaaggatcggagtggagcctgaatgtctacgatgcgctggtttcgacgtattctggtcggaagctgaccgtcgaagaggatgctctcagtgcatgtctgggtgcaatcaatgtcatgagtgaaaacacaggatatactttcatacatggtctgccgaaacaagatatctggaaagccctcatctggatacctcatcatgaacatgtacccagaagaagacgacactttccatcctggtcgtggcttggctggtcggggaggaccgagtacccttactgggtcagcgatatggagttgtacgcagaggctatccttgacacaggccatccatcatttcatcgagctaagaaacggatccgtctgcgtgataattcttacgaagcacggtcgtatctaggccaagatatgacctctgctcatgtcctccgctatcctccagtagatggaacatcgccgattctagaaatttccacggcggttgtacgaatcaactgcaagctcatacgacgcaacgcaacagcacacaagaatctgagatcagactcgcagcagagcaaggtagcgatcggggaccagtggacactgctagacaaacacggggatccactgcgaaacacatcaggcgagcaccctgtattcgagccgacagatgtcttcttccgccttgatcccgccgactcagaacggctgattgagcgaggcgaccacgcggagctggtctttatccagctgtggccacagatccgagactcagaggagtcgaataactggcagttcaacatggtgagtgcattggtagctattcgcaacgaagacggaacggcggaacgtttggcttcggtgcttctagagctggatcagtggcgagactgtattgtaacgagccccaatgaccacgcggctgtatcggtcacgcttgtatgaatcagctttatcccatgtgtaacgcctcgcagctaaggtatgtaagacatccgttttgcgctcgaaacgcgtgcgaataccctactcgctctgatgcgttccgagaacactcgtcgttttagtgtataacaatggcagtatattcgatcatacaatgattatttaagcttgcctttgactgtttaccttgtcacactcttctcgcagtgattcatttacacctatggaagtattatggagaagagtcagtgcctgtgttgttctgaggctgctcggcactatacacaggtaattatcggatagtatcgacgatagaagcggtgtccaagatggatctttcaacttgtctcgctgtacgcagcaattaatgtcgacctacctgatagcattatgaacatttaaatcgcccgtttccctaatttgccg

SEQ ID NO: 4656 - DNA, 1140 bp, Muscodor strobelii
  misc_feature: SGI cDNA ID NO. 561251
  misc_feature: Reduced expression when VOC is produced
  misc_feature: Encodes the peptide sequence at SEQ ID NO 4657
atggtgaatctctggccctggaagggcgaagactcgtccccggcctcgttcgaaaagaccctctctaccctcgctaccaagatcaccgccacccaggccagcgtcgaccgtgtgcgcaacaactcccgccgcatcaagctcctgtggacactctatctcgccttcgcttacctcgtctactccatcgtcctcatcctcgtcgtcggatggcacaatctcggcgcttgggagtggaccggcatggctggcgggcctgttctcatctacctggtccgcacggcgaccaacgcctactatagctaccgactcgacaccctcgagacccgcctcaaagcccagcaggctgagcgtgccaagaccatccagaagctgaaagacgccaccaagtacgactctactctcgagctcctcgagaagtacggcggcgggagcgagaagcgcaacaagcagaagaaacagaaagacggcgacggtgcgccatcgcaggagaacgaggctgctaggaagaaacatcgccagagcatcgactcggccaacgtaaccgggagaacgcagatgctgcctccgcccactgccaacctccagcgaccttctacgtcttcaggcttgccgcccaaccgaccaggccagttcggcacaccgccacccgggccctctcgaccaccacagcaacaccagcccaccgaggaattcgcacccaacgccggccccctccccgccacctataaccagtacgagatgaacccagggccgcctcgctggtacgaccgcatcctagactccatgctaggcgaggacgagatggcgcctaagaaccgtatcgttctcatctgcaacaaatgccgcctggtcaacggtcaagctccgcccggaaccaagaacctggccgaggtcggtatttggaagtgcatgggatgtggtgctaagaacggagagctggacgagggcaagaaaatcatgcagcaggtattaggagacaggaagagtcccgctcaggtcccggaggaacgagatagcgatagatctagcgacatcgtcaaagtcgagcaggatgatggcgaacagtcaacggagagcgatgcggatagaatacaatcaccacgggaactacgggctaggaggagagaacaaaagccatag

SEQ ID NO: 4657 - protein, 379 aa, Muscodor strobelii
  misc_feature: SGI Peptide ID NO. 561251
  misc_feature (1)..(378): NCBI GI: 171676273 Blast Desc: protein product [Podospora anserina] gi|170936202|emb|CAP60862.1| protein product [Podospora anserina]
  misc_feature (1)..(373): NCBI GI: 116193895 Blast Desc: CHGG_06665 [Chaetomium globosum CBS 148.51] gi|88182578|gb|EAQ90046.1| CHGG_06665 [Chaetomium globosum CBS 148.51]
  misc_feature (1)..(327): NCBI GI: 39969939 Blast Desc: MGG_10578 [Magnaporthe grisea 70-15] gi|149209269|ref|XP_001522009.1| MGCH7_ch7g127 [Magnaporthe grisea 70-15] gi|86196082|gb|EAQ70720.1| MGCH7_ch7g127 grisea
  misc_feature (1)..(373): NCBI GI: 85118795 Blast Desc: NCU01879 [Neurospora crassa OR74A] gi|28927320|gb|EAA36274.1| conserved [Neurospora crassa OR74A] gi|38636443|emb|CAE81979.1| conserved [Neurospora crassa]
  misc_feature (1)..(324): NCBI GI: 256721895 Blast Desc: NECHADRAFT_59547 [Nectria haematococca mpVI 77-13-4]
  misc_feature (1)..(329): NCBI GI: 46111825 Blast Desc: FG02794.1 [Gibberella zeae PH-1]
  misc_feature (1)..(356): NCBI GI: 242815338 Blast Desc: conserved [Talaromyces stipitatus ATCC 10500] gi|218714887|gb|EED14310.1| conserved [Talaromyces stipitatus ATCC 10500]
  misc_feature (1)..(354): NCBI GI: 212545332 Blast Desc: conserved [Penicillium marneffei ATCC 18224] gi|210065789|gb|EEA19883.1| conserved [Penicillium marneffei ATCC 18224]
  misc_feature (1)..(320): NCBI GI: 159122297 Blast Desc: conserved [Aspergillus fumigatus A1163]
  misc_feature (1)..(320): NCBI GI: 70981899 Blast Desc: conserved [Aspergillus fumigatus Af293] gi|66844101|gb|EAL84440.1| conserved [Aspergillus fumigatus Af293]
  misc_feature: Useful for introducing or modulating the production of volatile compounds
MVNLWPWKGEDSSPASFEKTLSTLATKITATQASVDRVRNNSRRIKLLWTLYLAFAYLVYSIVLILVVGWHNLGAWEWTGMAGGPVLIYLVRTATNAYYSYRLDTLETRLKAQQAERAKTIQKLKDATKYDSTLELLEKYGGGSEKRNKQKKQKDGDGAPSQENEAARKKHRQSIDSANVTGRTQMLPPPTANLQRPSTSSGLPPNRPGQFGTPPPGPSRPPQQHQPTEEFAPNAGPLPATYNQYEMNPGPPRWYDRILDSMLGEDEMAPKNRIVLICNKCRLVNGQAPPGTKNLAEVGIWKCMGCGAKNGELDEGKKIMQQVLGDRKSPAQVPEERDSDRSSDIVKVEQDDGEQSTESDADRIQSPRELRARRREQKP

SEQ ID NO: 4658 - DNA, 2089 bp, Muscodor strobelii
  misc_feature: SGI EST ID NO. CUFF.11937.1
  misc_feature: Variant of the nucleotide sequence at SEQ ID NO 4656
gttcagccctggttttttgggtgtagcagcaactgtcgtcactccacgtcgatcaaaacaccactacggatgcactgcttgaaacaccacaaacatacaccgctgcctcaggtcacaggtcatcactgaccactcacttgatgcctgaacgacactgatcagaagagcatcgcggctgtcattcttcacaattttcgtttccttctctttgttccctttcatatacttctgcctcgcagtctcggccactaggtagctctacatacgaccattcctacgactgtccatttcctatatacaccgactcacgtgtctcaagctacaaccaatccacgacaatccacgacgccgactcaaataatctatgctctagctcctacttagtcttatatctttgacttacacgcacatatcgtgtttcgcgcactttcgataacattctcgccatgcttcagacattatagcttcagccttaactgctcgacatcatggtgaatctctggccctggaagggcgaagactcgtccccggcctcgttcgaaaagaccctctctaccctcgctaccaagatcaccgccacccaggccagcgtcgaccgtgtgcgcaacaactcccgccgcatcaagctcctgtggacactctatctcgccttcgcttacctcgtctactccatcgtcctcatcctcgtcgtcggatggcacaatctcggcgcttgggagtggaccggcatggctggcgggcctgttctcatctacctggtccgcacggcgaccaacgcctactatagctaccgactcgacaccctcgagacccgcctcaaagcccagcaggctgagcgtgccaagaccatccagaagctgaaagacgccaccaagtacgactctactctcgagctcctcgagaagtacggcggcgggagcgagaagcgcaacaagcagaagaaacagaaagacggcgacggtgcgccatcgcaggagaacgaggctgctaggaagaaacatcgccagagcatcgactcggccaacgtaaccgggagaacgcagatgctgcctccgcccactgccaacctccagcgaccttctacgtcttcaggcttgccgcccaaccgaccaggccagttcggcacaccgccacccgggccctctcgaccaccacagcaacaccagcccaccgaggaattcgcacccaacgccggccccctccccgccacctataaccagtacgagatgaacccagggccgcctcgctggtacgaccgcatcctagactccatgctaggcgaggacgagatggcgcctaagaaccgtatcgttctcatctgcaacaaatgccgcctggtcaacggtcaagctccgcccggaaccaagaacctggccgaggtcggtatttggaagtgcatgggatgtggtgctaagaacggagagctggacgagggcaagaaaatcatgcagcaggtattaggagacaggaagagtcccgctcaggtcccggaggaacgagatagcgatagatctagcgacatcgtcaaagtcgagcaggatgatggcgaacagtcaacggagagcgatgcggatagaatacaatcaccacgggaactacgggctaggaggagagaacaaaagccatagccgtatttactcaggcccgtgtgacggtatgcgacaatggacttagtatcattgattcatttagagcccgaaaactatcacatggcttagcgaatcgagcatctatcaatgattactagtgcaagttcaattcgccggcgaggactcaccgtacttgccactaataagctggagacgtcgcgacacaagaggtggactaagcgtagggaccatatgttccaagaataagcagatggccatctccagatatacattgatccctcaaatagcaggatatgactgggaaaatgcatgcctacaaacgttgatcggtttcgatgggggaaattttgcatctcgtaatgcgttgtctactagtatgctatagccaaacacatcgatatctgcatcctatggcttgttgctagcgaattcacttgacctctctccggatgggtacatacatgtatgtacatatgtag

SEQ ID NO: 4659 - DNA, 1626 bp, Muscodor strobelii
  misc_feature: SGI cDNA ID NO. 561252
  misc_feature: Encodes the peptide sequence at SEQ ID NO 4660
atggtgaagatcaaaaccgcacaggaagcccagacgggtgcctccgaccccattctcacgcgtatcgtcgaggaggataaggtgaagtggtatcgcaagccgaatttgcgaacgctttacttcctgcttttcccgacgtgtatgggcattgagttgacgagcggattcgactctcagttgatcaacgcgctacagattgtacctgcttggattcaattcttcgataatccggacggtgctcttaagggtatcatcgctgctgcttattcacttggtgctattctctcgttgcccttcgttggaattgtgaatgacaaatttggacgacgatggtcaatttttggtggttcggttatcatggtcattggagcgttgattcaaggtctttctgtgaatgtcgcgcagtacatcattgcccgtctgattctggggtttggtatcccaacctgcatcgtctctgcttcttctcttatcggcgagctttcatacccgaaagagcgacctgtcctgacatcgctgttcaacgtatcgtacttcatcgggcagctaacagcggccggtataacatttgggacaaacagcatcctcagcaactactcatggcgcattccttcctggctccaaatggtgccgtcgctgttccaaattgccttcatcttcttcattcccgagtctccccgctggctcatcacgagggaccggggagatgaggcatttgatattctggcgaagtatcatgctgagggtgatagagagtcagagtttgtcaaggcagagtatgcccagttgcagactacgattgaaatcgaacttgcgcattcaaagagatcgtggaaggatcttttctcgacgagcggtatgagaagacgtgttttgatcagtactatgcttgggcttttcacacaggttagttcaacacgtcgatggtctggcaatacactcatctcatattatctcggcgatatcctgcaaatgattggacacgaaagctctgtcttcaagcagaagatcaacgtagcgaccgcatcaaacagtctcgtttggggcacagtcgcagcctcactcgtaacacgattccgccgccgtgccatgtacctcacatgcaccattggtctgctcctcgtgtacattggctggaccatcagcatgaagtacgcgatcgacgctaagaatgccggaatcccgaacgcggccgcaggtggtgttgtgctgttcttcatttttgcttatagcccagtatataacatagggtacaatgctcttacctatacctacatggtcgaaatctggccatacgccgagcgctctcgaggtattgcattcttccagctctggggcagactcgcatccttcttcacgacttttgtgaatcctatcggattacaaaactcgagttggcggtatctcatctcttatgtcgtgttcttggcgtatgagatcgtgtttgtctacttcatgttcccggagacattcggtagaacactagaagaacttgctttcctgtttgaggacaaggctcttgcggatgaggctgttcatgctgttgagaaggttgttgggcaccacgagggggatggcgcagagaggcggagcagatcgtctgtcgaggggaaggagacagcttag

SEQ ID NO: 4660 - protein, 541 aa, Muscodor strobelii
  misc_feature: SGI Peptide ID NO. 561252
  misc_feature (39)..(454): Pfam Id: PF07690 Pfam Desc: Major Facilitator Superfamily
  misc_feature (42)..(502): Pfam Id: PF00083 Pfam Desc: Sugar (and other) transporter
  misc_feature (78)..(454): Pfam Id: PF07690 Pfam Desc: Major Facilitator Superfamily
  misc_feature (7)..(540): NCBI GI: 116200915 Blast Desc: CHGG_08342 [Chaetomium globosum CBS 148.51] gi|88176860|gb|EAQ84328.1| CHGG_08342 [Chaetomium globosum CBS 148.51]
  misc_feature (12)..(536): NCBI GI: 171677314 Blast Desc: protein product [Podospora anserina] gi|170936725|emb|CAP61383.1| protein product [Podospora anserina]
  misc_feature (15)..(538): NCBI GI: 85094247 Blast Desc: NCU05853 [Neurospora crassa OR74A] gi|28921300|gb|EAA30608.1| conserved [Neurospora crassa OR74A]
  misc_feature (4)..(525): NCBI GI: 169776808 Blast Desc: [Aspergillus oryzae RIB40] gi|83771606|dbj|BAE61737.1| protein product [Aspergillus oryzae]
  misc_feature (4)..(536): NCBI GI: 212538607 Blast Desc: MFS sugar transporter, [Penicillium marneffei ATCC 18224] gi|210069201|gb|EEA23292.1| MFS sugar transporter, [Penicillium marneffei ATCC 18224]
  misc_feature (8)..(523): NCBI GI: 119473356 Blast Desc: MFS sugar transporter, [Neosartorya fischeri NRRL 181] gi|119406731|gb|EAW16682.1| MFS sugar transporter, [Neosartorya fischeri NRRL 181]
  misc_feature (4)..(529): NCBI GI: 242792392 Blast Desc: MFS sugar transporter, [Talaromyces stipitatus ATCC 10500] gi|218718531|gb|EED17951.1| MFS sugar transporter, [Talaromyces stipitatus ATCC 10500]
  misc_feature (4)..(540): NCBI GI: 115391487 Blast Desc: conserved [Aspergillus terreus NIH2624] gi|114194172|gb|EAU35872.1| conserved [Aspergillus terreus NIH2624]
  misc_feature (4)..(536): NCBI GI: 121700434 Blast Desc: MFS sugar transporter, [Aspergillus clavatus NRRL 1] gi|119396624|gb|EAW07056.1| MFS sugar transporter, [Aspergillus clavatus NRRL 1]
  misc_feature (8)..(540): NCBI GI: 255939820 Blast Desc: Pc16g03110 [Penicillium chrysogenum Wisconsin 54-1255] gi|211585302|emb|CAP92981.1| Pc16g03110 [Penicillium chrysogenum Wisconsin 54-1255]
MVKIKTAQEAQTGASDPILTRIVEEDKVKWYRKPNLRTLYFLLFPTCMGIELTSGFDSQLINALQIVPAWIQFFDNPDGALKGIIAAAYSLGAILSLPFVGIVNDKFGRRWSIFGGSVIMVIGALIQGLSVNVAQYIIARLILGFGIPTCIVSASSLIGELSYPKERPVLTSLFNVSYFIGQLTAAGITFGTNSILSNYSWRIPSWLQMVPSLFQIAFIFFIPESPRWLITRDRGDEAFDILAKYHAEGDRESEFVKAEYAQLQTTIEIELAHSKRSWKDLFSTSGMRRRVLISTMLGLFTQVSSTRRWSGNTLISYYLGDILQMIGHESSVFKQKINVATASNSLVWGTVAASLVTRFRRRAMYLTCTIGLLLVYIGWTISMKYAIDAKNAGIPNAAAGGVVLFFIFAYSPVYNIGYNALTYTYMVEIWPYAERSRGIAFFQLWGRLASFFTTFVNPIGLQNSSWRYLISYVVFLAYEIVFVYFMFPETFGRTLEELAFLFEDKALADEAVHAVEKVVGHHEGDGAERRSRSSVEGKETA

SEQ ID NO: 4661 - DNA, 1315 bp, Muscodor strobelii
  misc_feature: SGI EST ID NO. CUFF.11880.0
  misc_feature: Variant of the nucleotide sequence at SEQ ID NO 4659
tgaagactcccttttctgtatcacaatgtatgcggagttgtgatttctacagctgggagagaagtttcgtctaaacttcgagatgggatgtttccaccatgccaatccccgcatcgctacgaccccggattcctgggcgctgatattgggggttcgctttcgttgggggcttcggtcgcattgcaggtaataaatagtatgtccgcgtgcgaagcgaacctagcgttgtaacggtttgggcggttggttgggttctctcatatatatgtaggtatattaatcccgagcaccatccacccgtattaataacagaacgcttgagttggagttctcgttgcactcgcttctttgcatcgaagtgactctccacttctgatcttcaagactctttaactgtaccgctttgcgataggtcaacatggtgaagatcaaaaccgcacaggaagcccagacgggtgcctccgaccccattctcacgcgtatcgtcgaggaggataaggtgaagtggtatcgcaagccgaatttgcgaacgctttacttcctgcttttcccgacgtgtatgggcattgagttgacgagcggattcgactctcagttgatcaacgcgctacagattgtacctgcttggattcaattcttcgataatccggacggtgctcttaagggtatcatcgctgctgcttattcacttggtgctattctctcgttgcccttcgttggaattgtgaatgacaaatttggacgacgatggtcaatttttggtggttcggttatcatggtcattggagcgttgattcaaggtctttctgtgaatgtcgcgcagtacatcattgcccgtctgattctggggtttggtatcccaacctgcatcgtctctgcttcttctcttatcggcgagctttcatacccgaaagagcgacctgtcctgacatcgctgttcaacgtatcgtacttcatcgggcagctaacagcggccggtataacatttgggacaaacagcatcctcagcaactactcatggcgcattccttcctggctccaaatggtgccgtcgctgttccaaattgccttcatcttcttcattcccgagtctccccgctggctcatcacgagggaccggggagatgaggcatttgatattctggcgaagtatcatgctgagggtgatagagagtcagagtttgtcaaggcagagtatgcccagttgcagactacgattgaaatcgaacttgcgcattcaaagagatcgtggaaggatcttttctcgacgagcggtatgagaagacgtgttttgatcagtactatgcttgggctt

SEQ ID NO: 4662 - DNA, 1473 bp, Muscodor strobelii
  misc_feature: SGI cDNA ID NO. 561253
  misc_feature: Encodes the peptide sequence at SEQ ID NO 4663
atgtggtccctcaaagcgtcagacttcgagacccgatactcctcgaatccgaatggatctaacgaacaacgacctttcaacggtcttcatcataaacacgtatctatagacaaaatgactgcccaccaagtcttccacgggaccataatccactccctaggtctcaacaacctcgagatcatagaagatggcctcctcatcgtaacaccagacggcatcataaaccaagttctcaaatccgtacccaaagactccatcgaagatcaactaatagccctcaaagccctcaatctcccctacaaaataactcatctctcacgaggcgaatttctcatcccaggattcgtagacacacataaccacgcgccacaatgggcgatgcgggggttagggcagagcatgcatatcctcgactggctgtctaacgtgacgtttccgaatgaagcgaagttcaaagatgaggagtatgcgagaagggtttatggtagtgctattgaggggttcttacagcaggggatcacgacggcgagttattatgggagtatgcatatggatgctacgaagatactggctgagttgtgtttggaaaaggggcagagggcacttgtggggaagtgtaatatgagtcgggaggcgccggattattatagggatgagagtgttgagacttcgatacgggatacgaaagagtgtatcgagcacatccagacactagatcctaacggaacgcttgtcaaatatgtcattacgccacgtttcgcaatcacatgtgaagacgagctactagcaggattaggagagatagcaaagcagaacccagagctgatgattcaaacacacttcaacgaagccgagcaagaaatgtacttcacgaagacactcttccccgggttcgaaaacgaagtcgatctctatgagcattttggactactcaccaaaagatcgattctcgcacattgttgtttcatgaccgagtacgaattaaacaaacttcaagaggtggattgtggagttgcgcattgtcccgtgagcaatatgacagttggcggagggttcatggcagcgcctgtccgcgagttcttgaggaggggcatcaaagttgggctaggcacggacagcggtggtgggttctcgagtagtatactcgatgcgatgagacaggcgcttgttgcgtcgaattcgagagaggtcacgagtaaaggtgcggataaggggctggcgattgaggagctgttttacctcgctacactcggcggagcgcaggtttgttgtcttgataacaagattgggaattttgaggtggggaaggagtttgatgccgtggttgttgggcggaattcggggaggggcgttatgactatgattgaggatgaggattcgacgcggactatctttgataagtttattatgacgggcgatgacaggaatattcggcaggtttttgtccgtgggcggtcggttaagagggattag

SEQ ID NO: 4663 - protein, 490 aa, Muscodor strobelii
  misc_feature: SGI Peptide ID NO. 561253
  misc_feature (110)..(444): Pfam Id: PF01979 Pfam Desc: Amidohydrolase family
  misc_feature (110)..(442): Pfam Id: PF07969 Pfam Desc: Amidohydrolase family
  misc_feature (43)..(488): NCBI GI: 116200229 Blast Desc: CHGG_08270 [Chaetomium globosum CBS 148.51] gi|88179549|gb|EAQ87017.1| CHGG_08270 [Chaetomium globosum CBS 148.51]
  misc_feature (43)..(488): NCBI GI: 85110286 Blast Desc: NCU09621 [Neurospora crassa OR74A] gi|16944447|emb|CAB91408.2| related to guanine deaminase [Neurospora crassa] gi|28925063|gb|EAA34149.1| NCU09621 crassa
  misc_feature (43)..(488): NCBI GI: 171689856 Blast Desc: protein product [Podospora anserina] gi|170944890|emb|CAP71001.1| protein product [Podospora anserina]
  misc_feature (45)..(487): NCBI GI: 256728553 Blast Desc: NECHADRAFT_85963 [Nectria haematococca mpVI 77-13-4]
  misc_feature (44)..(488): NCBI GI: 154297374 Blast Desc: BC1G_12091 [Botryotinia fuckeliana B05.10] gi|150858596|gb|EDN33788.1| BC1G_12091 [Botryotinia fuckeliana B05.10]
  misc_feature (44)..(488): NCBI GI: 156062320 Blast Desc: SS1G_01276 [Sclerotinia sclerotiorum 1980] gi|154696612|gb|EDN96350.1| SS1G_01276 [Sclerotinia sclerotiorum 1980]
  misc_feature (45)..(488): NCBI GI: 255946513 Blast Desc: Pc20g15520 [Penicillium chrysogenum Wisconsin 54-1255] gi|211588759|emb|CAP86881.1| Pc20g15520 [Penicillium chrysogenum Wisconsin 54-1255]
  misc_feature (39)..(487): NCBI GI: 46113757 Blast Desc: FG02941.1 [Gibberella zeae PH-1]
  misc_feature (39)..(487): NCBI GI: 67541290 Blast Desc: AN6815.2 [Aspergillus nidulans FGSC A4] gi|40739024|gb|EAA58214.1| AN6815.2 [Aspergillus nidulans FGSC A4] gi|259480410|tpe|CBF71516.1| TPA: guanine deaminase, nidulans
  misc_feature (45)..(488): NCBI GI: 242772405 Blast Desc: guanine deaminase, [Talaromyces stipitatus ATCC 10500] gi|218721652|gb|EED21070.1| guanine deaminase, [Talaromyces stipitatus ATCC 10500]
  misc_feature (43)..(488): SWISSPROT Homolog: EC 3.5.4.3 Guanine deaminase
MWSLKASDFETRYSSNPNGSNEQRPFNGLHHKHVSIDKMTAHQVFHGTIIHSLGLNNLEIIEDGLLIVTPDGIINQVLKSVPKDSIEDQLIALKALNLPYKITHLSRGEFLIPGFVDTHNHAPQWAMRGLGQSMHILDWLSNVTFPNEAKFKDEEYARRVYGSAIEGFLQQGITTASYYGSMHMDATKILAELCLEKGQRALVGKCNMSREAPDYYRDESVETSIRDTKECIEHIQTLDPNGTLVKYVITPRFAITCEDELLAGLGEIAKQNPELMIQTHFNEAEQEMYFTKTLFPGFENEVDLYEHFGLLTKRSILAHCCFMTEYELNKLQEVDCGVAHCPVSNMTVGGGFMAAPVREFLRRGIKVGLGTDSGGGFSSSILDAMRQALVASNSREVTSKGADKGLAIEELFYLATLGGAQVCCLDNKIGNFEVGKEFDAVVVGRNSGRGVMTMIEDEDSTRTIFDKFIMTGDDRNIRQVFVRGRSVKRD

SEQ ID NO: 4664 - DNA, 4140 bp, Muscodor strobelii
  misc_feature: SGI EST ID NO. CUFF.11880.4
  misc_feature: Variant of the nucleotide sequence at SEQ ID NO 4662
cgacgagacaagcgttcattcttgactgctcaagctaaccataatcatcatctcagtcatctcatattatctcggcgatatcctgcaaatgattggacacgaaagctctgtcttcaagcagaagatcaacgtagcgaccgcatcaaacagtctcgtttggggcacagtcgcagcctcactcgtaacacgattccgccgccgtgccatgtacctcacatgcaccattggtctgctcctcgtgtacattggctggaccatcagcatgaagtacgcgatcgacgctaagaatgccggaatcccgaacgcggccgcaggtggtgttgtgctgttcttcatttttgcttatagcccagtatataacatagggtacaatgctcttacctatacctacatggtcgaaatctggccatacgccgagcgctctcgaggtattgcattcttccagctctggggcagactcgcatccttcttcacgacttttgtgaatcctatcggattacaaaactcgagttggcggtatctcatctcttatgtcgtgttcttggcgtatgagatcgtgtttgtctacttcatgttcccggagacattcggtagaacactagaagaacttgctttcctgtttgaggacaaggctcttgcggatgaggctgttcatgctgttgagaaggttgttgggcaccacgagggggatggcgcagagaggcggagcagatcgtctgtcgaggggaaggagacagcttagaagaaagatagtgttaaaactagaatttggtagtagttggggtatggggatatggattataaatgtattgcttacaaatgtaggcacttcatatcattcccagcgagaggcatgcagtctttaggaagatacccttgttggcctatcccccaacccttgactacatctcatgtcccgcatcgcaataacccaatactcattatgcaaggacttgaaagatgtcaggcaacaaggatgcatctgcgtctagttgcgtacttcgaaagaaacgtggcgattgcgtgatagtcatgccatgtaccggcccccataccccggccgcgtgaccgggccggagcttcccacttttggcggcattattgcggagtactaggcttcttattcaacggcagcgtgctctacatcttactctgcgtcacattctactattgtgtcgttcccgtaaatagtctgttggtctaccattacaagtgacacttactcgcgctaataagcagagccgacatcacgtccgcgtgaaaagatgtggtccctcaaagcgtcagacttcgagacccgatactcctcgaatccgaatggatctgtaagttacacggcgtatatatagacgattgaagatgaacacgaagatcccattccgcagaacgatacatgcaagcctgacagctggccgaccctccatctgacagctgaatcaagtcacaccttatactccctcatctcacccagaacgaacaacgacctttcaacggtcttcatcataaacacgtatctatagacaaaatgactgcccaccaagtcttccacgggaccataatccactccctaggtctcaacaacctcgagatcatagaagatggcctcctcatcgtaacaccagacggcatcataaaccaagttctcaaatccgtacccaaagactccatcgaagatcaactaatagccctcaaagccctcaatctcccctacaaaataactcatctctcacgaggcgaatttctcatcccaggattcgtagacacacataaccacgcgccacaatgggcgatgcgggggttagggcagagcatgcatatcctcgactggctgtctaacgtgacgtttccgaatgaagcgaagttcaaagatgaggagtatgcgagaagggtttatggtagtgctattgaggggttcttacagcaggggatcacgacggcgagttattatgggagtatgcatatggatgctacgaagatactggctgagttgtgtttggaaaaggggcagagggcacttgtggggaagtgtaatatgagtcgggaggcgccggattattatagggatgagagtgttgagacttcgatacgggatacgaaagagtgtatcgagcacatccagacactagatcctaacggaacgcttgtcaaatatgtcattacgccacgtttcgcaatcacatgtgaagacgagctactagcaggattaggagagatagcaaagcagaacccagagctgatgattcaaacacacttcaacgaagccgagcaagaaatgtacttcacgaagacactcttccccgggttcgaaaacgaagtcgatctctatgagcattttggactactcaccaaaagatcgattctcgcacattgttgtttcatgaccgagtacgaattaaacaaacttcaagaggtggattgtggagttgcgcattgtcccgtgagcaatatgacagttggcggagggttcatggcagcgcctgtccgcgagttcttgaggaggggcatcaaagttgggctaggcacggacagcggtggtgggttctcgagtagtatactcgatgcgatgagacaggcgcttgttgcgtcgaattcgagagaggtcacgagtaaaggtgcggataaggggctggcgattgaggagctgttttacctcgctacactcggcggagcgcaggtttgttgtcttgataacaagattgggaattttgaggtggggaaggagtttgatgccgtggttgttgggcggaattcggggaggggcgttatgactatgattgaggatgaggattcgacgcggactatctttgataagtttattatgacgggcgatgacaggaatattcggcaggtttttgtccgtgggcggtcggttaagagggattagagggagggtttgtatcacgctgcgacttagacttaaaggagataagaattgttctcgtctagaaatgtttttatagcctcgagtggtatgcctcgacgcattcccgtctcatcgtcccaagatgaatggagtccaactaaacgcccggtcgtaacatcaagcaacggtgctccgctgtgtccccaatatgtccagcagtcatgcattagagcgcctatctcagagttgtcctgaagatcttggcccttggcatagcctcgaaagcgaccagtgctgacgtataagacgtcgtagttcgtcttgatgccctcttgagtagtctccaagtcttcacttcctgggtgtccaatgcaaactagttgtgagttgagagccggagataggccaccaattttaacgaatgggaatgctgtgcttggcgcggtcatccggataggttgagtagtgacaactttgagtagggcgagatcccgtccgtcatcccatgcaatacatcgtgcttttacagcagtaccagacttgaagagaagccagtgatcccgcgtgtaatcaagttccttgcgcgtctcggcgacgcagtgtgaacaagtcaggagaatgccgttcggtgatatgcagaccgctgtacccgcttcatgttgtgcgaatacgagcgtcgcgtctatcatttgactgtgctttgtaaaggacgggggaatggctaaagaatacgattgaagccatctctgcttcttcagcagcgtcttgtggtcttgcacgttaaggccagtgatggtgcgagtgagtacgtcaggtagattatccgcattcccgtttgatggaaagtcatcttttggcttgtccagcagtctctcatgatgatcggatgggggtagtgaagctgtcacggtggctttcgtttgcgatcttgttttccgaggagacattggcatcgaaatatgacgctgtcttgaagaaaagaccgtgaagcccaagaaatgaatagaaacgacctacctaggtcgcaagttcaaaatgaataatatgatatacaaagcaaggaagcagttagacgttgggtcatgtcacgcgtttgaagggaacttggcactgagcgcaccgaggcacacctacaggcatataccagcaaacaacctgaattcgaaaggtcgggcacagtcagtcagatgagccttcattgatatttggcaagacattaagaccatgttcgattcttacttgcgatcaagcaagcgtattagaggtctttctgtttg

SEQ ID NO: 4665 - DNA, 894 bp, Muscodor strobelii
  misc_feature: SGI cDNA ID NO. 561254
  misc_feature: Encodes the peptide sequence at SEQ ID NO 4666
atgtctcctcggaaaacaagatcgcaaacgaaagccaccgtgacagcttcactacccccatccgatcatcatgagagactgctggacaagccaaaagatgactttccatcaaacgggaatgcggataatctacctgacgtactcactcgcaccatcactggccttaacgtgcaagaccacaagacgctgctgaagaagcagagatggcttcaatcgtattctttagccattcccccgtcctttacaaagcacagtcaaatgatagacgcgacgctcgtattcgcacaacatgaagcgggtacagcggtctgcatatcaccgaacggcattctcctgacttgttcacactgcgtcgccgagacgcgcaaggaacttgattacacgcgggatcactggcttctcttcaagtctggtactgctgtaaaagcacgatgtattgcatgggatgacggacgggatctcgccctactcaaagttgtcactactcaacctatccggatgaccgcgccaagcacagcattcccattcgttaaaattggtggcctatctccggctctcaactcacaactagtttgcattggacacccaggaagtgaagacttggagactactcaagagggcatcaagacgaactacgacgtcttatacgtcagcactggtcgctttcgaggctatgccaagggccaagatcttcaggacaactctgagataggcgctctaatgcatgactgctggacatattggggacacagcggagcaccgttgcttgatgttacgaccgggcgtttagttggactccattcatcttgggacgatgagacgggaatgcgtcgaggcataccactcgaggctataaaaacatttctagacgagaacaattcttatctcctttaa

SEQ ID NO: 4666 - protein, 297 aa, Muscodor strobelii
  misc_feature: SGI Peptide ID NO. 561254
  misc_feature (5)..(289): NCBI GI: 171676842 Blast Desc: protein product [Podospora anserina] gi|170936488|emb|CAP61148.1| protein product [Podospora anserina]
  misc_feature (2)..(291): NCBI GI: 256725725 Blast Desc: NECHADRAFT_44085 [Nectria haematococca mpVI 77-13-4]
  misc_feature (1)..(272): NCBI GI: 261359221 Blast Desc: AT hook motif family protein [Verticillium albo-atrum VaMs.102]
  misc_feature (4)..(291): NCBI GI: 46116516 Blast Desc: FG04100.1 [Gibberella zeae PH-1]
  misc_feature (90)..(289): NCBI GI: 116201279 Blast Desc: CHGG_08524 [Chaetomium globosum CBS 148.51] gi|88177042|gb|EAQ84510.1| CHGG_08524 [Chaetomium globosum CBS 148.51]
  misc_feature (49)..(291): NCBI GI: 154312595 Blast Desc: BC1G_05900 [Botryotinia fuckeliana B05.10] gi|150850001|gb|EDN25194.1| BC1G_05900 [Botryotinia fuckeliana B05.10]
  misc_feature (88)..(292): NCBI GI: 238844740 Blast Desc: AT hook domain-containing protein family protein [Microsporum canis CBS 113480]
  misc_feature (88)..(296): NCBI GI: 225562282 Blast Desc: AT hook domain-containing protein family protein [Ajellomyces capsulatus G186AR]
  misc_feature (88)..(296): NCBI GI: 240279182 Blast Desc: AT hook domain-containing protein family protein [Ajellomyces capsulatus H143]
  misc_feature (43)..(289): NCBI GI: 226282404 Blast Desc: AT hook motif family protein [Paracoccidioides brasiliensis Pb01]
MSPRKTRSQTKATVTASLPPSDHHERLLDKPKDDFPSNGNADNLPDVLTRTITGLNVQDHKTLLKKQRWLQSYSLAIPPSFTKHSQMIDATLVFAQHEAGTAVCISPNGILLTCSHCVAETRKELDYTRDHWLLFKSGTAVKARCIAWDDGRDLALLKVVTTQPIRMTAPSTAFPFVKIGGLSPALNSQLVCIGHPGSEDLETTQEGIKTNYDVLYVSTGRFRGYAKGQDLQDNSEIGALMHDCWTYWGHSGAPLLDVTTGRLVGLHSSWDDETGMRRGIPLEAIKTFLDENNSYLL

SEQ ID NO: 4667 - DNA, 5224 bp, Muscodor strobelii
  misc_feature: SGI EST ID NO. CUFF.11881.1
  misc_feature: Variant of the nucleotide sequence at SEQ ID NO 4665
caaacagaaagacctctaatacgcttgcttgatcgcaagtaagaatcgaacatggtcttaatgtcttgccaaatatcaatgaaggctcatctgactgactgtgcccgacctttcgaattcaggttgtttgctggtatatgcctgtaggtgtgcctcggtgcgctcagtgccaagttcccttcaaacgcgtgacatgacccaacgtctaactgcttccttgctttgtatatcatattattcattttgaacttgcgacctaggtaggtcgtttctattcatttcttgggcttcacggtcttttcttcaagacagcgtcatatttcgatgccaatgtctcctcggaaaacaagatcgcaaacgaaagccaccgtgacagcttcactacccccatccgatcatcatgagagactgctggacaagccaaaagatgactttccatcaaacgggaatgcggataatctacctgacgtactcactcgcaccatcactggccttaacgtgcaagaccacaagacgctgctgaagaagcagagatggcttcaatcgtattctttagccattcccccgtcctttacaaagcacagtcaaatgatagacgcgacgctcgtattcgcacaacatgaagcgggtacagcggtctgcatatcaccgaacggcattctcctgacttgttcacactgcgtcgccgagacgcgcaaggaacttgattacacgcgggatcactggcttctcttcaagtctggtactgctgtaaaagcacgatgtattgcatgggatgacggacgggatctcgccctactcaaagttgtcactactcaacctatccggatgaccgcgccaagcacagcattcccattcgttaaaattggtggcctatctccggctctcaactcacaactagtttgcattggacacccaggaagtgaagacttggagactactcaagagggcatcaagacgaactacgacgtcttatacgtcagcactggtcgctttcgaggctatgccaagggccaagatcttcaggacaactctgagataggcgctctaatgcatgactgctggacatattggggacacagcggagcaccgttgcttgatgttacgaccgggcgtttagttggactccattcatcttgggacgatgagacgggaatgcgtcgaggcataccactcgaggctataaaaacatttctagacgagaacaattcttatctcctttaagtctaagtcgcagcgtgatacaaaccctccctctaatccctcttaaccgaccgcccacggacaaaaacctgccgaatattcctgtcatcgcccgtcataataaacttatcaaagatagtccgcgtcgaatcctcatcctcaatcatagtcataacgcccctccccgaattccgcccaacaaccacggcatcaaactccttccccacctcaaaattcccaatcttgttatcaagacaacaaacctgcgctccgccgagtgtagcgaggtaaaacagctcctcaatcgccagccccttatccgcacctttactcgtgacctctctcgaattcgacgcaacaagcgcctgtctcatcgcatcgagtatactactcgagaacccaccaccgctgtccgtgcctagcccaactttgatgcccctcctcaagaactcgcggacaggcgctgccatgaaccctccgccaactgtcatattgctcacgggacaatgcgcaactccacaatccacctcttgaagtttgtttaattcgtactcggtcatgaaacaacaatgtgcgagaatcgatcttttggtgagtagtccaaaatgctcatagagatcgacttcgttttcgaacccggggaagagtgtcttcgtgaagtacatttcttgctcggcttcgttgaagtgtgtttgaatcatcagctctgggttctgctttgctatctctcctaatcctgctagtagctcgtcttcacatgtgattgcgaaacgtggcgtaatgacatatttgacaagcgttccgttaggatctagtgtctggatgtgctcgatacactctttcgtatcccgtatcgaagtctatcatatagtcattgtcagtgaatatttagtctcgatttgaattagtggccaacacgagtttgtgctcctctccccggatgtacaaacaggctgtctccgaaaaatatctggacaccgaagaaggacgaacctcaaaaaagtaagggaccgtctcaagtactcacctcaacactctcatccctataataatccggcgcctcccgactcatattacacttccccacaagtgccctctgccccttttccaaacacaactcagccagtatcttcgtagcatccatatgcatactcccataataactcgccgtcgtgatcccctgctgtaagaacccctcaatagcactaccataaacccttctcgcatactcctcatctttgaacttcgcttcattcggaaacgtcacgttagacagccagtcgaggatatgcatgctctgccctaacccccgcatcgcccattgtggcgcgtggttatgtgtgtctacgaatcctgggatgagaaattcgcctcgtgagagatgagttattttgtaggggagattgagggctttgagggctattagttgatcttcgatggagtctttgggtacggatttgagaacttggtttatgatgccgtctggtgttacgatgaggaggccatcttctatgatctcgaggttgttgagacctagggagtggattatggtcccgtggaagacttggtgggcagtcattttgtctatagatacgtgtttatgatgaagaccgttgaaaggtcgttgttcgttctgggtgagatgagggagtataaggtgtgacttgattcagctgtcagatggagggtcggccagctgtcaggcttgcatgtatcgttctgcggaatgggatcttcgtgttcatcttcaatcgtctatatatacgccgtgtaacttacagatccattcggattcgaggagtatcgggtctcgaagtctgacgctttgagggaccacatcttttcacgcggacgtgatgtcggctctgcttattagcgcgagtaagtgtcacttgtaatggtagaccaacagactatttacgggaacgacacaatagtagaatgtgacgcagagtaagatgtagagcacgctgccgttgaataagaagcctagtactccgcaataatgccgccaaaagtgggaagctccggcccggtcacgcggccggggtatgggggccggtacatggcatgactatcacgcaatcgccacgtttctttcgaagtacgcaactagacgcagatgcatccttgttgcctgacatctttcaagtccttgcataatgagtattgggttattgcgatgcgggacatgagatgtagtcaagggttgggggataggccaacaagggtatcttcctaaagactgcatgcctctcgctgggaatgatatgaagtgcctacatttctgtctccttcccctcgacagacgatctgctccgcctctctgcgccatccccctcgtggtgcccaacaaccttctcaacagcatgaacagcctcatccgcaagagccttgtcctcaaacactgcatcgataatattagccatcggatcaactcgccagaaaatggaaccgaggaaggagcgagaagatagatatgaggcacaacttacggaaagcaagttcttctagtgttctaccgaatgtctccgggaacatgaagtagacaaacacgatctcatacgccaagaacacgacataagagatgagataccgccaactcgagttttgtaatccgataggattcacaaaagtcgtgaagaaggatgcgagtctgccccagagctggaagaatgcaatacctcgagagcgctcggcgtatggccagatttcgaccatgtaggctgtggcacattatcagtgagaagttctatatgccttccatacgtgctgtctgtctagagtgaatgtatagataattgaggggcaaagcttactataggtaagagcattgtaccctatgttatatactgggctataagcaaaaatgaagaacagcacaacaccacctgcggccgcgttcgggattccggcattcttagcgtcgatcgcgtacttcatgctgatggtccagccaatgtacacgaggagcagaccaatggtgcatgtgaggtacatggcacggcggcggaatcgtgttacgagtgaggctgcgactgtgccccaaacgagactgtttgatgcggtcttgaagattgtcagtttgtgtcagtggaaggggaaagtagagaaaaatggataaggaggagtggaaacgtaccgctacgttgatcttctgcttgaagacagagctttcgtgtccaatcatttgcaggatatcgccgagataatatgagatgactgagatgatgattatggttagcttgagcagtcaagaatgaacgcttgtctcgtcgaccttctactcagacaccaattgtggtagaatttccgaaaacacgtacgtgtattgccagaccactgcattaaacaagctcgttagtatctcctactaagtgagacttctcaactcgacgtgttgaactaacctgtgtgaaaagcccaagcatagtactgatcaaaacacgtcttctcataccgctcgtcgagaaaagatccttccacgatctctttgaatgcgcaagttcgatttcaatcgtagtctgcaactgggcatactctgccttgacaaactctgactctctatcaccctcagcatgatacttcgccagaatatcaaatgcctcatctccccggtccctcgtgatgagccagcggggagactcgggaatgaagaagatgaaggcaatttggaacagcgacggcaccatttggagccaggaaggaatgcgccatgagtagttgctgaggatgctgtttgtcccaaatgttataccggccgctgttagctgcccgatgaagtacgatacgttgaacagcgatgtcaggacaggtcgctctttcgggtatgaaagctcgccgataagagaagaagcagagacgatgcaggttgggataccaaaccccagaatcagacgggcaatgatgtactgcgcgactgcattgaatcgacgtcgttagtttacttcctcgagcacgtggcttctttataccaagaacgatatagtacataccattcacagaaagaccttgaatcaac

SEQ ID NO: 4668 - DNA, 1971 bp, Muscodor strobelii
  misc_feature: SGI cDNA ID NO. 561255
  misc_feature: Reduced expression when VOC is produced
  misc_feature: Encodes the peptide sequence at SEQ ID NO 4669
atggcgcccgaagaggctacgcagcagccccccgcggcgggtgctgaaggcgaccagcaagcgaacctgcacaaggaccccgtcactggcgagatgatctccaagtcagagctcaagagacgtgagaagcagcgcaagacggctgaggagaaggctaagaaggctgaggccgccaaggccaatgctcccgccaagcccaagaagaaggacgaggaggaggaactgactcccaaccaatacttcgagcttcgatccagagccatccaggcccagctcaagggcttcaaggcatccgagaaccccaaccccttccctcacaagttccccgcccccaagcccaacgatgcttcctctccagctaccgacgccgccaccgacgactcccagatcgctcccctcaccaagctcaccaagatcgccgacttccacaacaagtatgcccacctcaagtccggcgagtccctcaccgatgtcgagatctacgtcggtgtccgcatcatggcccagcgatccgccggcgctaatcttcggttcttggaatgcaaggccgagggtgtcaccgtccagatcatgtgcgaggccaatgccaaggaggccgacggtagcgatatcaagggcgcacccttccttcagcaacaccagaatctgcgacgaggagatgttatcggtgtgcgaggttatcccggcaggacacagcccaagagacgtgatgagggagagctgagtatcttcgctcgcgaggtcactcttctcacgccctgcttgcaccaactgccctccgcccacttcggctttggtaagggaaagataaagggagagaacaaggagctgcgttaccgccagcgatatctcgacctgatcatgaacgatactacgcgagagatcttcatctcgagggccaagatcatcggcgggatccgtcaattcctgaacgagcgcgacttcctcgaggtccagacccccatgatgaataaaattgctggaggtgctacagcgcgaccatttgttacgcatcacaacgatttgaacatggaactctacatgagaattgcccctgagttatacctcaagcaattggttgtaggtggtctggagagagtatacgagatcggacgacagttccgtaacgaagatatcgatttgacgcacaaccccgagttcaccacaatggagttctattgtgcttacttcgatatgtgggacgttatgaagttgactgaggagatggtcaagtctgtcgtgaggggcgtcactggtggttctcttgtcactacttacacgagccaagatggaactgagcataccatcgactgggaaggtgacggatgggacgaggtcaacaagaagaagcaatggcgcagacttgatatgatacccgaactggagaaggccactggaaccaagttcccgcctgcagaccagtttcacaccgatgagagtctcgagttcttcaaggatctcctgaagaagcagaagcttgactgctctccgccactgacggcatctcgaatgattgacaagatggtcggcgagtatatcgagtcccagtgtatcagccctgctttcattatcaatcaccccgaaattatgtcgccactggccaagtatcacagaagccagcccggcttgaccgagcgattcgaggctttcgtttgcaccaaggagatctgcaacgcctacacagagttgaacgacccattcgagcagcgagccagattcgaagagcaggccaaggacaaggccaagggtgatctcgaggctcaggctgttgatgagactttctgccaggctctcgagtacggtcttccaccgaccggcggtttcggtttgggtatcgaccgtttgacgatgttcttgacgaacaactacagtatcaaggaagttttgaccttccccatgatgaaggatgagcccagcgcccccagtaaccagactatggcattaccaatacatcctcaggagtctgtgtaa

SEQ ID NO: 4669 - protein, 656 aa, Muscodor strobelii
  misc_feature: SGI Peptide ID NO. 561255
  misc_feature (160)..(251): Pfam Id: PF01336 Pfam Desc: OB-fold nucleic acid binding domain
  misc_feature (274)..(636): Pfam Id: PF00152 Pfam Desc: tRNA synthetases class II (D, K and N)
  misc_feature (6)..(656): NCBI GI: 169612822 Blast Desc: SNOG_09538 [Phaeosphaeria nodorum SN15] gi|160702592|gb|EAT82803.2| SNOG_09538 [Phaeosphaeria nodorum SN15]
  misc_feature (1)..(656): NCBI GI: 189210902 Blast Desc: lysyl-tRNA synthetase [Pyrenophora tritici-repentis Pt-1C-BFP] gi|187977875|gb|EDU44501.1| lysyl-tRNA synthetase [Pyrenophora tritici-repentis Pt-1C-BFP]
  misc_feature (8)..(641): NCBI GI: 119193865 Blast Desc: lysyl-tRNA synthetase, cytoplasmic [Coccidioides immitis RS] gi|240105541|gb|EER23734.1| Lysyl-tRNA synthetase, [Coccidioides posadasii C735 delta SOWgp]
  misc_feature (1)..(640): NCBI GI: 238837971 Blast Desc: lysyl-tRNA synthetase [Microsporum canis CBS 113480]
  misc_feature (21)..(653): NCBI GI: 115398990 Blast Desc: lysyl-tRNA synthetase [Aspergillus terreus NIH2624] gi|114191967|gb|EAU33667.1| lysyl-tRNA synthetase [Aspergillus terreus NIH2624]
  misc_feature (9)..(639): NCBI GI: 226282879 Blast Desc: lysyl-tRNA synthetase [Paracoccidioides brasiliensis Pb01]
  misc_feature (21)..(647): NCBI GI: 121699116 Blast Desc: lysyl-tRNA synthetase [Aspergillus clavatus NRRL 1] gi|119396058|gb|EAW06490.1| lysyl-tRNA synthetase [Aspergillus clavatus NRRL 1]
  misc_feature (21)..(653): NCBI GI: 169769871 Blast Desc: [Aspergillus oryzae RIB40] gi|238487798|ref|XP_002375137.1| lysyl-tRNA synthetase [Aspergillus flavus NRRL3357] gi|83767264|dbj|BAE57403.1| protein
  misc_feature (9)..(639): NCBI GI: 226288139 Blast Desc: lysyl-tRNA synthetase [Paracoccidioides brasiliensis Pb18]
  misc_feature (9)..(639): NCBI GI: 225679117 Blast Desc: lysyl-tRNA synthetase [Paracoccidioides brasiliensis Pb03]
  misc_feature (26)..(640): SWISSPROT Homolog: EC 6.1.1.6 Lysine--tRNA ligase
  misc_feature: Useful for introducing or modulating the production of volatile compounds
MAPEEATQQPPAAGAEGDQQANLHKDPVTGEMISKSELKRREKQRKTAEEKAKKAEAAKANAPAKPKKKDEEEELTPNQYFELRSRAIQAQLKGFKASENPNPFPHKFPAPKPNDASSPATDAATDDSQIAPLTKLTKIADFHNKYAHLKSGESLTDVEIYVGVRIMAQRSAGANLRFLECKAEGVTVQIMCEANAKEADGSDIKGAPFLQQHQNLRRGDVIGVRGYPGRTQPKRRDEGELSIFAREVTLLTPCLHQLPSAHFGFGKGKIKGENKELRYRQRYLDLIMNDTTREIFISRAKIIGGIRQFLNERDFLEVQTPMMNKIAGGATARPFVTHHNDLNMELYMRIAPELYLKQLVVGGLERVYEIGRQFRNEDIDLTHNPEFTTMEFYCAYFDMWDVMKLTEEMVKSVVRGVTGGSLVTTYTSQDGTEHTIDWEGDGWDEVNKKKQWRRLDMIPELEKATGTKFPPADQFHTDESLEFFKDLLKKQKLDCSPPLTASRMIDKMVGEYIESQCISPAFIINHPEIMSPLAKYHRSQPGLTERFEAFVCTKEICNAYTELNDPFEQRARFEEQAKDKAKGDLEAQAVDETFCQALEYGLPPTGGFGLGIDRLTMFLTNNYSIKEVLTFPMMKDEPSAPSNQTMALPIHPQESV

SEQ ID NO: 4670 - DNA, 2458 bp, Muscodor strobelii
  misc_feature: SGI EST ID NO. CUFF.11847.0
  misc_feature: Variant of the nucleotide sequence at SEQ ID NO 4668
cacagcccgcgtcgcagcccgtgagtcaaatctccgacccgcggtgtcagtctgtgctgttgactcgattttatccgagttgatggtccgttcgtgtgtcatatccatattcaaatacgtcagtgacaggatcacatcacttctaagcaaattgccattctcctcgcaattaccatcgaccatggcgcccgaagaggctacgcagcagccccccgcggcgggtgctgaaggcgaccagcaagcgaacctgcacaaggaccccgtcactggcgagatgatctccaagtcagagctcaagagacgtgagaagcagcgcaagacggctgaggagaaggctaagaaggctgaggccgccaaggccaatgctcccgccaagcccaagaagaaggacgaggaggaggaactgactcccaaccaatacttcgagcttcgatccagagccatccaggcccagctcaagggcttcaaggcatccgagaaccccaaccccttccctcacaagttccccgcccccaagcccaacgatgcttcctctccagctaccgacgccgccaccgacgactcccagatcgctcccctcaccaagctcaccaagatcgccgacttccacaacaagtatgcccacctcaagtccggcgagtccctcaccgatgtcgagatctacgtcggtgtccgcatcatggcccagcgatccgccggcgctaatcttcggttcttggaatgcaaggccgagggtgtcaccgtccagatcatgtgcgaggccaatgccaaggaggccgacggtagcgatatcaagggcgcacccttccttcagcaacaccagaatctgcgacgaggagatgttatcggtgtgcgaggttatcccggcaggacacagcccaagagacgtgatgagggagagctgagtatcttcgctcgcgaggtcactcttctcacgccctgcttgcaccaactgccctccgcccacttcggctttggtaagggaaagataaagggagagaacaaggagctgcgttaccgccagcgatatctcgacctgatcatgaacgatactacgcgagagatcttcatctcgagggccaagatcatcggcgggatccgtcaattcctgaacgagcgcgacttcctcgaggtccagacccccatgatgaataaaattgctggaggtgctacagcgcgaccatttgttacgcatcacaacgatttgaacatggaactctacatgagaattgcccctgagttatacctcaagcaattggttgtaggtggtctggagagagtatacgagatcggacgacagttccgtaacgaagatatcgatttgacgcacaaccccgagttcaccacaatggagttctattgtgcttacttcgatatgtgggacgttatgaagttgactgaggagatggtcaagtctgtcgtgaggggcgtcactggtggttctcttgtcactacttacacgagccaagatggaactgagcataccatcgactgggaaggtgacggatgggacgaggtcaacaagaagaagcaatggcgcagacttgatatgatacccgaactggagaaggccactggaaccaagttcccgcctgcagaccagtttcacaccgatgagagtctcgagttcttcaaggatctcctgaagaagcagaagcttgactgctctccgccactgacggcatctcgaatgattgacaagatggtcggcgagtatatcgagtcccagtgtatcagccctgctttcattatcaatcaccccgaaattatgtcgccactggccaagtatcacagaagccagcccggcttgaccgagcgattcgaggctttcgtttgcaccaaggagatctgcaacgcctacacagagttgaacgacccattcgagcagcgagccagattcgaagagcaggccaaggacaaggccaagggtgatctcgaggctcaggctgttgatgagactttctgccaggctctcgagtacggtcttccaccgaccggcggtttcggtttgggtatcgaccgtttgacgatgttcttgacgaacaactacagtatcaaggaagttttgaccttccccatgatgaaggatgagcccagcgcccccagtaaccagactatggcattaccaatacatcctcaggagtctgtgtaaagagaacgaagcgatacaaatgaaatgttgatgagaagccataggcatagacgatatgctgcatgatacggaattgaaaatgctcatagagctagctttactgaggtgtgctcctagtagaacgggttaaaaagacactaactcatgtcacgatcatctcccgggagtataattgtgcctcaaaattacgattatcgccatatgcaatgatcccatcgaaaaggttcgtgccagctacaagcgtgaatcatagctttgtgatttcaatctgagccctcttgcaagttggcatactttacaatgagt

SEQ ID NO: 4671 - DNA, 1647 bp, Muscodor strobelii
  misc_feature: SGI cDNA ID NO. 561256
  misc_feature: Elevated expression when VOC is produced
  misc_feature: Encodes the peptide sequence at SEQ ID NO 4672
atgtccggctttgaaattgccggtatagttctgggtgccattcctctggtaatatctgcgattgagcatatccaaacgaacaaaggcaccattggagcgtttctaaatcatcgggatgaactgattaagctgcttcgtaagcttcgaaaccagaggacatatttctacctgaatctaaaatatcttcttctcgaagcacaaattgatgataatccggacctcacagagcaagactgcttcatcattcttcaagacaagcacgccgagaccacgttgagagaccacctgggtccctattacccagtattcttagacgctgttgagcaatatcaaaaatatctcactataattgcgagaaagtgcaagaatttgcaatggccagatggcgctcctaaagatgatttgcgcgtactcctcgaggccaatcgtcctaccaatacatctaaatacgagttcagagagagactgaaattttcaatgagcagaggagtattgaatgaactcgttgatgcactaggtggagaacatctcaccctggagactatcgttaagggcattaaaactcaacaagcacatacatccaaggctccgtcgcaagaggcaacaaagatctcaatctttttaactcaagtttcagaatatgcgacttcgctattcgctgcatcgtatcaggcatgtacgtgttgctgcaggaaaaaccatggagtgtttttggggctccaaaaccgaatccctccatccaatgtcaagcggctggagaagaacacggaacgaggctcaatgggatttgagatagtttttgatctaaatgggcacttgaagcaagcccatgtaaaagcaagcccgtcacacgatatggacgttcagaccattacccgaacaaaacatcaagtctcatttcagaacattcacaatgtaccaactgtcacgatcacagatttgctaggtgcatctgcgacatcaacaaagataatgggaatatgtgacttggtaaatgatgggagtcaggatggattcgcactgggtctgcgtctctccggctcccgtttcgagccggcacatgagttatcacagccacagcgtgaacttgtcacaccgacgagcctagcacaagttttacaacaaatgactttgaagcaacagactttgtgcgcactcgatattgcatcatcgattctccaacttcaacaaacctcttggtccgaccctccttttagcagccataccatgaaatatatacctacgagtagcaatccaacgagaagtcccgtcttgttcattacacaagtaacggagccccgtcttaaggtttgctctctaccggacgcaaaacttacgatcctggagctggcaataatattactggaaatttggcatcataaaacactggagcaatgggtcgatcctgatgattctgcgaaagtgtttgaccctttggaccgtcgcttgcaagcagaaaaatggcttcattggtcaacagaccgggtcgatcccgaatacttctcagtagttgagcaatgcctgcagatgtatgcaggcagaaacttccgctgggatgatgacggattcttgaagaaatactgtgaaaacgtcatattaccactgcggaagttgtgtgacgcatggaatagagttgggagctactag

SEQ ID NO: 4672 - protein, 548 aa, Muscodor strobelii
  misc_feature: SGI Peptide ID NO. 561256
  misc_feature (1)..(544): NCBI GI: 119490807 Blast Desc: NFIA_063640 [Neosartorya fischeri NRRL 181] gi|119411260|gb|EAW21203.1| conserved [Neosartorya fischeri NRRL 181]
  misc_feature (1)..(544): NCBI GI: 115401750 Blast Desc: [Aspergillus terreus NIH2624] gi|114190404|gb|EAU32104.1| [Aspergillus terreus NIH2624]
  misc_feature (2)..(535): NCBI GI: 119177046 Blast Desc: CIMG_07519 [Coccidioides immitis RS]
  misc_feature (2)..(535): NCBI GI: 240107784 Blast Desc: CPC735_044070 [Coccidioides posadasii C735 delta SOWgp]
  misc_feature (1)..(537): NCBI GI: 189190046 Blast Desc: [Pyrenophora tritici-repentis Pt-1C-BFP] gi|187972968|gb|EDU40467.1| [Pyrenophora tritici-repentis Pt-1C-BFP]
  misc_feature (375)..(543): NCBI GI: 171693579 Blast Desc: protein product [Podospora anserina] gi|170946738|emb|CAP73542.1| protein product [Podospora anserina]
  misc_feature (1)..(545): NCBI GI: 116181310 Blast Desc: [Chaetomium globosum CBS 148.51] gi|88185580|gb|EAQ93048.1| [Chaetomium globosum CBS 148.51]
  misc_feature (1)..(537): NCBI GI: 169612237 Blast Desc: SNOG_09237 [Phaeosphaeria nodorum SN15] gi|160702463|gb|EAT83429.2| SNOG_09237 [Phaeosphaeria nodorum SN15]
  misc_feature (1)..(537): NCBI GI: 169615082 Blast Desc: SNOG_10696 [Phaeosphaeria nodorum SN15] gi|111060970|gb|EAT82090.1| SNOG_10696 [Phaeosphaeria nodorum SN15]
  misc_feature (1)..(240): NCBI GI: 225554970 Blast Desc: conserved [Ajellomyces capsulatus G186AR]
  misc_feature: Useful for introducing or modulating the production of volatile compounds
MSGFEIAGIVLGAIPLVISAIEHIQTNKGTIGAFLNHRDELIKLLRKLRNQRTYFYLNLKYLLLEAQIDDNPDLTEQDCFIILQDKHAETTLRDHLGPYYPVFLDAVEQYQKYLTIIARKCKNLQWPDGAPKDDLRVLLEANRPTNTSKYEFRERLKFSMSRGVLNELVDALGGEHLTLETIVKGIKTQQAHTSKAPSQEATKISIFLTQVSEYATSLFAASYQACTCCCRKNHGVFLGLQNRIPPSNVKRLEKNTERGSMGFEIVFDLNGHLKQAHVKASPSHDMDVQTITRTKHQVSFQNIHNVPTVTITDLLGASATSTKIMGICDLVNDGSQDGFALGLRLSGSRFEPAHELSQPQRELVTPTSLAQVLQQMTLKQQTLCALDIASSILQLQQTSWSDPPFSSHTMKYIPTSSNPTRSPVLFITQVTEPRLKVCSLPDAKLTILELAIILLEIWHHKTLEQWVDPDDSAKVFDPLDRRLQAEKWLHWSTDRVDPEYFSVVEQCLQMYAGRNFRWDDDGFLKKYCENVILPLRKLCDAWNRVGSY

SEQ ID NO: 4673 - DNA, 1921 bp, Muscodor strobelii
  misc_feature: SGI EST ID NO. CUFF.11906.1
  misc_feature: Variant of the nucleotide sequence at SEQ ID NO 4671
ttgtctctcatcagcgctccgttgatatctcaatgtttatgccatgaagccaaatcttcagcgacgagggcacattgagagcgatgcgcaaaaatgtccggctttgaaattgccggtatagttctgggtgccattcctctggtaatatctgcgattgagcatatccaaacgaacaaaggcaccattggagcgtttctaaatcatcgggatgaactgattaagctgcttcgtaagcttcgaaaccagaggacatatttctacctgaatctaaaatatcttcttctcgaagcacaaattgatgataatccggacctcacagagcaagactgcttcatcattcttcaagacaagcacgccgagaccacgttgagagaccacctgggtccctattacccagtattcttagacgctgttgagcaatatcaaaaatatctcactataattgcgagaaagtgcaagaatttgcaatggccagatggcgctcctaaagatgatttgcgcgtactcctcgaggccaatcgtcctaccaatacatctaaatacgagttcagagagagactgaaattttcaatgagcagaggagtattgaatgaactcgttgatgcactaggtggagaacatctcaccctggagactatcgttaagggcattaaaactcaacaagcacatacatccaaggctccgtcgcaagaggcaacaaagatctcaatctttttaactcaagtttcagaatatgcgacttcgctattcgctgcatcgtatcaggcatgtacgtgttgctgcaggaaaaaccatggagtgtttttggggctccaaaaccgaatccctccatccaatgtcaagcggctggagaagaacacggaacgaggctcaatgggatttgagatagtttttgatctaaatgggcacttgaagcaagcccatgtaaaagcaagcccgtcacacgatatggacgttcagaccattacccgaacaaaacatcaagtctcatttcagaacattcacaatgtaccaactgtcacgatcacagatttgctaggtgcatctgcgacatcaacaaagataatgggaatatgtgacttggtaaatgatgggagtcaggatggattcgcactgggtctgcgtctctccggctcccgtttcgagccggcacatgagttatcacagccacagcgtgaacttgtcacaccgacgagcctagcacaagttttacaacaaatgactttgaagcaacagactttgtgcgcactcgatattgcatcatcgattctccaacttcaacaaacctcttggtccgaccctccttttagcagccataccatgaaatatatacctacgagtagcaatccaacgagaagtcccgtcttgttcattacacaagtaacggagccccgtcttaaggtttgctctctaccggacgcaaaacttacgatcctggagctggcaataatattactggaaatttggcatcataaaacactggagcaatgggtcgatcctgatgattctgcgaaagtgtttgaccctttggaccgtcgcttgcaagcagaaaaatggcttcattggtcaacagaccgggtcgatcccgaatacttctcagtagttgagcaatgcctgcagatgtatgcaggcagaaacttccgctgggatgatgacggattcttgaagaaatactgtgaaaacgtcatattaccactgcggaagttgtgtgacgcatggaatagagttgggagctactagacatgatttgctcagacatcagatagctttactggtattgaggcgttaaacttctcgagtatgatatttggagataaaaataaagaaagaaaaaggacttggcgattcagacgaacatcggacgtagaaagttctccgctcgtaggaacatcccattttggctcatcaatggagaatgaga

SEQ ID NO: 4674 - DNA, 813 bp, Muscodor strobelii
  misc_feature: SGI cDNA ID NO. 561257
  misc_feature: Encodes the peptide sequence at SEQ ID NO 4675
atgcttgaaatcctcagcaagctaggatacgacaagctcaagtactggggctttagctatggaacattgctaggaggcgtgtccgcttctctataccctgacagagtcgagagacttgtgagcgatggcaatgttgactatgaagagtggcatcatcagaatcacatcaatttcttgcgagatgcggacaaggtcatgggtgcattcttcaacttttgctatgatactggcccgaatagctgcgatttctatgctgaaatcccggcgcagatcaaagagcggctgttgaatcttcttaggaacatacgtgcccgtccaattatagttgcccctgaagatggcttgcctggcacaggaccggatatgccacagttaatcacttggtcgcatgtccgccgacccacttcagctgctctttacaggccaatcttgatgttccaacaatttgcttccgtatcagccgcactggaaagaggcgatgggcgtcttttctataacataatgcaatttaatgcagagatacctcccatgtgctcagtagatggtattctcccagatgtgccacagctggaagagagcaataataatgctttttctgcgttaatgtgtgcggatcttcctctacttaatgatacggtcgaagacttcgcgaaatttgtggaagagcttaacgagataagcaatgctactggcgatgttaatgctttgttccgacttgcgtgtattggacgatttgtccgatcaaaatggcgctttgatgatatgatatgctcgcgcgtttcggatcagtgtcatcgctcacaaattccttga

SEQ ID NO: 4675 - protein, 270 aa, Muscodor strobelii
  misc_feature: SGI Peptide ID NO. 561257
  misc_feature (1)..(48): Pfam Id: PF00561 Pfam Desc: alpha/beta hydrolase fold
  misc_feature (1)..(252): NCBI GI: 39976437 Blast Desc: MGG_05855 [Magnaporthe grisea 70-15] gi|145011904|gb|EDJ96560.1| MGG_05855 [Magnaporthe grisea 70-15]
  misc_feature (1)..(254): NCBI GI: 256733266 Blast Desc: NECHADRAFT_100212 [Nectria haematococca mpVI 77-13-4]
  misc_feature (1)..(252): NCBI GI: 156034657 Blast Desc: SS1G_13263 [Sclerotinia sclerotiorum 1980] gi|154698667|gb|EDN98405.1| SS1G_13263 [Sclerotinia sclerotiorum 1980]
  misc_feature (1)..(254): NCBI GI: 46124695 Blast Desc: FG06725.1 [Gibberella zeae PH-1]
  misc_feature (1)..(250): NCBI GI: 85112569 Blast Desc: NCU00825 [Neurospora crassa OR74A] gi|28926147|gb|EAA35132.1| [Neurospora crassa OR74A]
  misc_feature (1)..(252): NCBI GI: 154309137 Blast Desc: BC1G_07463 [Botryotinia fuckeliana B05.10] gi|150852506|gb|EDN27698.1| BC1G_07463 [Botryotinia fuckeliana B05.10]
  misc_feature (1)..(252): NCBI GI: 156049557 Blast Desc: SS1G_08485 [Sclerotinia sclerotiorum 1980] gi|154692884|gb|EDN92622.1| SS1G_08485 [Sclerotinia sclerotiorum 1980]
  misc_feature (1)..(253): NCBI GI: 261354451 Blast Desc: conserved [Verticillium albo-atrum VaMs.102]
  misc_feature (7)..(255): NCBI GI: 145247316 Blast Desc: An12g08560 [Aspergillus niger] gi|134080641|emb|CAK41306.1| protein product [Aspergillus niger]
  misc_feature (1)..(123): NCBI GI: 261354759 Blast Desc: conserved [Verticillium albo-atrum VaMs.102]
MLEILSKLGYDKLKYWGFSYGTLLGGVSASLYPDRVERLVSDGNVDYEEWHHQNHINFLRDADKVMGAFFNFCYDTGPNSCDFYAEIPAQIKERLLNLLRNIRARPIIVAPEDGLPGTGPDMPQLITWSHVRRPTSAALYRPILMFQQFASVSAALERGDGRLFYNIMQFNAEIPPMCSVDGILPDVPQLEESNNNAFSALMCADLPLLNDTVEDFAKFVEELNEISNATGDVNALFRLACIGRFVRSKWRFDDMICSRVSDQCHRSQIP

SEQ ID NO: 4676 - DNA, 1248 bp, Muscodor strobelii
  misc_feature: SGI cDNA ID NO. 561258
  misc_feature: Encodes the peptide sequence at SEQ ID NO 4677
atggcagagacacaattccaacttttcaggaaactacctcccgagcttcgcctttcagtatgggccaactattccctcccgaaaacgccaatggtgcatgcaatgtccttcgacacatccacggattccttttacatcaaatatcgaaaagtgatcatcaattcctttccggtcaacgagacttccatccgtccagatttccagatggtacgggtgcttatgcaagtcaaccgagaagccagatgcgaagttcttcagggacgccagcttcagggaacgcagaagcgcaggatctctgacagatgtaccgatgtctactacggtggtgcctggcacaaggaccttacacactattccaagttcccttatttcttcgtggattgggacatcgacctcttttactttcggtgtggactccatatagcaatgcctctcattctatccgtcgggcgatgttattcgcgtgccaagatgggcaacgttctctggcatcaagtatgcctttctcctctcccagtagacgagaatcgtgactatcatatcgataatctcaagtctctcaagcacctcacacttgtacttccttatcaggttttcgacatgtacgagattgattccgcaaagcatgcgatttctgaaccgtgcgatgcggaagagaaagatgcagacaaagctggaaatacggcatcggaaaacagcaccaaagaagcattgatcggaacaagtagcctagaagaactgggcaacgacgtggaataccatgaggacgactactcctgcgatgaccactgctccttcaacggcttgattttccccaaatatgaggactatacatcagagcgctacatcaagcttgcgtatcatggcgaggcgcacctaagagacacagataatctttggtgcaaggtcaacaaagacaaggatagttttggctttcacgccgtcgaggagaacaccaaactcgttttcagaagaaaggaggccgtgtatagtttgggaccaacacctggcaagaccacactacaaaaatggattcaagatacgaagtcggctgctacaagagacatgtaccgaatatgtggacgcggtgtcagagtgaatatggtgatggatcacgctggtgattgtcatagcaatgacgtgggatatgaccgcgtatggggcaaccgagactggcgaccctggactacttgcgcaatggaagacctgtccgaatatgagtctgagtctgagtctgacgctcactaa

SEQ ID NO: 4677 - protein, 415 aa, Muscodor strobelii
  misc_feature: SGI Peptide ID NO. 561258
MAETQFQLFRKLPPELRLSVWANYSLPKTPMVHAMSFDTSTDSFYIKYRKVIINSFPVNETSIRPDFQMVRVLMQVNREARCEVLQGRQLQGTQKRRISDRCTDVYYGGAWHKDLTHYSKFPYFFVDWDIDLFYFRCGLHIAMPLILSVGRCYSRAKMGNVLWHQVCLSPLPVDENRDYHIDNLKSLKHLTLVLPYQVFDMYEIDSAKHAISEPCDAEEKDADKAGNTASENSTKEALIGTSSLEELGNDVEYHEDDYSCDDHCSFNGLIFPKYEDYTSERYIKLAYHGEAHLRDTDNLWCKVNKDKDSFGFHAVEENTKLVFRRKEAVYSLGPTPGKTTLQKWIQDTKSAATRDMYRICGRGVRVNMVMDHAGDCHSNDVGYDRVWGNRDWRPWTTCAMEDLSEYESESESDAH

SEQ ID NO: 4678 - DNA, 1167 bp, Muscodor strobelii
  misc_feature: SGI cDNA ID NO. 561259
  misc_feature: Encodes the peptide sequence at SEQ ID NO 4679
atgagccagcgtgagtacgccgaagacactgccttctgggcattgaaagatgcaacacaattctctgcacgccggcgaacaacgtatctctacctctcatcgcccgtgaatggtgcgcctcaaagctactcatggattgacgacacgcccgctgtatggggagagcttcgagacgtactcgccgagcaacaaccgcgctcaattgcggtgaacactcacagtgagatcgcgtttgcatcgggccttcatgccggagagctggagatgatatctactgcgctcggggaggagtggtctaatcgatttgtcctcgaacccatgttgcctgtcgaagttatcgctaccatggtgcccgggcgactctcatggtatcgtcgcatgcaagagacagcctgggcgatcattgaggaggcatttagtgagaaagtgatctcacctggaaagactacacctgcagatgtcgagtggtggatgcgtgagaaaatacagtcgcttaactacactacttggtttcagcccggcgttttcataatgacggaagaaggctttcctgcttccgatggtcctgccaccgacgaccaccttcacttactgaaacaccggcccattcaatacggcgacctgattcacaccgatttcggagtgacggcacttggtctaaataccgatactcaacatcttggctacgtgctctatcctggagaaacagcggacgatgtgccgaaaggtatgatcgaaggtttgcagaaggttaatcgactgcaagacatgacacgcgagcacatgaagattggcatgacaggcaatgagattttaaaggcaattcagaaacagatggcgtccgaaggcatcaagggaaagatctactgtcacccaacaggcgaatggggacattcagcaggctctgttatcggcatgtcaaaccttcaagacggcgttccgatcttaggggatctgccactcctaaaagacacatactatagcatcgagctcttcgccgagcatttcgtgccggaacgtaacagaactctcaagtttgcgcaggaagaagatgtcttttggaactcagcaactaagtcttgggattgggtttatggccagcaaactggattcttgctcatcagtacaccgacaaaggaagtgtcagacaatattggagagctatag

SEQ ID NO: 4679 - protein, 388 aa, Muscodor strobelii
  misc_feature: SGI Peptide ID NO. 561259
  misc_feature (1)..(388): NCBI GI: 39970749 Blast Desc: MGG_02841 [Magnaporthe grisea 70-15] gi|149210241|ref|XP_001522495.1| MGCH7_ch7g598 [Magnaporthe grisea 70-15] gi|86196553|gb|EAQ71191.1| MGCH7_ch7g598 grisea
  misc_feature (4)..(374): NCBI GI: 226228472 Blast Desc: GAU_3066 [Gemmatimonas aurantiaca T-27] gi|226091663|dbj|BAH40108.1| [Gemmatimonas aurantiaca T-27]
  misc_feature (4)..(374): NCBI GI: 108757284 Blast Desc: lipoprotein [Myxococcus xanthus DK 1622] gi|108461164|gb|ABF86349.1| lipoprotein [Myxococcus xanthus DK 1622]
  misc_feature (4)..(374): NCBI GI: 115374495 Blast Desc: Xaa-Pro aminopeptidase family enzyme [Stigmatella aurantiaca DW4/3-1] gi|115368474|gb|EAU67428.1| Xaa-Pro aminopeptidase family enzyme [Stigmatella aurantiaca DW4/3-1]
  misc_feature (4)..(374): NCBI GI: 37519812 Blast Desc: glr0243 [Gloeobacter violaceus PCC 7421] gi|35210803|dbj|BAC88184.1| glr0243 [Gloeobacter violaceus PCC 7421]
  misc_feature (4)..(379): NCBI GI: 126648976 Blast Desc: Xaa-Pro aminopeptidase family enzyme [Algoriphagus sp. PR1] gi|126574847|gb|EAZ79218.1| Xaa-Pro aminopeptidase family enzyme [Algoriphagus sp. PR1]
  misc_feature (4)..(381): NCBI GI: 124004580 Blast Desc: Xaa-Pro aminopeptidase family enzyme [Microscilla marina ATCC 23134] gi|123990152|gb|EAY29666.1| Xaa-Pro aminopeptidase family enzyme [Microscilla marina ATCC 23134]
  misc_feature (4)..(374): NCBI GI: 163788253 Blast Desc: Xaa-Pro aminopeptidase family enzyme [Flavobacteriales bacterium ALC-1] gi|159876573|gb|EDP70631.1| Xaa-Pro aminopeptidase family enzyme [Flavobacteriales bacterium ALC-1]
  misc_feature (1)..(376): NCBI GI: 239993658 Blast Desc: Xaa-Pro aminopeptidase family enzyme [Alteromonas macleodii ATCC 27126]
  misc_feature (4)..(369): NCBI GI: 284035196 Blast Desc: Xaa-Pro aminopeptidase family enzyme [Spirosoma linguale DSM 74] gi|283814489|gb|ADB36327.1| Xaa-Pro aminopeptidase family enzyme [Spirosoma linguale DSM 74]
MSQREYAEDTAFWALKDATQFSARRRTTYLYLSSPVNGAPQSYSWIDDTPAVWGELRDVLAEQQPRSIAVNTHSEIAFASGLHAGELEMISTALGEEWSNRFVLEPMLPVEVIATMVPGRLSWYRRMQETAWAIIEEAFSEKVISPGKTTPADVEWWMREKIQSLNYTTWFQPGVFIMTEEGFPASDGPATDDHLHLLKHRPIQYGDLIHTDFGVTALGLNTDTQHLGYVLYPGETADDVPKGMIEGLQKVNRLQDMTREHMKIGMTGNEILKAIQKQMASEGIKGKIYCHPTGEWGHSAGSVIGMSNLQDGVPILGDLPLLKDTYYSIELFAEHFVPERNRTLKFAQEEDVFWNSATKSWDWVYGQQTGFLLISTPTKEVSDNIGEL

SEQ ID NO: 4680 - DNA, 1831 bp, Muscodor strobelii
  misc_feature: SGI EST ID NO. CUFF.11869.0
  misc_feature: Variant of the nucleotide sequence at SEQ ID NO 4678
ctgaactctcctctgccttctacttaagttagctaacatctggtaatgaacaaatagctgaaacttgctctggaggaccgaatttgaaagcagactcaattctgttgcgtcgaattcttgatctgggtaagccgaaagatgtggggttcggtatcattacgtctcgcagccgctctggctatcggctgctgtgtctgcggagggattgccgatgagacaagacgaaagacgcctcaaatacagactctaccttctctgagagagcagaatgatctcatcaactcatggactgaagagcgcaggcgtttggtaccggatttgatgcgcaagtatggggttgatgcttggctgatgagccagcgtgagtacgccgaagacactgccttctgggcattgaaagatgcaacacaattctctgcacgccggcgaacaacgtatctctacctctcatcgcccgtgaatggtgcgcctcaaagctactcatggattgacgacacgcccgctgtatggggagagcttcgagacgtactcgccgagcaacaaccgcgctcaattgcggtgaacactcacagtgagatcgcgtttgcatcgggccttcatgccggagagctggagatgatatctactgcgctcggggaggagtggtctaatcgatttgtcctcgaacccatgttgcctgtcgaagttatcgctaccatggtgcccgggcgactctcatggtatcgtcgcatgcaagagacagcctgggcgatcattgaggaggcatttagtgagaaagtgatctcacctggaaagactacacctgcagatgtcgagtggtggatgcgtgagaaaatacagtcgcttaactacactacttggtttcagcccggcgttttcataatgacggaagaaggctttcctgcttccgatggtcctgccaccgacgaccaccttcacttactgaaacaccggcccattcaatacggcgacctgattcacaccgatttcggagtgacggcacttggtctaaataccgatactcaacatcttggctacgtgctctatcctggagaaacagcggacgatgtgccgaaaggtatgatcgaaggtttgcagaaggttaatcgactgcaagacatgacacgcgagcacatgaagattggcatgacaggcaatgagattttaaaggcaattcagaaacagatggcgtccgaaggcatcaagggaaagatctactgtcacccaacaggcgaatggggacattcagcaggctctgttatcggcatgtcaaaccttcaagacggcgttccgatcttaggggatctgccactcctaaaagacacatactatagcatcgagctcttcgccgagcatttcgtgccggaacgtaacagaactctcaagtttgcgcaggaagaagatgtcttttggaactcagcaactaagtcttgggattgggtttatggccagcaaactggattcttgctcatcagtacaccgacaaaggaagtgtcagacaatattggagagctatagattgcatgtgaatcacaagcagaggaaggcattcgagtgtctcaaccaagatcacgtcattgtttaataactggcaatctcagaaatgattgcgtgtttcagtgcaatgtggactagtcagctccttcagtttctgtgttgtcgtgcggcctctaaatgatagcataataaactgccgatgcatatacacgtcctgacggacgtctctgctatcaatttttcccatagtgctccagctccagttccaactctcccatgcagatccaacgatggcccaccattagcaagacgcgtgctaggaccaacatggtgg

SEQ ID NO: 4681 - DNA, 321 bp, Muscodor strobelii
  misc_feature: SGI cDNA ID NO. 561260
  misc_feature: Encodes the peptide sequence at SEQ ID NO 4682
atgaacggctcgacgaacatgacgaacgcacacaagagcgatcttagtggtgcctctgcatcgcacaagactggcgtcggtctcgacagcaatagcactggcactttgcctgccataccttccacgacggtgcctatgatggccggcgcaaatgggagcggtcacaataccgcagcggcggcgaatgcggcgctcaacaagaagaggaaaaaggacgggctcaagcctatcatcacgacagagggaccgtctccagcatctcgagtatgccagtcacgcggtggtatcaaggaatgcacgagcaagtaccagcaattctag

SEQ ID NO: 4682 - protein, 106 aa, Muscodor strobelii
  misc_feature: SGI Peptide ID NO. 561260
MNGSTNMTNAHKSDLSGASASHKTGVGLDSNSTGTLPAIPSTTVPMMAGANGSGHNTAAAANAALNKKRKKDGLKPIITTEGPSPASRVCQSRGGIKECTSKYQQF

SEQ ID NO: 4683 - DNA, 3521 bp, Muscodor strobelii
  misc_feature: SGI EST ID NO. CUFF.12345.1
  misc_feature: Variant of the nucleotide sequence at SEQ ID NO 4681
cacgtcacagcccttatgatgccatccatcccactttcccatcttgtagacggccacttctcactctcaactgccagtgcaatccattgtggtatcgtgcctttgtcagatagactcagtcaagcgaatttcaaactcaacgtccagcatctgcctcgtcgtcaatcttcgtgtcttctcagtcttccgtctcgtcgttcccgagcttgggtttccgtgtctttccagattctatagtttttgttttagcgctactattatcttgcaactagatcctgcatacatcagagcatgcgtctgcgttcatctaccttctcgcttctctcgcttgtttgattttcacatatcgtcatccaccttctgtctggctgtcatcattgacagcaacggcttgaacaaactaataagaaaggacgacaccaaaactgcagcattctacgccctgcgcaggagactagaacgcgcgaattcgccttgtttaatttaatcagtgtttcgccataccatcgccacgtgggtttccatgaccttcacctccctcttcccaatatcccgcactcgcagcaaccgcctgaagtatcgcgatcgaggaccaagcttgcaggttatctctacgcttggttgcacgccagcattagaacttgactcgacgttcgactcgaccattgtctcagactgattcaagcaccatcgcatcttattttatatcccccctcttgttctgtatagctgcgcattatccactattgccacggccgcctacacaaacatctcacccaccatcgtcacagacgaccattactcaacccccattgccattgttggtctaatcagccgtagagacttgcgacaccaccatcactatcgtccccataggcggctccatctgcgcgtctcccacccattttacctcaagctccaaggctgcaagtcccgagaggtctgacgtattattactgtggcccgattactactatctgcagcacctagcagattcgccaataacgcgtcttgtgcgacacttgggcctcgctccttcagctgcgccagcgcataactttttgaagccttccagaacgtgtcctcgcgacttcccagtcctgccctagcgcagcgaccgttgaaacccagtctccctctggcggaagtgggttctgcgcacagcgaccatgaacggctcgacgaacatgacgaacgcacacaagagcgatcttagtggtgcctctgcatcgcacaagactggcgtcggtctcgacagcaatagcactggcactttgcctgccataccttccacgacggtgcctatgatggccggcgcaaatgggagcggtcacaataccgcagcggcggcgaatgcggcgctcaacaagaagaggaaaaaggacgggctcaagcctatcatcacgacagagggaccgtctccagcatcgccgccgcaccttaccacaaacatgaaccaacattcgcccgcatcatcctctgggccggacgacggcgtcgagaacaccgctgacgaagaagattccgaagactacggcgagggtggttatcaccccgtacagatcggcgagaagtttaacgacggaaagtacacagtagtccgcaagctgggctggggccatttctctaccgtgtggctttccagagacaatacgaacgggaagcatgtcgcgctcaaggtcgtgcggtctgctcagcattacaccgaaaccgctaaggacgagatcgacttgctgcaaaagattgtgggtgcgaacccaaaccaccccggccgcaaatatgtcgtcagccttctggataatttcacgcacaaggggcccaacggtctccacgtctgtatggtatttgaagttttgggcgagaacctcctcggcctgatcaagaagtggcaacacagaggtatcccgcgaaacctagtgatgcaaatcacaaaacaggtcttgatgggcttggactacttgcacagagagtgcggcatcatacacaccgatctcaagccggagaatgttttgatagagataggcgacgttgaagaagtcgttcaaagtgtcgtcaagggcgagaacgcggataaagaaaatcatcgaaacggacgacggcgaagaaggactcttatcacaggcagccaaccgcttccttcgccgctcaatgctacgttcaaccgcgataacttatttccatcgcccaagtctcattccagcctcaacaccatattacatgacggtaattgtcccactcgcgttgtctgtcatctggataatatgcccattaatatcctttgctacatgttgcactgtatcattgaatgtttgctgataagtcctagctgctacaaccggtcagaaacaaggacagcgagaaaagacagctgatattcttacgaaagaagtttcgggtatttccctcgacaaacctggagatgcatcgagcgacaagaagagaaagaaacgcaccggcccgatcatcaatgttaaaatcgccgatcttggcaatgcttgctgggtatctcatcattttaccaatgatatccagacacgccagtatcggtcgcccgaggtcatactcggtgctaaatggggtgcaagtactgacgtatggagcatggctgctatggtgttcgaactgatcacgggcgactatctgttcgatccgcagtccggcaccaaatacggcaaggacgacgaccacatcgcgcagattatcgagctccttggacctttccccaaagacctttggaaggcaggccgctggtcccaggagattttcaataagagaggggagcttcgcaatatccatcgtttgcgccattgggcactgccagacgtattgagggaaaagtaccacttcaaagatgtcaaagagctcacagctaaagagaaagaagagaaagagaaggcgtcgagggaacgagccgaggctaaggtcagagccaagatggaggccaggaaagcgggtgaggatgaagatgctgtggaggacgcattcactgaagacgatccgcctcttgagtatcaccctgtcgaagtcgccagctttttaactccaatgctggagttattacctgagaagcgggcgaatgccggtggcatggctaatcatgcctggttaaacaatacacctgggatggaggacataaaactagaggggctagtaccgggaacccggggcgagggcatccagggctgggctaccgagattaaaaagtctaggtagagctggattatgaataacagcgagaactaggccaagctcttcattcagacgtaccttccttggtaatgatatacagagtcacgcaagcgagagcatcaaccttatgccgtacgggggccagcgatgtggatggggcaggttatgggccacggatgcgacgaagatagacgggacctactatatgctatgctaatctctgcacgacacgcacgaatagccatgatacaggaaaataaaggcaagaaatatggcaatgaaaagaaagccgaatgatttagttcctgatctttgcttgatgcctatgtgac

SEQ ID NO: 4684 - DNA, 1659 bp, Muscodor strobelii
  misc_feature: SGI cDNA ID NO. 561261
  misc_feature: Encodes the peptide sequence at SEQ ID NO 4685
atgaaccaacattcgcccgcatcatcctctgggccggacgacggcgtcgagaacaccgctgacgaagaagattccgaagactacggcgagggtggttatcaccccgtacagatcggcgagaagtttaacgacggaaagtacacagtagtccgcaagctgggctggggccatttctctaccgtgtggctttccagagacaatacgaacgggaagcatgtcgcgctcaaggtcgtgcggtctgctcagcattacaccgaaaccgctaaggacgagatcgacttgctgcaaaagattgtgggtgcgaacccaaaccaccccggccgcaaatatgtcgtcagccttctggataatttcacgcacaaggggcccaacggtctccacgtctgtatggtatttgaagttttgggcgagaacctcctcggcctgatcaagaagtggcaacacagaggtatcccgcgaaacctagtgatgcaaatcacaaaacaggtcttgatgggcttggactacttgcacagagagtgcggcatcatacacaccgatctcaagccggagaatgttttgatagagataggcgacgttgaagaagtcgttcaaagtgtcgtcaagggcgagaacgcggataaagaaaatcatcgaaacggacgacggcgaagaaggactcttatcacaggcagccaaccgcttccttcgccgctcaatgctacgttcaaccgcgataacttatttccatcgcccaagtctcattccagcctcaacaccatattacatgacgctgctacaaccggtcagaaacaaggacagcgagaaaagacagctgatattcttacgaaagaagtttcgggtatttccctcgacaaacctggagatgcatcgagcgacaagaagagaaagaaacgcaccggcccgatcatcaatgttaaaatcgccgatcttggcaatgcttgctgggtatctcatcattttaccaatgatatccagacacgccagtatcggtcgcccgaggtcatactcggtgctaaatggggtgcaagtactgacgtatggagcatggctgctatggtgttcgaactgatcacgggcgactatctgttcgatccgcagtccggcaccaaatacggcaaggacgacgaccacatcgcgcagattatcgagctccttggacctttccccaaagacctttggaaggcaggccgctggtcccaggagattttcaataagagaggggagcttcgcaatatccatcgtttgcgccattgggcactgccagacgtattgagggaaaagtaccacttcaaagatgtcaaagagctcacagctaaagagaaagaagagaaagagaaggcgtcgagggaacgagccgaggctaaggtcagagccaagatggaggccaggaaagcgggtgaggatgaagatgctgtggaggacgcattcactgaagacgatccgcctcttgagtatcaccctgtcgaagtcgccagctttttaactccaatgctggagttattacctgagaagcgggcgaatgccggtggcatggctaatcatgcctggttaaacaatacacctgggatggaggacataaaactagaggggctagtaccgggaacccggggcgagggcatccagggctgggctaccgagattaaaaagtctaggtag

SEQ ID NO: 4685 - protein, 552 aa, Muscodor strobelii
  misc_feature: SGI Peptide ID NO. 561261
  misc_feature (47)..(518): Pfam Id: PF00069 Pfam Desc: Protein kinase domain
  misc_feature (4)..(550): NCBI GI: 116192805 Blast Desc: conserved [Chaetomium globosum CBS 148.51] gi|88182033|gb|EAQ89501.1| conserved [Chaetomium globosum CBS 148.51]
  misc_feature (4)..(550): NCBI GI: 46111827 Blast Desc: FG02795.1 [Gibberella zeae PH-1]
  misc_feature (4)..(550): NCBI GI: 256721898 Blast Desc: [Nectria haematococca mpVI 77-13-4]
  misc_feature (5)..(550): NCBI GI: 171684169 Blast Desc: protein product [Podospora anserina] gi|170942045|emb|CAP67697.1| protein product [Podospora anserina]
  misc_feature (14)..(550): NCBI GI: 149209311 Blast Desc: MGCH7_ch7g148 [Magnaporthe grisea 70-15] gi|86196103|gb|EAQ70741.1| MGCH7_ch7g148 [Magnaporthe grisea 70-15]
  misc_feature (14)..(550): NCBI GI: 145614791 Blast Desc: conserved [Magnaporthe grisea 70-15] gi|145021725|gb|EDK05802.1| conserved [Magnaporthe grisea 70-15]
  misc_feature (1)..(550): NCBI GI: 164423174 Blast Desc: NCU09202 [Neurospora crassa OR74A] gi|29150094|emb|CAD79655.1| dis1-suppressing protein kinase dsk1 [Neurospora crassa] gi|157069978|gb|EAA29910.2| NCU09202 crassa
  misc_feature (6)..(550): NCBI GI: 156058530 Blast Desc: SS1G_03277 [Sclerotinia sclerotiorum 1980] gi|154701064|gb|EDO00803.1| SS1G_03277 [Sclerotinia sclerotiorum 1980]
  misc_feature (6)..(550): NCBI GI: 154310698 Blast Desc: BC1G_06823 [Botryotinia fuckeliana B05.10] gi|150851363|gb|EDN26556.1| BC1G_06823 [Botryotinia fuckeliana B05.10]
  misc_feature (17)..(550): NCBI GI: 242815216 Blast Desc: serine protein kinase Sky1, [Talaromyces stipitatus ATCC 10500] gi|218714865|gb|EED14288.1| serine protein kinase Sky1, [Talaromyces stipitatus ATCC 10500]
  misc_feature (34)..(549): SWISSPROT Homolog: EC 2.7.11.1 Non-specific serine/threonine protein kinase
MNQHSPASSSGPDDGVENTADEEDSEDYGEGGYHPVQIGEKFNDGKYTVVRKLGWGHFSTVWLSRDNTNGKHVALKVVRSAQHYTETAKDEIDLLQKIVGANPNHPGRKYVVSLLDNFTHKGPNGLHVCMVFEVLGENLLGLIKKWQHRGIPRNLVMQITKQVLMGLDYLHRECGIIHTDLKPENVLIEIGDVEEVVQSVVKGENADKENHRNGRRRRRTLITGSQPLPSPLNATFNRDNLFPSPKSHSSLNTILHDAATTGQKQGQREKTADILTKEVSGISLDKPGDASSDKKRKKRTGPIINVKIADLGNACWVSHHFTNDIQTRQYRSPEVILGAKWGASTDVWSMAAMVFELITGDYLFDPQSGTKYGKDDDHIAQIIELLGPFPKDLWKAGRWSQEIFNKRGELRNIHRLRHWALPDVLREKYHFKDVKELTAKEKEEKEKASRERAEAKVRAKMEARKAGEDEDAVEDAFTEDDPPLEYHPVEVASFLTPMLELLPEKRANAGGMANHAWLNNTPGMEDIKLEGLVPGTRGEGIQGWATEIKKSR

SEQ ID NO: 4686 - DNA, 3521 bp, Muscodor strobelii; identical to SEQ ID NO: 4683
  misc_feature: SGI EST ID NO. CUFF.12345.1
  misc_feature: Variant of the nucleotide sequence at SEQ ID NO 4684

SEQ ID NO: 4687 - DNA, 1725 bp, Muscodor strobelii
  misc_feature: SGI cDNA ID NO. 561262
  misc_feature: Reduced expression when VOC is produced
  misc_feature: Encodes the peptide sequence at SEQ ID NO 4688
atgaaccaacattcgcccgcatcatcctctgggccggacgacggcgtcgagaacaccgctgacgaagaagattccgaagactacggcgagggtggttatcaccccgtacagatcggcgagaagtttaacgacggaaagtacacagtagtccgcaagctgggctggggccatttctctaccgtgtggctttccagagacaatacgaacgggaagcatgtcgcgctcaaggtcgtgcggtctgctcagcattacaccgaaaccgctaaggacgagatcgacttgctgcaaaagattgtgggtgcgaacccaaaccaccccggccgcaaatatgtcgtcagccttctggataatttcacgcacaaggggcccaacggtctccacgtctgtatggtatttgaagttttgggcgagaacctcctcggcctgatcaagaagtggcaacacagaggtatcccgcgaaacctagtgatgcaaatcacaaaacaggtcttgatgggcttggactacttgcacagagagtgcggcatcatacacaccgatctcaagccggagaatgttttgatagagataggcgacgttgaagaagtcgttcaaagtgtcgtcaagggcgagaacgcggataaagaaaatcatcgaaacggacgacggcgaagaaggactcttatcacaggcagccaaccgcttccttcgccgctcaatgctacgttcaaccgcgataacttatttccatcgcccaagtctcattccagcctcaacaccatattacatgacgctgctacaaccggtcagaaacaaggacagcgagaaaagacagcgtgggtctcctctttcaagtttgaaacaccaactatcctagttactgacacgagttgtaattacagtgatattcttacgaaagaagtttcgggtatttccctcgacaaacctggagatgcatcgagcgacaagaagagaaagaaacgcaccggcccgatcatcaatgttaaaatcgccgatcttggcaatgcttgctgggtatctcatcattttaccaatgatatccagacacgccagtatcggtcgcccgaggtcatactcggtgctaaatggggtgcaagtactgacgtatggagcatggctgctatggtgttcgaactgatcacgggcgactatctgttcgatccgcagtccggcaccaaatacggcaaggacgacgaccacatcgcgcagattatcgagctccttggacctttccccaaagacctttggaaggcaggccgctggtcccaggagattttcaataagagaggggagcttcgcaatatccatcgtttgcgccattgggcactgccagacgtattgagggaaaagtaccacttcaaagatgtcaaagagctcacagctaaagagaaagaagagaaagagaaggcgtcgagggaacgagccgaggctaaggtcagagccaagatggaggccaggaaagcgggtgaggatgaagatgctgtggaggacgcattcactgaagacgatccgcctcttgagtatcaccctgtcgaagtcgccagctttttaactccaatgctggagttattacctgagaagcgggcgaatgccggtggcatggctaatcatgcctggttaaacaatacacctgggatggaggacataaaactagaggggctagtaccgggaacccggggcgagggcatccagggctgggctaccgagattaaaaagtctaggtag

SEQ ID NO: 4688 - protein, 574 aa, Muscodor strobelii
  misc_feature: SGI Peptide ID NO. 561262
  misc_feature (47)..(540): Pfam Id: PF00069 Pfam Desc: Protein kinase domain
  misc_feature (4)..(572): NCBI GI: 116192805 Blast Desc: conserved [Chaetomium globosum CBS 148.51] gi|88182033|gb|EAQ89501.1| conserved [Chaetomium globosum CBS 148.51]
  misc_feature (4)..(572): NCBI GI: 46111827 Blast Desc: FG02795.1 [Gibberella zeae PH-1]
  misc_feature (4)..(572): NCBI GI: 256721898 Blast Desc: [Nectria haematococca mpVI 77-13-4]
  misc_feature (14)..(572): NCBI GI: 149209311 Blast Desc: MGCH7_ch7g148 [Magnaporthe grisea 70-15] gi|86196103|gb|EAQ70741.1| MGCH7_ch7g148 [Magnaporthe grisea 70-15]
  misc_feature (5)..(572): NCBI GI: 171684169 Blast Desc: protein product [Podospora anserina] gi|170942045|emb|CAP67697.1| protein product [Podospora anserina]
  misc_feature (14)..(572): NCBI GI: 145614791 Blast Desc: conserved [Magnaporthe grisea 70-15] gi|145021725|gb|EDK05802.1| conserved [Magnaporthe grisea 70-15]
  misc_feature (1)..(572): NCBI GI: 164423174 Blast Desc: NCU09202 [Neurospora crassa OR74A] gi|29150094|emb|CAD79655.1| dis1-suppressing protein kinase dsk1 [Neurospora crassa] gi|157069978|gb|EAA29910.2| NCU09202 crassa
  misc_feature (6)..(572): NCBI GI: 156058530 Blast Desc: SS1G_03277 [Sclerotinia sclerotiorum 1980] gi|154701064|gb|EDO00803.1| SS1G_03277 [Sclerotinia sclerotiorum 1980]
  misc_feature (6)..(572): NCBI GI: 154310698 Blast Desc: BC1G_06823 [Botryotinia fuckeliana B05.10] gi|150851363|gb|EDN26556.1| BC1G_06823 [Botryotinia fuckeliana B05.10]
  misc_feature (17)..(572): NCBI GI: 242815216 Blast Desc: serine protein kinase Sky1, [Talaromyces stipitatus ATCC 10500] gi|218714865|gb|EED14288.1| serine protein kinase Sky1, [Talaromyces stipitatus ATCC 10500]
  misc_feature (34)..(571): SWISSPROT Homolog: EC 2.7.11.1 Non-specific serine/threonine protein kinase
  misc_feature: Useful for introducing or modulating the production of volatile compounds
MNQHSPASSSGPDDGVENTADEEDSEDYGEGGYHPVQIGEKFNDGKYTVVRKLGWGHFSTVWLSRDNTNGKHVALKVVRSAQHYTETAKDEIDLLQKIVGANPNHPGRKYVVSLLDNFTHKGPNGLHVCMVFEVLGENLLGLIKKWQHRGIPRNLVMQITKQVLMGLDYLHRECGIIHTDLKPENVLIEIGDVEEVVQSVVKGENADKENHRNGRRRRRTLITGSQPLPSPLNATFNRDNLFPSPKSHSSLNTILHDAATTGQKQGQREKTAWVSSFKFETPTILVTDTSCNYSDILTKEVSGISLDKPGDASSDKKRKKRTGPIINVKIADLGNACWVSHHFTNDIQTRQYRSPEVILGAKWGASTDVWSMAAMVFELITGDYLFDPQSGTKYGKDDDHIAQIIELLGPFPKDLWKAGRWSQEIFNKRGELRNIHRLRHWALPDVLREKYHFKDVKELTAKEKEEKEKASRERAEAKVRAKMEARKAGEDEDAVEDAFTEDDPPLEYHPVEVASFLTPMLELLPEKRANAGGMANHAWLNNTPGMEDIKLEGLVPGTRGEGIQGWATEIKKSR

SEQ ID NO: 4689 - DNA, 3521 bp, Muscodor strobelii; identical to SEQ ID NO: 4683
  misc_feature: SGI EST ID NO. CUFF.12345.1
  misc_feature: Variant of the nucleotide sequence at SEQ ID NO 4687

SEQ ID NO: 4690 - DNA, 1314 bp, Muscodor strobelii
  misc_feature: SGI cDNA ID NO. 561263
  misc_feature: Encodes the peptide sequence at SEQ ID NO 4691
atgcgactcatcaacaccaaaactctcgaactcgaagagttcttcggagatgagattccgcgatacgccattctttcccacacgtgggagaaggaagaggctacatttcaggattggaaagacttagatgccgctcgtaatcaagcaggctttcagaaaatcgccaatgcgtgcgggcaagccaggagagatgttctcaactatatctggattgacaccaattgtattgacaagagtagctctgccgaacttagcgaggccatcaattccatgttttcctggtatcgaaacgcgactgtgtgttatgcttatatggcggatgtgtggcggagcaatgaaatggaacttgacggagatctgttgaacggtgaccggcatgagggagaggaagaagaagaaatagagcagcgaccagaagaacaaggccacgaagacgacgatacaagcttgcaatccgagagcgaatgctccgtagacgaatatgatagttctgtcggaagatttgcggcagacttggacaaggataagatagcattgccaccgaagctactttatcgcttccagaacagcaaatggttcacacgtggctggaccttgcaggagcttcttgcgccccagaatgtcgtcttcttcgacaaagactggtgcccgataggacgtctcgaccaattggttaaactcgtctcccaaaccacaggcattgcgcccatgtattttcttgcatcaaaaggactggaggatgcgagcattgctaagaaaatgtcatgggcgtctgggcgaaaaacaacgagggctgaagacgttgcgtactgtctccttggcattttcgatatcaacatgccccttctatacggagaaggcaacaaggcattcatcagattgcaagaggagattatcaggcgatccaatgatcagagtatattcgcttggacgtggacagacgctgtgggaaggtactggaggagtatctttgcgcccaatcctgatgcattccaagaatcgtcccactacgtgcaagcgaaaaagaaaaggaattctagacgcgatttcgcaatgacaaacgccggtctatccatagatctcccgcggcttttcagtcaatcgatcgacactggagttttaaacgtgatagacgagaatgttgtgcaaagtcatcggattggcatacccctgaatcgtcgcaatcgatacaaagttttagatgtctacgaaacatggcgtgctgaaatgggatggcaaattagatatatcatggtcgagacgcccaatatcaaactgggcatcaccatatattcttgtcctatctcccgatga

SEQ ID NO: 4691 - protein, 437 aa, Muscodor strobelii
  misc_feature: SGI Peptide ID NO. 561263
  misc_feature (22)..(201): Pfam Id: PF06985 Pfam Desc: Heterokaryon incompatibility protein (HET)
  misc_feature (22)..(126): Pfam Id: PF06985 Pfam Desc: Heterokaryon incompatibility protein (HET)
  misc_feature (185)..(201): Pfam Id: PF06985 Pfam Desc: Heterokaryon incompatibility protein (HET)
  misc_feature (1)..(406): NCBI GI: 156035539 Blast Desc: SS1G_12973 [Sclerotinia sclerotiorum 1980] gi|154698378|gb|EDN98116.1| SS1G_12973 [Sclerotinia sclerotiorum 1980]
  misc_feature (1)..(362): NCBI GI: 238493477 Blast Desc: conserved [Aspergillus flavus NRRL3357] gi|220696469|gb|EED52811.1| conserved [Aspergillus flavus NRRL3357]
  misc_feature (1)..(393): NCBI GI: 145608538 Blast Desc: MGG_06555 [Magnaporthe grisea 70-15] gi|145016004|gb|EDK00494.1| MGG_06555 [Magnaporthe grisea 70-15]
  misc_feature (1)..(378): NCBI GI: 145249734 Blast Desc: An14g05830 [Aspergillus niger] gi|134081889|emb|CAK42144.1| protein product [Aspergillus niger]
  misc_feature (1)..(375): NCBI GI: 261358772 Blast Desc: HET domain-containing protein [Verticillium albo-atrum VaMs.102]
  misc_feature (1)..(323): NCBI GI: 171683780 Blast Desc: protein product [Podospora anserina] gi|170941850|emb|CAP67503.1| protein product [Podospora anserina]
  misc_feature (1)..(361): NCBI GI: 189192070 Blast Desc: HET domain containing protein [Pyrenophora tritici-repentis Pt-1C-BFP] gi|187973980|gb|EDU41479.1| HET domain containing protein [Pyrenophora tritici-repentis
  misc_feature (1)..(361): NCBI GI: 171683732 Blast Desc: protein product [Podospora anserina] gi|170941826|emb|CAP67479.1| protein product [Podospora anserina]
  misc_feature (1)..(359): NCBI GI: 256722404 Blast Desc: NECHADRAFT_44368 [Nectria haematococca mpVI 77-13-4]
  misc_feature (1)..(400): NCBI GI: 189199422 Blast Desc: HET domain containing protein [Pyrenophora tritici-repentis Pt-1C-BFP] gi|187983147|gb|EDU48635.1| HET domain containing protein [Pyrenophora tritici-repentis
MRLINTKTLELEEFFGDEIPRYAILSHTWEKEEATFQDWKDLDAARNQAGFQKIANACGQARRDVLNYIWIDTNCIDKSSSAELSEAINSMFSWYRNATVCYAYMADVWRSNEMELDGDLLNGDRHEGEEEEEIEQRPEEQGHEDDDTSLQSESECSVDEYDSSVGRFAADLDKDKIALPPKLLYRFQNSKWFTRGWTLQELLAPQNVVFFDKDWCPIGRLDQLVKLVSQTTGIAPMYFLASKGLEDASIAKKMSWASGRKTTRAEDVAYCLLGIFDINMPLLYGEGNKAFIRLQEEIIRRSNDQSIFAWTWTDAVGRYWRSIFAPNPDAFQESSHYVQAKKKRNSRRDFAMTNAGLSIDLPRLFSQSIDTGVLNVIDENVVQSHRIGIPLNRRNRYKVLDVYETWRAEMGWQIRYIMVETPNIKLGITIYSCPISR

SEQ ID NO: 4692 - DNA, 1266 bp, Muscodor strobelii
  misc_feature: SGI cDNA ID NO. 561264
  misc_feature: Reduced expression when VOC is produced
  misc_feature: Encodes the peptide sequence at SEQ ID NO 4693
atgtcggacggcgagtcgccggctcgcgacgagatgccgcacgacgaggctcctgccgacgagcgaggcgactacgaccttgaagccgcagccgattcagacagagactccgatgccctgtccgacgtagatgaggaccagttcgacgactacgatccctcggccgtgcgaatcgaggagagaccagtggagatcgacgaggatgtggcacgaactctcaaggcctccaagcgcaagggcgtcgccaccaaaaagcccaaggagggccgtcgtgagaagaagcgcacccgcgaccgcgacgacaacgacggcgccgacggcgagatcttgactactaagcgagctcgcaaggccggcggtggtggtggcgagtccaatcgcaaagcagcctcgcccgagcccgagaacgaggagaacctgacgcccgaggaacgacgccgccgggccatcgagcgtgccgccgccaaggagaagcccaagatcaagagacgcaagaagagagacgaagatgacctcgaagatgagatggacgagaagattgccgacctcaagctgcgcatggagaacgcctgcaaagccgacaacaccgcccgcgaggccggccagcccgccatccacaagctcaagctgctgcccgaagtcaccgccctgctcaacagcaacaacctccagagcctcgtcgtcgaccccgacaccaacttcctcgagcacgtcaagttcttcctcgagcctcttagcgatggctctctcccggccttcaacatccagcgcgacatcttccaggccctgctcaacctgcccatcgagaaggaggctctgcgctccagccgcatcggcatgatcgtgctcttctacaccaagtccaagcggcctgagctgagcgtcaagcgcatggccgagcgtttgctgggcgagtggagtcggcccatcctgaaccgcaccaacgactacaagaagcgctttgtcgagacgcgcgaatatgactaccaggaagccaaacgtcgccagatcctatccaaggggggtagtcagacacagctcccccaccgaccgggcgatgcccgcgacgcccgaattcaagaggctcttgcccccaagaatcccagcaaccgcgcccgtatcagcggactgccccaggcctacacgatcgcgcctaagagtacgtatgatccgagtcgccagggcccagagttccgccctatcggtgccagcggcttcgactccttcaagaagattgtgggcatgaagaagaagaagaaggactag

SEQ ID NO: 4693 - protein, 421 aa, Muscodor strobelii
  misc_feature: SGI Peptide ID NO. 561264
  misc_feature (178)..(420): Pfam Id: PF05909 Pfam Desc: IWS1 C-terminus
  misc_feature (178)..(340): Pfam Id: PF05909 Pfam Desc: IWS1 C-terminus
  misc_feature (1)..(419): NCBI GI: 46111831 Blast Desc: FG02797.1 [Gibberella zeae PH-1] gi|84029316|sp|Q4IJ11.1|IWS1_GIBZE RecName: Full=Transcription factor IWS1
  misc_feature (1)..(421): NCBI GI: 256721896 Blast Desc: [Nectria haematococca mpVI 77-13-4]
  misc_feature (33)..(419): NCBI GI: 261353349 Blast Desc: transcription factor IWS1 [Verticillium albo-atrum VaMs.102]
  misc_feature (1)..(413): NCBI GI: 116192803 Blast Desc: CHGG_06119 [Chaetomium globosum CBS 148.51] gi|88182032|gb|EAQ89500.1| CHGG_06119 [Chaetomium globosum CBS 148.51]
  misc_feature (28)..(420): NCBI GI: 154310694 Blast Desc: BC1G_06821 [Botryotinia fuckeliana B05.10] gi|150851361|gb|EDN26554.1| BC1G_06821 [Botryotinia fuckeliana B05.10]
  misc_feature (28)..(420): NCBI GI: 156058534 Blast Desc: SS1G_03279 [Sclerotinia sclerotiorum 1980] gi|154701066|gb|EDO00805.1| SS1G_03279 [Sclerotinia sclerotiorum 1980]
  misc_feature (32)..(419): NCBI GI: 39955417 Blast Desc: MGG_09004 [Magnaporthe grisea 70-15] gi|149209351|ref|XP_001522050.1| MGCH7_ch7g167 [Magnaporthe grisea 70-15] gi|86196122|gb|EAQ70760.1| MGCH7_ch7g167 grisea
  misc_feature (1)..(420): NCBI GI: 171684171 Blast Desc: protein product [Podospora anserina] gi|170942046|emb|CAP67698.1| protein product [Podospora anserina]
  misc_feature (9)..(420): NCBI GI: 85091939 Blast Desc: transcription factor IWS1 [Neurospora crassa OR74A] gi|74619562|sp|Q870S2.1|IWS1_NEUCR RecName: Full=Transcription factor iws-1 gi|28920548|gb|EAA29911.1| transcription factor IWS1
  misc_feature (40)..(412): NCBI GI: 121701535 Blast Desc: transcriptional elongation factor Iws1, [Aspergillus clavatus NRRL 1] gi|119397175|gb|EAW07606.1| transcriptional elongation factor Iws1, [Aspergillus clavatus NRRL 1]
  misc_feature: Useful for introducing or modulating the production of volatile compounds
MSDGESPARDEMPHDEAPADERGDYDLEAAADSDRDSDALSDVDEDQFDDYDPSAVRIEERPVEIDEDVARTLKASKRKGVATKKPKEGRREKKRTRDRDDNDGADGEILTTKRARKAGGGGGESNRKAASPEPENEENLTPEERRRRAIERAAAKEKPKIKRRKKRDEDDLEDEMDEKIADLKLRMENACKADNTAREAGQPAIHKLKLLPEVTALLNSNNLQSLVVDPDTNFLEHVKFFLEPLSDGSLPAFNIQRDIFQALLNLPIEKEALRSSRIGMIVLFYTKSKRPELSVKRMAERLLGEWSRPILNRTNDYKKRFVETREYDYQEAKRRQILSKGGSQTQLPHRPGDARDARIQEALAPKNPSNRARISGLPQAYTIAPKSTYDPSRQGPEFRPIGASGFDSFKKIVGMKKKKKD

SEQ ID NO: 4694 - DNA, 2147 bp, Muscodor strobelii
  misc_feature: SGI EST ID NO. CUFF.11913.0
  misc_feature: Variant of the nucleotide sequence at SEQ ID NO 4692
tctaaacgtcagttcattccatacatgtacctaatatttcaacttttgcggagagcaaacaaccaaacatccaaacattcgctgccacctgcatagctcaaccactcctgtcgttcttcatccgcgcacgggcatcagaataggcatcgaagtcgaacctctcagaatatctaggttcacatctatcatccaccatgtcggacggcgagtcgccggctcgcgacgagatgccgcacgacgaggctcctgccgacgagcgaggcgactacgaccttgaagccgcagccgattcagacagagactccgatgccctgtccgacgtagatgaggaccagttcgacgactacgatccctcggccgtgcgaatcgaggagagaccagtggagatcgacgaggatgtggcacgaactctcaaggcctccaagcgcaagggcgtcgccaccaaaaagcccaaggagggccgtcgtgagaagaagcgcacccgcgaccgcgacgacaacgacggcgccgacggcgagatcttgactactaagcgagctcgcaaggccggcggtggtggtggcgagtccaatcgcaaagcagcctcgcccgagcccgagaacgaggagaacctgacgcccgaggaacgacgccgccgggccatcgagcgtgccgccgccaaggagaagcccaagatcaagagacgcaagaagagagacgaagatgacctcgaagatgagatggacgagaagattgccgacctcaagctgcgcatggagaacgcctgcaaagccgacaacaccgcccgcgaggccggccagcccgccatccacaagctcaagctgctgcccgaagtcaccgccctgctcaacagcaacaacctccagagcctcgtcgtcgaccccgacaccaacttcctcgagcacgtcaagttcttcctcgagcctcttagcgatggctctctcccggccttcaacatccagcgcgacatcttccaggccctgctcaacctgcccatcgagaaggaggctctgcgctccagccgcatcggcatgatcgtgctcttctacaccaagtccaagcggcctgagctgagcgtcaagcgcatggccgagcgtttgctgggcgagtggagtcggcccatcctgaaccgcaccaacgactacaagaagcgctttgtcgagacgcgcgaatatgactaccaggaagccaaacgtcgccagatcctatccaaggggggtagtcagacacagctcccccaccgaccgggcgatgcccgcgacgcccgaattcaagaggctcttgcccccaagaatcccagcaaccgcgcccgtatcagcggactgccccaggcctacacgatcgcgcctaagagtacgtatgatccgagtcgccagggcccagagttccgccctatcggtgccagcggcttcgactccttcaagaagattgtgggcatgaagaagaagaagaaggactagaactcttcttccaagaagaagagagagtcgccagtttatttgtgagctgtctcattcatctcttggttgttgtaagaggcaacgggacttacaggagaaggagactgcaagcggcgactcaaacaaaacacagaagggtttacatggtttatgcatcaataagaggattggacgtgcgttcaggagttcgggcgtcatgtatttttaagacacgccgtcagtttgtgcccatggcgtacgtggtctgttacactatcttctgacaattgctgaacttcttatccttggcatttagaaactttggatgaccatggttgtgccgtgatctttgacgacgcccctaaaattgtactcagattcgtgttctgaagttttgcgtggatcaacttggtgcgctcaacaggctttacgctatcatcatgataggttgcttggtcacaggaaaaatttcgcaaaggttgctttgcatcttgattctctcgtctcttaaattcatgagatcatagacccgttttatccaggcatttcgagatgggtgtgtgcaacacaagcttgacttacaaactggtgttaatagaagtcatggttccgcgagtgcgacattactatttcgtagctgaatatcgctcgcatgacaaccctttcatattcaacgacaaagctaatcggatatccgatcgactgagc

SEQ ID NO: 4695 - DNA, 282 bp, Muscodor strobelii
  misc_feature: SGI cDNA ID NO. 561265
  misc_feature: Elevated expression when VOC is produced
  misc_feature: Encodes the peptide sequence at SEQ ID NO 4696
atgaacccgcgtgccgatccgaagacttggccgcctgtggccatcatcgggctctcgacattgcttgtcaccgcggtattggtaccttgtggctggctggtgcagcgatattgggtacctcaagatgccaattcttcaagaacagatcttgagcgtcaggacttcgacatgccgatacaaccgccagagacgcttatgcagcatggagagataagcaatgctgccgatctcgcccaagatgcaagaggaagtgcaactttgcacatgccgaatgcagagtga

SEQ ID NO: 4696 - protein, 93 aa, Muscodor strobelii
  misc_feature: SGI Peptide ID NO. 561265
  misc_feature: Useful for introducing or modulating the production of volatile compounds
MNPRADPKTWPPVAIIGLSTLLVTAVLVPCGWLVQRYWVPQDANSSRTDLERQDFDMPIQPPETLMQHGEISNAADLAQDARGSATLHMPNAE

SEQ ID NO: 4697 - DNA, 1805 bp, Muscodor strobelii
  misc_feature: SGI EST ID NO. CUFF.11894.0
  misc_feature: Variant of the nucleotide sequence at SEQ ID NO 4695
atttaggttaggtactcaacacttgagcactaatgttcaagggcacactggcgtgccatggtgcccgcagcgccacggtgggcttacaccctggagctggaggtgcgcaccttcagacggcagggtggcatcaagtaaggtcaatcgtcaggaggggagctgactgacacgaatcacctgcttcggcaggatgcaacgatgtgaaagcgcggcggacaagcggacgtatttaaggaaatgctcgtccaattaagactaccgtctgaggcagtggtagacagtaggaaagcctcatgttgagcaggggaggcccccttttgctcgttcggttagctctaaacaccgccatgtaactcagtctatgcggacagtcgacgattggtgtaggccccaagaatttaggaaacctgcgagactctgggggactatttctacgtagtatgaacctggatcttgacgagcgggtcgaggcacaggcagatgctagccggtgtgcgtctgtccaatcaaagactattaaatcctccattgtcatgctgctgctcctctgtcgaaagatgacgagcacgagcgcgacgggttcatggcatttttgaggctgagacttacctacttcgccactttaagcaaacagcaggctggtgaggttgcggagggtccctaggttgcgtaggtccctagactagacgacaattggaagacgttgttcaagcggtgaaggattatcatgcacacatgctgatgggtagcaatgggtgacaatacaaatgcacatttcaagtcacgaacgtgatggactatcagagtaagaatagagttatctataaagaagattcgaaatgcccccagaaggaagaccagctcgaacaacagagacacaaaattccccgtgagcaagcaaggagtctcgagaaatcaaacgcaatcacttgactgcagtctctatgctgctgtaactgcctattcttcttagtcatgaacccgcgtgccgatccgaagacttggccgcctgtggccatcatcgggctctcgacattgcttgtcaccgcggtattggtaccttgtggctggctggtgcagcgatattgggtacctcaagatgccaattcttcaagaacagatcttgagcgtcaggacttcgacatgccgatacaaccgccagagacgcttatgcagcatggagagataagcaatgctgccgatctcgcccaagatgcaagaggaagtgcaactttgcacatgccgaatgcagagtgagggctatatatgaagactccgatgttgaagctcatacatctagatatacagaatatatggacttcatgttacaggtatcaatgtcccaagtatgtgtaaaggggatcaatgtcaagatatgatatgctatcggccatttctacgtagcgatctactatgattaagatgatcgacaaagataaactcgggaaatgataatttgatcgcatccaaatgctaagagagtctaactctgcacaccaccatcaagacgatcaagtacagactttcgattttttatatggcgatccgaacttcgacgatttgagaagcagaaagacctcgaagtcttttactggccgtgccagaacaccaagtttccacaacgttgttactaactccttgagactaaaagcttagaaaatagagttcacataaatagacggtaccatgatctacttaccaagctagcattcccaattcgtcggaagcagagatcggggcctagctatgtatagcgcgtggcaataatggtgacaaaatcggcttctcagcgatcgggagtctac

SEQ ID NO: 4698 - DNA, 1650 bp, Muscodor strobelii
  misc_feature: SGI cDNA ID NO. 561266
  misc_feature: Elevated expression when VOC is produced
  misc_feature: Encodes the peptide sequence at SEQ ID NO 4699
atggccttcaaagagaaaacgttgacgtccacgaaactgtcgctcgtcacacacgatgatctagccgagatgtcccacagaggagaacttgagagcttcctaaagcagttgtctgaggcatggccaaccagctttggcgagctcacgaatcaaggctttcgatggcagaagggatctcaacatgacgatggcacagtcgtcaattgccgaaagtctgtctttggtgactaccagcaaaaagtcaacgcgctgtccagctttgaagccgtgtttctatctccttctgacaacacgctatggcagatcatgcccagaatctccaatactgttttgacgatgcgaactgtcgcctttctcgagagcctgttcgctcccaccgatattgccggtgcttttggcaccatcagcgagtggttcccaatccaaacgacgacgccggctttacacacttcagggagcttagggaacggggactggctctgtgcccagttgaagctacgaacttgcattcctgacgagaccaaacgccgagtgaataaattcaaaaacgcgtggggcatctcccctgaatgcattggtaaccctctccagagacaagcagcaagaattcccgattcagctgaaggcaccttccatttcgctatcgagtttctgctctccatttccattgtgctgaggaagcaacctcgacatggcgcgtcgtccgcattgaaatatgacattgttgtctggatagactacaatgctgatctcgagaatcggacacgcagccgttttcttctacctgtattgacggaaagagtcgatctcgccctcgaactcgagagctgcggagctggcggggagggcttctttcaagttctggtcagcctcgcgaaggtgatcgaccactggcgaatatgttgggatactatgatggataaaattgatgacataatcagcattcagcttcaagacacactcgacaagaagcgatggtcggagctgatgttcgatgattcattccaactatcagaacagtactttaccatcttacagctcctgcgcatattccagaactggattaccgaaacggagaatgggttccatagtttcggcgaggagcttgttcgtcagtcagagatgtggaaaacttcccgcggcgccatggacgatgtcgagtggccattgaacgtcgatattttgcggagccacattaagaaaatcagaaatttcttcgagctccgtgttgcacccttgaaagaacgaatcaagaaaaaggaggaagaggttgggagtttgcagagtgcgcttctgactgcatcttcattacgcgaggcgctcaaggcaaaaagtctcaacttgtacattggagtcttcaccactgtgactgtgttctttactccgctaggattcattgcgactttctgggcgattccatatatggggacggcatccaccacaacagcgccgactggtttcatagcaagctttgtcacgataccgttgcttacatacgtactatcgggactcattgtcttctacttttgggcgcgttcgtcagggagcccctgggtgtggaaatggcctggagatgtcattgacgacatctggtctctcgtgaaacgaggggtttgtggcgcaagagagaaacagcatctcgatgtttaa

SEQ ID NO: 4699 - protein, 549 aa, Muscodor strobelii
  misc_feature: SGI Peptide ID NO. 561266
  misc_feature (286)..(466): NCBI GI: 46134027 Blast Desc: FG09153.1 [Gibberella zeae PH-1]
  misc_feature (297)..(467): NCBI GI: 119501615 Blast Desc: NFIA_044860 [Neosartorya fischeri NRRL 181] gi|119415730|gb|EAW25667.1| NFIA_044860 [Neosartorya fischeri NRRL 181]
  misc_feature (283)..(502): NCBI GI: 171676599 Blast Desc: protein product [Podospora anserina] gi|170936366|emb|CAP61024.1| protein product [Podospora anserina]
  misc_feature (289)..(501): NCBI GI: 154291860 Blast Desc: BC1G_14946 [Botryotinia fuckeliana B05.10] gi|150846554|gb|EDN21747.1| BC1G_14946 [Botryotinia fuckeliana B05.10]
  misc_feature (330)..(519): NCBI GI: 116198769 Blast Desc: [Chaetomium globosum CBS 148.51] gi|88178819|gb|EAQ86287.1| [Chaetomium globosum CBS 148.51]
  misc_feature (283)..(490): NCBI GI: 116197541 Blast Desc: [Chaetomium globosum CBS 148.51] gi|88178205|gb|EAQ85673.1| [Chaetomium globosum CBS 148.51]
  misc_feature (413)..(494): NCBI GI: 116194133 Blast Desc: [Chaetomium globosum CBS 148.51] gi|88182697|gb|EAQ90165.1| [Chaetomium globosum CBS 148.51]
  misc_feature (297)..(507): NCBI GI: 225684196 Blast Desc: [Paracoccidioides brasiliensis Pb03]
  misc_feature (291)..(507): NCBI GI: 239606331 Blast Desc: conserved [Ajellomyces dermatitidis ER-3]
  misc_feature (248)..(472): NCBI GI: 119482375 Blast Desc: NFIA_092800 [Neosartorya fischeri NRRL 181] gi|119409370|gb|EAW19319.1| conserved [Neosartorya fischeri NRRL 181]
  misc_feature: Useful for introducing or modulating the production of volatile compounds
MAFKEKTLTSTKLSLVTHDDLAEMSHRGELESFLKQLSEAWPTSFGELTNQGFRWQKGSQHDDGTVVNCRKSVFGDYQQKVNALSSFEAVFLSPSDNTLWQIMPRISNTVLTMRTVAFLESLFAPTDIAGAFGTISEWFPIQTTTPALHTSGSLGNGDWLCAQLKLRTCIPDETKRRVNKFKNAWGISPECIGNPLQRQAARIPDSAEGTFHFAIEFLLSISIVLRKQPRHGASSALKYDIVVWIDYNADLENRTRSRFLLPVLTERVDLALELESCGAGGEGFFQVLVSLAKVIDHWRICWDTMMDKIDDIISIQLQDTLDKKRWSELMFDDSFQLSEQYFTILQLLRIFQNWITETENGFHSFGEELVRQSEMWKTSRGAMDDVEWPLNVDILRSHIKKIRNFFELRVAPLKERIKKKEEEVGSLQSALLTASSLREALKAKSLNLYIGVFTTVTVFFTPLGFIATFWAIPYMGTASTTTAPTGFIASFVTIPLLTYVLSGLIVFYFWARSSGSPWVWKWPGDVIDDIWSLVKRGVCGAREKQHLDV

SEQ ID NO: 4700 - DNA, 6439 bp, Muscodor strobelii
  misc_feature: SGI EST ID NO. CUFF.12194.0
  misc_feature: Variant of the nucleotide sequence at SEQ ID NO 4698
atttatcaacaaactagagcctagcacacgaatgtcatatttgacatatgttctcactcgcggtgttgtctgtacgtggccagctaatccgtgagacgaagaaagactctgaagtcaagctgcatacaaaagctcatttagacgtaaaaagattcgtcatgacaagtctgtgttcagcaactacacgacgtatatgcagtgcgctctcatgagcaactaaattaacaacaataacaattccagccgtaccacgcgacgcaatgcaagttttttataccccttttccaacccaaagcagacccaacacgtatcccacataggtctcaatatcgcttcgttggactcctactcttagtcggactcctgcttctctcgccctttgatggactccgcctgcctgatggggtctccggcggtggcattatgcttctgaatttcgggggcgatgcgtctgtgtctggcgtctcgtcgttttggatcatgtgtcttgaattaaaatgtctaggtgtctgcggctgtatggcttgccagtacacctgttgcggtggagcggcatgttcgctcgggtagggagttggaggaggatgtcgcgaaaagtcggggtagtcgtgcgcgctcttgtatagggatcggccgctgaagaggaagactgcgaacaaaagaactagtaaagcctatgatcattgttagtcaatgggtctctagttgttataagtgtccaggtagctacggctgtctggatacagacgtacgatggtcttataggacatggtgtccacaatctcgttgatgatctcgacgatgttcttggcgccgagctggatcttcttgaggttgtcggggttcctgttcatgcaggtgtaccactggtcgcacagctcgtacatggcgggcagacgctgctcgacgggggcgcacttgttgtcgatgtagttggagcggcacttggccatctcgtcgaggaactcgtcgcggacggtggagcgggcggcagcgaagtcctcgcgcaggccggcgatgatggcccagacgatccagaaggtgccggtgacgcagacaaggctgaaggtgaagttgagccagtagccgaggatgctgggcgcgtagggatggcgctgcagggtcgccaggaagttgcccagcacgccgtctctcctgttgttgtcgcgcttcttctccttctttccgttgccgggctggaaggtgctctcgtcggactcgtagtcggactcgtcgccctcgccgggctggatgtagggcaggcggtagccgctgatgtccttgtcggcgttgtagcgcttgcgcttgcggaccttgtcgcgcgaggcaaacaccgtcttggcgatctcgcccttgccgctgggcttcttgccgaacagggcgccccgcctgcccgcggtggccggggtgatggtcatgtgggcgaggtcgcggtcgtagtcgtcgtcgtggcggtcgggggtgtcgggcaggtcggagcggtcgctagccgcgggactggactcggcggcagacagctctgacagcgcatccatgtcgaagggcttgcgcggcgtcgtgaaggccgggttgcggaaggcgggtgcaggcgcagtgctggtccggggcaggcgaccgctggaaaagatggacggcgtctctctctggcccccctgctggaagggagtgggaggcagaggcttggacggggtgctctgtgtccgccctaggttgctgctgtgttgtgatgtgaaagatgcaaaacctgacgagccaccgaaagcatctatctccagagtgttagttattggggctcggaattgaatcttgactagacaattaataattattaggctgacttctctcctgtgctcgcttggtggactgcgcaaagggactggagggatccatgggtccgtcattctggtattcccagtccatcggagactcgaatgtgcgtctgtccatgatgctgtagtcaacgagcagcgacaaggtggtgacgacaatgaggataggtagtgtttatcgcagctcggttgccgcagtgcgcaagcatgcaaccacaatgtgacaaagctcccgcaccaaagcgcaagccgcagtggtgatgcctgaggtacacaccgtgaaaacaattgactctttctttgctcctcttcctctagatgatgcccgacatgtcttccaaagcagctagtgacgaaagcaacaatgcagctccatgtcaattatgaagtaaacaaatccttgcgccacattcccagccatgacgactttaggtaacgacggtcggctgtggcgctttcgtgacccgcccgagttttctgttacctgcatacctagctcgagctctagcacttcacctagcttgacaagcttgacttcttctgcctttgtcgtgtctgcgaatacaccgcatactactaaaacttctatttatttctactgcgctgcatctatgtaatgattcccgatagtcaggtacatgagcgtttgcgccgactaccctaccgtcttatgatttcaccctgtgctagcagcaatgttcagatttgatctcgttctactatgctcggatatcatcttgaaacgaaatggcttcatctcccaccttgacaatacaattccctagatgagacgctgccgaagccgtcgaaaggccttggcttactgatatacgtgttgttccatggttgatggtctctgctaccttcaccgccggtccccgtttgcttgtttgatacttcgtcaacttatcgctaccgccatgaataaaaggttagcaaaaggcgaattagctttcaatcaattctggcggatgtgatggtcaaactcgattccttcgccacttattttcttggtcctgcggagggagatgctcacaacggtcccaagccgctcaattggcgtttggggagtcgcgcatggggtcatgcatcaaacaggtgggattcgcagctgcagtgcaggcgtaccttgcaaacggacgtgaggctgtgttggttgccttgctgtctgccttttactctgagctgttcaaggcctgaattcgacatgggcagaggattatatcgcatttcgttgccaaaatgttttgtcatccgcaatggttccctttggaatctgattcagctttgcagctaacttgctcaccatggaggcttcatctcgtgacatgatattaaacaatcgacgaccgtcaaagccggcgtcacatacgaatatcaacttctcgtatccaggtcagacctctttcattgatgaaaatgcggcatcaagaagcaggcttcctcatcacgttgccacgcgagagaaaccagtatctgataagataggtggtgaagagcatggaggagacacacccaatcgatcaactcagaggctgtctatcaacgaaattctctcgcaccgacatgactcttaccagaaactgaatcagaatggccacaggccggcagagccttcggtaccgaattgtagtacatcgaatagcttgacgcatccaggtcgcacgcaaatagatactcgatcaacaacctctcctattgacagcactgatgaagacggtgatgcattcacagccccttaccacggacagtcgcaggctagcaaggcctgtcaaaatccagtcaacccatcgagccggcctcaatctacactgataccgagagatttttacgaactttttattcactgtgtcccgactgatggacgactcgaacatctgcgtggaaggtggcacgacgatagtcttcttcgcgctcgtttgttgtatgctcgacctttcgtgatggccttcaaagagaaaacgttgacgtccacgaaactgtcgctcgtcacacacgatgatctagccgagatgtcccacagaggagaacttgagagcttcctaaagcagttgtctgaggcatggccaaccagctttggcgagctcacgaatcaaggctttcgatggcagaagggatctcaacatgacgatggcacagtcgtcaattgccgaaagtctgtctttggtgactaccagcaaaaagtcaacgcgctgtccagctttgaagccgtgtttctatctccttctgacaacacgctatggcagatcatgcccagaatctccaatactgttttgacgatgcgaactgtcgcctttctcgagagcctgttcgctcccaccgatattgccggtgcttttggcaccatcagcgagtggttcccaatccaaacgacgacgccggctttacacacttcagggagcttagggaacggggactggctctgtgcccagttgaagctacgaacttgcattcctgacgagaccaaacgccgagtgaataaattcaaaaacgcgtggggcatctcccctgaatgcattggtaaccctctccagagacaagcagcaagaattcccgattcagctgaaggcaccttccatttcgctatcgagtttctgctctccatttccattgtgctgaggaagcaacctcgacatggcgcgtcgtccgcattgaaatatgacattgttgtctggatagactacaatgctgatctcgagaatcggacacgcagccgttttcttctacctgtattgacggaaagagtcgatctcgccctcgaactcgagagctgcggagctggcggggagggcttctttcaagttctggtcagcctcgcgaaggtgatcgaccactggcgaatatgttgggatactatgatggataaaattgatgacataatcagcattcagcttcaagacacactcgacaagaagcgatggtcggagctgatgttcgatgattcattccaactatcagaacagtactttaccatcttacagctcctgcgcatattccagaactggattaccgaaacggagaatgggttccatagtttcggcgaggagcttgttcgtcagtcagagatgtggaaaacttcccgcggcgccatggacgatgtcgagtggccattgaacgtcgatattttgcggagccacattaagaaaatcagaaatttcttcgagctccgtgttgcacccttgaaagaacgaatcaagaaaaaggaggaagaggttgggagtttgcagagtgcgcttctgactgcatcttcattacgcgaggcgctcaaggcaaaaagtctcaacttgtacattggagtcttcaccactgtgactgtgttctttactccgctaggattcattgcgactttctgggcgattccatatatggggacggcatccaccacaacagcgccgactggtttcatagcaagctttgtcacgataccgttgcttacatacgtactatcgggactcattgtcttctacttttgggcgcgttcgtcagggagcccctgggtgtggaaatggcctggagatgtcattgacgacatctggtctctcgtgaaacgaggggtttgtggcgcaagagagaaacagcatctcgatgtttaatcttttccatctcagggtttgatctaaaatgcaagtatcaggggctctttctattttggatggtactgttccgccatctcccagaccagcggctatccattcgagtgcgatcagctctcaaagttgatcattattgaatccaagatccttggctttgtttagacaatacaatatccagtcccgaacactgccgaacacgcaggcggaatgtgtcgcaatgcaggctttctggacatttcaaccaccggtcgatttatcaccgaggcagtgagtcaatcgcatggtacggaaatattttcctcggaccgtctcatagtagcaagcacgcttcccataccaaacatttcacatacgacacgatggagcaacggtcatgaaagtaacgtaccatataagcataaaaatactaaggcaatttcgagaagtaatggcagaagagtgactaaatttgaatctcctcatcgtcacaaactcctatccattgcgctgtactctcaggctacatgctcacggcagtgcataactcaacaagcggacgtacccctctaacccttgttacgaacctcttcgcgatgatatgcagcatctctcctggaagaaaaagaacactcctcgcagattctggtctgttggtcctgctgcttttgggagtagtctctgttgtggcatttacaagctagcccagtagcgaagaggagggttgtggttaggagggaggagtgcattttgatgaatgagtgcgagggcgattgttcggtgattgttttgagttgagagttggttattttgtatgctggatgttggattgcggtgatggtaattagagagaaagttgttggtaggagagatgctggctcttctatgaacgatctctcgtaacctcgtagcccaaggaaagaggctatacgcttacatcccaatcgtgactagttcgtcgtgtgaaggagtacgttgcccacctatacctactactctcggcgctgattgctagtgttgtctcatcgacctatcacctcg

SEQ ID NO: 4701 - DNA, 1473 bp, Muscodor strobelii
  misc_feature: SGI cDNA ID NO. 561267
  misc_feature: Reduced expression when VOC is produced
  misc_feature: Encodes the peptide sequence at SEQ ID NO 4702
atggacagacgcacattcgagtctccgatggactgggaataccagaatgacggacccatggatccctccagtccctttgcgcagtccaccaagcgagcacaggagagaaatgctttcggtggctcgtcaggttttgcatctttcacatcacaacacagcagcaacctagggcggacacagagcaccccgtccaagcctctgcctcccactcccttccagcaggggggccagagagagacgccgtccatcttttccagcggtcgcctgccccggaccagcactgcgcctgcacccgccttccgcaacccggccttcacgacgccgcgcaagcccttcgacatggatgcgctgtcagagctgtctgccgccgagtccagtcccgcggctagcgaccgctccgacctgcccgacacccccgaccgccacgacgacgactacgaccgcgacctcgcccacatgaccatcaccccggccaccgcgggcaggcggggcgccctgttcggcaagaagcccagcggcaagggcgagatcgccaagacggtgtttgcctcgcgcgacaaggtccgcaagcgcaagcgctacaacgccgacaaggacatcagcggctaccgcctgccctacatccagcccggcgagggcgacgagtccgactacgagtccgacgagagcaccttccagcccggcaacggaaagaaggagaagaagcgcgacaacaacaggagagacggcgtgctgggcaacttcctggcgaccctgcagcgccatccctacgcgcccagcatcctcggctactggctcaacttcaccttcagccttgtctgcgtcaccggcaccttctggatcgtctgggccatcatcgccggcctgcgcgaggacttcgctgccgcccgctccaccgtccgcgacgagttcctcgacgagatggccaagtgccgctccaactacatcgacaacaagtgcgcccccgtcgagcagcgtctgcccgccatgtacgagctgtgcgaccagtggtacacctgcatgaacaggaaccccgacaacctcaagaagatccagctcggcgccaagaacatcgtcgagatcatcaacgagattgtggacaccatgtcctataagaccatcgctttactagttcttttgttcgcagtcttcctcttcagcggccgatccctatacaagagcgcgcacgactaccccgacttttcgcgacatcctcctccaactccctacccgagcgaacatgccgctccaccgcaacaggtgtactggcaagccatacagccgcagacacctagacattttaattcaagacacatgatccaaaacgacgagacgccagacacagacgcatcgcccccgaaattcagaagcataatgccaccgccggagaccccatcaggcaggcggagtccatcaaagggcgagagaagcaggagtccgactaagagtaggagtccaacgaagcgatattga

SEQ ID NO: 4702 - protein, 490 aa, Muscodor strobelii
  misc_feature: SGI Peptide ID NO. 561267
  misc_feature (1)..(488): NCBI GI: 256721932 Blast Desc: NECHADRAFT_59551 [Nectria haematococca mpVI 77-13-4]
  misc_feature (1)..(488): NCBI GI: 46111833 Blast Desc: FG02798.1 [Gibberella zeae PH-1]
  misc_feature (43)..(490): NCBI GI: 116192801 Blast Desc: CHGG_06118 [Chaetomium globosum CBS 148.51] gi|88182031|gb|EAQ89499.1| CHGG_06118 [Chaetomium globosum CBS 148.51]
  misc_feature (2)..(490): NCBI GI: 39955406 Blast Desc: MGG_09003 [Magnaporthe grisea 70-15] gi|149209349|ref|XP_001522049.1| MGCH7_ch7g166 [Magnaporthe grisea 70-15] gi|86196121|gb|EAQ70759.1| MGCH7_ch7g166 grisea
  misc_feature (1)..(490): NCBI GI: 171684173 Blast Desc: protein product [Podospora anserina] gi|170942047|emb|CAP67699.1| protein product [Podospora anserina]
  misc_feature (1)..(478): NCBI GI: 85091941 Blast Desc: NCU09204 [Neurospora crassa OR74A] gi|28920549|gb|EAA29912.1| [Neurospora crassa OR74A] gi|29150096|emb|CAD79657.1| conserved [Neurospora crassa]
  misc_feature (3)..(476): NCBI GI: 154310696 Blast Desc: BC1G_06822 [Botryotinia fuckeliana B05.10] gi|150851362|gb|EDN26555.1| BC1G_06822 [Botryotinia fuckeliana B05.10]
  misc_feature (1)..(414): NCBI GI: 67542037 Blast Desc: AN7182.2 [Aspergillus nidulans FGSC A4] gi|40742244|gb|EAA61434.1| AN7182.2 [Aspergillus nidulans FGSC A4] gi|259483484|tpe|CBF78911.1| TPA: nuclear envelope protein
  misc_feature (1)..(404): NCBI GI: 145249012 Blast Desc: An14g02190 [Aspergillus niger] gi|134081520|emb|CAK41956.1| protein product [Aspergillus niger]
  misc_feature (1)..(449): NCBI GI: 119487399 Blast Desc: nuclear envelope protein Brr6, [Neosartorya fischeri NRRL 181] gi|119410649|gb|EAW20595.1| nuclear envelope protein Brr6, [Neosartorya fischeri NRRL 181]
  misc_feature: Useful for introducing or modulating the production of volatile compounds
MDRRTFESPMDWEYQNDGPMDPSSPFAQSTKRAQERNAFGGSSGFASFTSQHSSNLGRTQSTPSKPLPPTPFQQGGQRETPSIFSSGRLPRTSTAPAPAFRNPAFTTPRKPFDMDALSELSAAESSPAASDRSDLPDTPDRHDDDYDRDLAHMTITPATAGRRGALFGKKPSGKGEIAKTVFASRDKVRKRKRYNADKDISGYRLPYIQPGEGDESDYESDESTFQPGNGKKEKKRDNNRRDGVLGNFLATLQRHPYAPSILGYWLNFTFSLVCVTGTFWIVWAIIAGLREDFAAARSTVRDEFLDEMAKCRSNYIDNKCAPVEQRLPAMYELCDQWYTCMNRNPDNLKKIQLGAKNIVEIINEIVDTMSYKTIALLVLLFAVFLFSGRSLYKSAHDYPDFSRHPPPTPYPSEHAAPPQQVYWQAIQPQTPRHFNSRHMIQNDETPDTDASPPKFRSIMPPPETPSGRRSPSKGERSRSPTKSRSPTKRY

SEQ ID NO: 4703 - DNA, 5032 bp, Muscodor strobelii
  misc_feature: SGI EST ID NO. CUFF.12193.1
  misc_feature: Variant of the nucleotide sequence at SEQ ID NO 4701
cttcctcctttttcttgattcgttctttcaagggtgcaacacggagctcgaagaaatttctgattttcttaatgtggctccgcaaaatatcgacgttcaatggccactcgacatcgtccatggcgccgcgggaagttttccacatctctgactgacgaacaagctcctcgccgaaactatggaacccattctccgtttcggtaatccagttctggaatatgcgcaggagctgtaagatggtaaagtactgttctgatagttggaatgaatcatcgaacatcagctccgaccatcgcttcttgtcgagtgtgtcttgaagctaaacatgtcgtctcattagtcactacttattctcttgggtgcttgaaagccacatacctgaatgctgattatgtcatcaattttatccatcatagtatcccaacatattcgccagtggtcgatcaccttcgcgaggctgaccagaacttgaaagaagccctccccgccagctccgcagctctcgagttcgagggcgagatcgactctttccgtcaatacaggtagaagaaaacggctgcgtgtccgattctcgagatcagcattgtagtctatccagacaacaatgtcatatttcaatgcggacgacgcgccatgtcgaggttgcttcctcagcacaatggaaatggagagcagaaactcgatagcgaaatggaaggtgccttcagctgaatcgggaattcttgctgcttgtctctggagagggttaccaatgcattcaggggagatgccccacgcgtttttgaatttattcactcggcgtttggtctcgtcaggaatgcaagttcgtagcttcaactgggcacagagccagtccccgttccctaagctccctgaagtgtgtaaagccggcgtcgtcgtttggattgggaaccactcgctgatggtgccaaaagcaccggcaatatcggtgggagcgaacaggctctcgagaaaggcgacagttcgcatcgtcaaaacagtattggagattctgggcatgatctgcctgagtggtggtagaaaagtgtcagcaaggctatatatttaatacgccattccttcacaattttcaatagctgaaccgtccaacgactcaccatagcgtgttgtcagaaggagatagaaacacggcttcaaagctggacagcgcgttgactttttgctggtagtcaccaaagacagactttcggcaattgacgactgtgccatcgtcatgttgagatcccttctgccatcgaaagccttgattcgtgagctcgccaaagctggttggccatgcctcagacaactgctttaggaagctctcaagttctcctctgtgggacatctcggctagatcatcgtgtgtgacgagcgacagtttcgtggacgtcaacgttttctctttgaaggccatcacgaaaggtcgagcatacaacaaacgagcgcgaagaagactatcgtcgtgccaccttccacgcagatgttcgagtcgtccatcagtcgggacacagtgaataaaaagttcgtaaaaatctctcggtatcagtgtagattgaggccggctcgatgggttgactggattttgacaggccttgctagcctgcgactgtccgtggtaaggggctgtgaatgcatcaccgtcttcatcagtgctgtcaataggagaggttgttgatcgagtatctatttgcgtgcgacctggatgcgtcaagctattcgatgtactacaattcggtaccgaaggctctgccggcctgtggccattctgattcagtttctggtaagagtcatgtcggtgcgagagaatttcgttgatagacagcctctgagttgatcgattgggtgtgtctcctccatgctcttcaccacctatcttatcagatactggtttctctcgcgtggcaacgtgatgaggaagcctgcttcttgatgccgcattttcatcaatgaaagaggtctgacctggatacgagaagttgatattcgtatgtgacgccggctttgacggtcgtcgattgtttaatatcatgtcacgagatgaagcctccatggtgagcaagttagctgcaaagctgaatcagattccaaagggaaccattgcggatgacaaaacattttggcaacgaaatgcgatataatcctctgcccatgtcgaattcaggccttgaacagctcagagtaaaaggcagacagcaaggcaaccaacacagcctcacgtccgtttgcaaggtacgcctgcactgcagctgcgaatcccacctgtttgatgcatgaccccatgcgcgactccccaaacgccaattgagcggcttgggaccgttgtgagcatctccctccgcaggaccaagaaaataagtggcgaaggaatcgagtttgaccatcacatccgccagaattgattgaaagctaattcgccttttgctaaccttttattcatggcggtagcgataagttgacgaagtatcaaacaagcaaacggggaccggcggtgaaggtagcagagaccatcaaccatggaacaacacgtatatcagtaagccaaggcctttcgacggcttcggcagcgtctcatctagggaattgtattgtcaaggtgggagatgaagccatttcgtttcaagatgatatccgagcatagtagaacgagatcaaatctgaacattgctgctagcacagggtgaaatcataagacggtagggtagtcggcgcaaacgctcatgtacctgactatcgggaatcattacatagatgcagcgcagtagaaataaatagaagttttagtagtatgcggtgtattcgcagacacgacaaaggcagaagaagtcaagcttgtcaagctaggtgaagtgctagagctcgagctaggtatgcaggtaacagaaaactcgggcgggtcacgaaagcgccacagccgaccgtcgttacctaaagtcgtcatggctgggaatgtggcgcaaggatttgtttacttcataattgacatggagctgcattgttgctttcgtcactagctgctttggaagacatgtcgggcatcatctagaggaagaggagcaaagaaagagtcaattgttttcacggtgtgtacctcaggcatcaccactgcggcttgcgctttggtgcgggagctttgtcacattgtggttgcatgcttgcgcactgcggcaaccgagctgcgataaacactacctatcctcattgtcgtcaccaccttgtcgctgctcgttgactacagcatcatggacagacgcacattcgagtctccgatggactgggaataccagaatgacggacccatggatccctccagtccctttgcgcagtccaccaagcgagcacaggagagaaatgctttcggtggctcgtcaggttttgcatctttcacatcacaacacagcagcaacctagggcggacacagagcaccccgtccaagcctctgcctcccactcccttccagcaggggggccagagagagacgccgtccatcttttccagcggtcgcctgccccggaccagcactgcgcctgcacccgccttccgcaacccggccttcacgacgccgcgcaagcccttcgacatggatgcgctgtcagagctgtctgccgccgagtccagtcccgcggctagcgaccgctccgacctgcccgacacccccgaccgccacgacgacgactacgaccgcgacctcgcccacatgaccatcaccccggccaccgcgggcaggcggggcgccctgttcggcaagaagcccagcggcaagggcgagatcgccaagacggtgtttgcctcgcgcgacaaggtccgcaagcgcaagcgctacaacgccgacaaggacatcagcggctaccgcctgccctacatccagcccggcgagggcgacgagtccgactacgagtccgacgagagcaccttccagcccggcaacggaaagaaggagaagaagcgcgacaacaacaggagagacggcgtgctgggcaacttcctggcgaccctgcagcgccatccctacgcgcccagcatcctcggctactggctcaacttcaccttcagccttgtctgcgtcaccggcaccttctggatcgtctgggccatcatcgccggcctgcgcgaggacttcgctgccgcccgctccaccgtccgcgacgagttcctcgacgagatggccaagtgccgctccaactacatcgacaacaagtgcgcccccgtcgagcagcgtctgcccgccatgtacgagctgtgcgaccagtggtacacctgcatgaacaggaaccccgacaacctcaagaagatccagctcggcgccaagaacatcgtcgagatcatcaacgagattgtggacaccatgtcctataagaccatcgctttactagttcttttgttcgcagtcttcctcttcagcggccgatccctatacaagagcgcgcacgactaccccgacttttcgcgacatcctcctccaactccctacccgagcgaacatgccgctccaccgcaacaggtgtactggcaagccatacagccgcagacacctagacattttaattcaagacacatgatccaaaacgacgagacgccagacacagacgcatcgcccccgaaattcagaagcataatgccaccgccggagaccccatcaggcaggcggagtccatcaaagggcgagagaagcaggagtccgactaagagtaggagtccaacgaagcgatattgagacctatgtgggatacgtgttgggtctgctttgggttggaaaaggggtataaaaaacttgcattgcgtcgcgtggtacggctggaattgttattgttgttaatttagttgctcatgagagcgcactgcatatacgtcgtgtagttgctgaacacagacttgtcatgacgaatctttttacgtctaaatgagcttttgtatgcagcttgacttcagagtctttcttcgtctcacggattagctggccacgtacagacaacaccgcgagtgagaacatatgtcaaatatgacattcgtgtgctaggctctagtttgttg

SEQ ID NO: 4704 - DNA, 1467 bp, Muscodor strobelii
  misc_feature: SGI cDNA ID NO. 561268
  misc_feature: Encodes the peptide sequence at SEQ ID NO 4705
atggacagacgcacattcgagtctccgatggactgggaataccagaatgacggacccatggatccctccagtccctttgcgcagtccaccaagcgagcacaggagagaaatgctttcggtggctcgtcaggttttgcatctttcacatcacaacacagcagcaacctagggcggacacagagcaccccgtccaagcctctgcctcccactcccttccagcaggggggccagagagagacgccgtccatcttttccagcggtcgcctgccccggaccagcactgcgcctgcacccgccttccgcaacccggccttcacgacgccgcgcaagcccttcgacatggatgcgctgtcagagctgtctgccgccgagtccagtcccgcggctagcgaccgctccgacctgcccgacacccccgaccgccacgacgacgactacgaccgcgacctcgcccacatgaccatcaccccggccaccgcgggcaggcggggcgccctgttcggcaagaagcccagcggcaagggcgagatcgccaagacggtgtttgcctcgcgcgacaaggtccgcaagcgcaagcgctacaacgccgacaaggacatcagcggctaccgcctgccctacatccagcccggcgagggcgacgagtccgactacgagtccgacgagagcaccttccagcccggcaacggaaagaaggagaagaagcgcgacaacaacaggagagacggcgtgctgggcaacttcctggcgaccctgcagcgccatccctacgcgcccagcatcctcggctactggctcaacttcaccttcagccttgtctgcgtcaccggcaccttctggatcgtctgggccatcatcgccggcctgcgcgaggacttcgctgccgcccgctccaccgtccgcgacgagttcctcgacgagatggccaagtgccgctccaactacatcgacaacaagtgcgcccccgtcgagcagcgtctgcccgccatgtacgagctgtgcgaccagtggtacacctgcatgaacaggaaccccgacaacctcaagaagatccagctcggcgccaagaacatcgtcgagatcatcaacgagattgtggacaccatgtcctataagaccatcgtacttcttttgttcgcagtcttcctcttcagcggccgatccctatacaagagcgcgcacgactaccccgacttttcgcgacatcctcctccaactccctacccgagcgaacatgccgctccaccgcaacaggtgtactggcaagccatacagccgcagacacctagacattttaattcaagacacatgatccaaaacgacgagacgccagacacagacgcatcgcccccgaaattcagaagcataatgccaccgccggagaccccatcaggcaggcggagtccatcaaagggcgagagaagcaggagtccgactaagagtaggagtccaacgaagcgatattga

SEQ ID NO: 4705 - protein, 488 aa, Muscodor strobelii
  misc_feature: SGI Peptide ID NO. 561268
  misc_feature (1)..(486): NCBI GI: 256721932 Blast Desc: NECHADRAFT_59551 [Nectria haematococca mpVI 77-13-4]
  misc_feature (1)..(486): NCBI GI: 46111833 Blast Desc: FG02798.1 [Gibberella zeae PH-1]
  misc_feature (43)..(488): NCBI GI: 116192801 Blast Desc: CHGG_06118 [Chaetomium globosum CBS 148.51] gi|88182031|gb|EAQ89499.1| CHGG_06118 [Chaetomium globosum CBS 148.51]
  misc_feature (2)..(488): NCBI GI: 39955406 Blast Desc: MGG_09003 [Magnaporthe grisea 70-15] gi|149209349|ref|XP_001522049.1| MGCH7_ch7g166 [Magnaporthe grisea 70-15] gi|86196121|gb|EAQ70759.1| MGCH7_ch7g166 grisea
  misc_feature (1)..(488): NCBI GI: 171684173 Blast Desc: protein product [Podospora anserina] gi|170942047|emb|CAP67699.1| protein product [Podospora anserina]
  misc_feature (1)..(476): NCBI GI: 85091941 Blast Desc: NCU09204 [Neurospora crassa OR74A] gi|28920549|gb|EAA29912.1| [Neurospora crassa OR74A] gi|29150096|emb|CAD79657.1| conserved [Neurospora crassa]
  misc_feature (1)..(412): NCBI GI: 67542037 Blast Desc: AN7182.2 [Aspergillus nidulans FGSC A4] gi|40742244|gb|EAA61434.1| AN7182.2 [Aspergillus nidulans FGSC A4] gi|259483484|tpe|CBF78911.1| TPA: nuclear envelope protein
  misc_feature (3)..(474): NCBI GI: 154310696 Blast Desc: BC1G_06822 [Botryotinia fuckeliana B05.10] gi|150851362|gb|EDN26555.1| BC1G_06822 [Botryotinia fuckeliana B05.10]
  misc_feature (1)..(381): NCBI GI: 145249012 Blast Desc: An14g02190 [Aspergillus niger] gi|134081520|emb|CAK41956.1| protein product [Aspergillus niger]
  misc_feature (1)..(447): NCBI GI: 119487399 Blast Desc: nuclear envelope protein Brr6, [Neosartorya fischeri NRRL 181] gi|119410649|gb|EAW20595.1| nuclear envelope protein Brr6, [Neosartorya fischeri NRRL 181]
MDRRTFESPMDWEYQNDGPMDPSSPFAQSTKRAQERNAFGGSSGFASFTSQHSSNLGRTQSTPSKPLPPTPFQQGGQRETPSIFSSGRLPRTSTAPAPAFRNPAFTTPRKPFDMDALSELSAAESSPAASDRSDLPDTPDRHDDDYDRDLAHMTITPATAGRRGALFGKKPSGKGEIAKTVFASRDKVRKRKRYNADKDISGYRLPYIQPGEGDESDYESDESTFQPGNGKKEKKRDNNRRDGVLGNFLATLQRHPYAPSILGYWLNFTFSLVCVTGTFWIVWAIIAGLREDFAAARSTVRDEFLDEMAKCRSNYIDNKCAPVEQRLPAMYELCDQWYTCMNRNPDNLKKIQLGAKNIVEIINEIVDTMSYKTIVLLLFAVFLFSGRSLYKSAHDYPDFSRHPPPTPYPSEHAAPPQQVYWQAIQPQTPRHFNSRHMIQNDETPDTDASPPKFRSIMPPPETPSGRRSPSKGERSRSPTKSRSPTKRY

SEQ ID NO: 4706 - DNA, 5032 bp, Muscodor strobelii; identical to SEQ ID NO: 4703
  misc_feature: SGI EST ID NO. CUFF.12193.1
  misc_feature: Variant of the nucleotide sequence at SEQ ID NO 4704

SEQ ID NO: 4707 - DNA, 2628 bp, Muscodor strobelii
  misc_feature: SGI cDNA ID NO. 561269
  misc_feature: Encodes the peptide sequence at SEQ ID NO 4708
atggatgacgagcagagcagcaggacctccgccgagcccaccccgaattcctccaagcagagccagaagcacagcgctccctcgggctctggcaccggtgccggcaacgcggctgcgggcgatgcccagtcttcgaagcgaaagcgcggcttgggtgtagtgactcccaatgcctgcacggagtgtaggaaaaagcgcgccaaatgtgacggacagaggccttgcggccgttgtaaggcgcagaaggacgtcgagtgtgtctatgaagtgcccgttcgccagtccaaagagaacctacggcacgagatcgaaaacctgcggaagtcccagcagcaaagcgacagtgtcttcactgccctcctcaagcccgagctgtgggaggatgtactgcacagattacgaaatggccagtctgtcgagggcatatccgagtggcttggtggcactctgccttccggcggcggcgccatgccgagattcggacagcccggtgaccatagacccagcctcgccgtgccgtcttcgatggccacgtttgggggaccgtcagcgggagccggaggttatccagctggaggatctggcatgaatcaggggggccctccgggctcaaatctgaagcccgactttgatgccaatagtccctggaacttctcttcccaaagtcaatccgtttctcagcgcagcaactcgcacaaccttgaagatatgcaatggacgtcggaaggcccaccacggtctcgcgttgggctatggttgcaagatcagtcgtcagacaatgtccgatatcgaggggtagaccaagttctcgcaccgctgcagtcgccggatatgaaggtgtcgccaagcacatggaccggcatcagcaacgactcggcacttgtgcaacaccttctcgcgctgtatttctgctgggagtaccctacgtttgcctctctaagcaaggaacactttctgaaagactatacacacggacgacaccgatactgctccccgatccttgtgaatgcgctgctcgctctgggctgccgattctccacccagcctagcacgcgcgcaaaccctgacgatccgagaacgtctggtgaccatttcttcaaagaagctttgcggctactttaccaggagaacaatcaccatacattgaccaccatccaagctttagggataatgtccattcgcgaggccagctgtgggagagactcggagtcttggtattatgctggccagagtgtgcgccttgccattgagatggggctgcaccggctcagcgacgaaggcgacgaagacgagctcgccgtgcagtcggcaactttctggggcgcattcgccttggaccatgcatggtcgttggcaactggctccctcccgcaatgttcatgtttccctcatctgcctcctaagcctggcattatcaatgatatcgaagcttccttatggataccctacacagatgacggtaagttcggggacccgtgttatgtcgacggtatcggtcaacgactgaacggtgacccaggcgccccgctgcaacgttcgtgcgaacagccgtccaatgtgcggtccgtgtacaaatgtttttgcgaactcagcgaactggttcaccagtcgctctacgttctacactctccagggaagcccgtcaccagccgagatcttcttaccatatatacgcaatacctcaattggtatgactcgattcccgaggtgctacggctgggccacaacttcactccggctgtgctctttgcgcacatgtattaccatttcgcgatcttactcctattccgacccctgatcaaactccggatcatcggttcttcgattcttccgcgcgatgtttgttcccaggccgcggacgctatccaaggtctcacgcgttcctactctcaactctataccctccatcggacgccttctttcgtgccatatttcgtcttgacctcgtctatcatgcatcttgccgtaggggcaaatgcggctcccacatcacccgcccctgcgtcgacttcgtcgacagtaagaccgaataccaaggacgggtcatccggagacacggctcgtgagggcgaacctgattcctctcctctgggacaatccatgggaaatctgagtccgaaggccgtcgactcgattaagcagggtatcaatgatctagcagagatggcgccatgccaccactttgccgaacaggcgctcaacatcttacgtttcctggctaagaaatggaacattgatgttgatgttccccaccgaggcacaggcacggtagaagaggcagacaaacttgtccggcctacgacaaccagcctcaattttttcgcacccaacgtgtccgccgaagacttcatctgcagctggggctcacagggtcaagtgcaggagatgagagaacgtgtttctgaatcgcctcaaaataacgatgctgatgtcgagaagatggaaggcattatcgccgacgaaaagtccaaagttacgagccaggcgaactcggcatcaaatcctggtcccgccattactccagcccagagtctagaaaaccctctgttttggccatttcccatgcaaggtcgcccgatgctgccagacagcaacaatctggaggatgctggcttcgccccgatatga

SEQ ID NO: 4708 - protein, 875 aa, Muscodor strobelii
  misc_feature: SGI Peptide ID NO. 561269
  misc_feature (57)..(95): Pfam Id: PF00172 Pfam Desc: Fungal Zn(2)-Cys(6) binuclear cluster domain
  misc_feature (381)..(475): Pfam Id: PF04082 Pfam Desc: Fungal specific transcription factor domain
  misc_feature (45)..(875): NCBI GI: 261353347 Blast Desc: nitrogen assimilation transcription factor nirA [Verticillium albo-atrum VaMs.102]
  misc_feature (9)..(875): NCBI GI: 256721931 Blast Desc: [Nectria haematococca mpVI 77-13-4]
  misc_feature (45)..(872): NCBI GI: 171684175 Blast Desc: protein product [Podospora anserina] gi|170942048|emb|CAP67700.1| protein product [Podospora anserina]
  misc_feature (26)..(868): NCBI GI: 116192799 Blast Desc: CHGG_06117 [Chaetomium globosum CBS 148.51] gi|88182030|gb|EAQ89498.1| CHGG_06117 [Chaetomium globosum CBS 148.51]
  misc_feature (3)..(872): NCBI GI: 149209347 Blast Desc: MGCH7_ch7g165 [Magnaporthe grisea 70-15] gi|86196120|gb|EAQ70758.1| MGCH7_ch7g165 [Magnaporthe grisea 70-15]
  misc_feature (5)..(873): NCBI GI: 46111835 Blast Desc: FG02799.1 [Gibberella zeae PH-1]
  misc_feature (45)..(875): NCBI GI: 29150097 Blast Desc: related to nitrate assimilation regulatory protein nirA [Neurospora crassa]
  misc_feature (45)..(875): NCBI GI: 164423177 Blast Desc: NCU09205 [Neurospora crassa OR74A] gi|157069979|gb|EAA29913.2| conserved [Neurospora crassa OR74A]
  misc_feature (46)..(872): NCBI GI: 154305283 Blast Desc: BC1G_08936 [Botryotinia fuckeliana B05.10] gi|150853678|gb|EDN28870.1| BC1G_08936 [Botryotinia fuckeliana B05.10]
  misc_feature (27)..(872): NCBI GI: 73665489 Blast Desc: [Sclerotinia sclerotiorum]
MDDEQSSRTSAEPTPNSSKQSQKHSAPSGSGTGAGNAAAGDAQSSKRKRGLGVVTPNACTECRKKRAKCDGQRPCGRCKAQKDVECVYEVPVRQSKENLRHEIENLRKSQQQSDSVFTALLKPELWEDVLHRLRNGQSVEGISEWLGGTLPSGGGAMPRFGQPGDHRPSLAVPSSMATFGGPSAGAGGYPAGGSGMNQGGPPGSNLKPDFDANSPWNFSSQSQSVSQRSNSHNLEDMQWTSEGPPRSRVGLWLQDQSSDNVRYRGVDQVLAPLQSPDMKVSPSTWTGISNDSALVQHLLALYFCWEYPTFASLSKEHFLKDYTHGRHRYCSPILVNALLALGCRFSTQPSTRANPDDPRTSGDHFFKEALRLLYQENNHHTLTTIQALGIMSIREASCGRDSESWYYAGQSVRLAIEMGLHRLSDEGDEDELAVQSATFWGAFALDHAWSLATGSLPQCSCFPHLPPKPGIINDIEASLWIPYTDDGKFGDPCYVDGIGQRLNGDPGAPLQRSCEQPSNVRSVYKCFCELSELVHQSLYVLHSPGKPVTSRDLLTIYTQYLNWYDSIPEVLRLGHNFTPAVLFAHMYYHFAILLLFRPLIKLRIIGSSILPRDVCSQAADAIQGLTRSYSQLYTLHRTPSFVPYFVLTSSIMHLAVGANAAPTSPAPASTSSTVRPNTKDGSSGDTAREGEPDSSPLGQSMGNLSPKAVDSIKQGINDLAEMAPCHHFAEQALNILRFLAKKWNIDVDVPHRGTGTVEEADKLVRPTTTSLNFFAPNVSAEDFICSWGSQGQVQEMRERVSESPQNNDADVEKMEGIIADEKSKVTSQANSASNPGPAITPAQSLENPLFWPFPMQGRPMLPDSNNLEDAGFAPI

SEQ ID NO: 4709 - DNA, 4338 bp, Muscodor strobelii
  misc_feature: SGI EST ID NO. CUFF.12175.0
  misc_feature: Variant of the nucleotide sequence at SEQ ID NO 4707
tcgcgacgagtggagacatgacgtcggaaccgcgattctggtctttcggactcgaacacacagagtcgaccacagtctatataattactaggtatcaggacgctacatctgactactacggcaaggacatttctcgcgactcgtatatatctacagtcagactatctattgtccaagcgactatgccggaatgcattggctagtgtccccaatttgctgttaacggtctcgcgtgcaagcacgggaaggggcatagataataccacggatggtgtgaatgcgtaagctgaagcttgattctgaaggttcccaaagtccgaaatctccgttccaactggtctactaggggaaattttgtccctctaccggcacgagtggagtgtcctcgagcgcacagactagaggagctctgacctttgggtctttggctcccctttgctaccctgcgccggcgggtcttggcgtcggggagtgtacattcgcaggctccaggacgagttgtctctcatatgttccgtcgcgggtaggtacatatctccacttggcgggaggtacttggggagagaggtggaccgggaagctcctcctcccacctcatcgacgatgggcagttgcatgttgcagggcagttatgaaattcccatttggcttgggtaatttgcctgtagcttgccaacgtcgccgcaccaatctcaaaaacttcgtgaggccctcactgccgccgccttgcccatgtccccatgtctctccgtctgaagccatccccatgcatccgactctcgacgacactcttgcgacgaccgtctgtccgtaggtaagcagcagcacgtgagattcaccgcgcagcgcaagcaacagcgcccgccgcgcatcgtcaggaaacacaaaccccccttctgtccgccctttgtagacccatggtcatcccgacctttctcgcgtctgtcgccctcgagacgcttctatcatggtagctagccattgcgactttcgccgtccatttgtattcattattatatagtcaccactagacgagccgacatactcctctcgataagagcactgcgcgccatatacgggtagtgtgcatttcggacattatatcccacgattcgagccactgcgcgaatgtctttggtcctgccgcggacatccttgtccgacggaccgtgatcgcctagccgccatggatgacgagcagagcagcaggacctccgccgagcccaccccgaattcctccaagcagagccagaagcacagcgctccctcgggctctggcaccggtgccggcaacgcggctgcgggcgatgcccagtcttcgaagcgaaagcgcggcttgggtgtagtgactcccaatgcctgcacggagtgtaggaaaaagcgcgccaaatgtgacggacagaggccttgcggccgttgtaaggcgcagaaggacgtcgagtgtgtctatgaagtgcccgttcgccagtccaaagagaacctacggcacgagatcgaaaacctgcggaagtcccagcagcaaagcgacagtgtcttcactgccctcctcaagcccgagctgtgggaggatgtactgcacagattacgaaatggccagtctgtcgagggcatatccgagtggcttggtggcactctgccttccggcggcggcgccatgccgagattcggacagcccggtgaccatagacccagcctcgccgtgccgtcttcgatggccacgtttgggggaccgtcagcgggagccggaggttatccagctggaggatctggcatgaatcaggggggccctccgggctcaaatctgaagcccgactttgatgccaatagtccctggaacttctcttcccaaagtcaatccgtttctcagcgcagcaactcgcacaaccttgaagatatgcaatggacgtcggaaggcccaccacggtctcgcgttgggctatggttgcaagatcagtcgtcagacaatgtccgatatcgaggggtagaccaagttctcgcaccgctgcagtcgccggatatgaaggtgtcgccaagcacatggaccggcatcagcaacgactcggcacttgtgcaacaccttctcgcgctgtatttctgctgggagtaccctacgtttgcctctctaagcaaggaacactttctgaaagactatacacacggacgacaccgatactgctccccgatccttgtgaatgcgctgctcgctctgggctgccgattctccacccagcctagcacgcgcgcaaaccctgacgatccgagaacgtctggtgaccatttcttcaaagaagctttgcggctactttaccaggagaacaatcaccatacattgaccaccatccaagctttagggataatgtccattcgcgaggccagctgtgggagagactcggagtcttggtattatgctggccagagtgtgcgccttgccattgagatggggctgcaccggctcagcgacgaaggcgacgaagacgagctcgccgtgcagtcggcaactttctggggcgcattcgccttggaccatgcatggtcgttggcaactggctccctcccgcaatgttcatgtttccctcatctgcctcctaagcctggcattatcaatgatatcgaagcttccttatggataccctacacagatgacggtaagttcggggacccgtgttatgtcgacggtatcggtcaacgactgaacggtgacccaggcgccccgctgcaacgttcgtgcgaacagccgtccaatgtgcggtccgtgtacaaatgtttttgcgaactcagcgaactggttcaccagtcgctctacgttctacactctccagggaagcccgtcaccagccgagatcttcttaccatatatacgcaatacctcaattggtatgactcgattcccgaggtgctacggctgggccacaacttcactccggctgtgctctttgcgcacatgtattaccatttcgcgatcttactcctattccgacccctgatcaaactccggatcatcggttcttcgattcttccgcgcgatgtttgttcccaggccgcggacgctatccaaggtctcacgcgttcctactctcaactctataccctccatcggacgccttctttcgtgccatatttcgtcttgacctcgtctatcatgcatcttgccgtaggggcaaatgcggctcccacatcacccgcccctgcgtcgacttcgtcgacagtaagaccgaataccaaggacgggtcatccggagacacggctcgtgagggcgaacctgattcctctcctctgggacaatccatgggaaatctgagtccgaaggccgtcgactcgattaagcagggtatcaatgatctagcagagatggcgccatgccaccactttgccgaacaggcgctcaacatcttacgtttcctggctaagaaatggaacattgatgttgatgttccccaccgaggcacaggcacggtagaagaggcagacaaacttgtccggcctacgacaaccagcctcaattttttcgcacccaacgtgtccgccgaagacttcatctgcagctggggctcacagggtcaagtgcaggagatgagagaacgtgtttctgaatcgcctcaaaataacgatgctgatgtcgagaagatggaaggcattatcgccgacgaaaagtccaaagttacgagccaggcgaactcggcatcaaatcctggtcccgccattactccagcccagagtctagaaaaccctctgttttggccatttcccatgcaaggtcgcccgatgctgccagacagcaacaatctggaggatgctggcttcgccccgatatgatttcttggtagtgggcaacctcgacctacagcgtaagatcggcaagcctcgggagcgattgtgcgttgtaacgactaccagactggtctaggtgattgcgagtacgaccagttgcgtaccgattcgatagcgcccatctacttgctcgaattgtgatgatcacattacaccccagcttcggtcatccaagtactacggatatgatgggtattctcaagtctcccttttatacaggttagggttcggcgaggagtttgcgaaaaagataccccaggacatggaaaacatgacatgaagtgtcacggctttctgtagctcatctaactgtctagatttggaggtatacctcccgtgccataattaattaaaataaagaaagttatacacaacgaatgaatgagatcaccccttttgctatccttgcagtcgatgccgaaatcggatttcgtgcggtcaatcatatgtatggcataataggccacatgaaagtacgcacatcgcaaagcacctatagtatagacccg

SEQ ID NO: 4710 - DNA, 1740 bp, Muscodor strobelii
  misc_feature: SGI cDNA ID NO. 561270
  misc_feature: Encodes the peptide sequence at SEQ ID NO 4711
atggatgatccgtcgaggatactggctcaggcacgagagcatctcgaggccttgaaacaggccggtctgagtcgagatgacttgttagccttgatcggggaagaccctcaattgcaagaacaaataccgcagcagcagaagcacgtcaccgcagatgctaccgcgctccaaaacttcaattaccacgagatcaacccgtccttcaagcctcctcaccagtaccgctcttcgatatcgacgatctccagcagctcgagtcgcgacagcgtcttctcgactaattcggtccgcagctccgtctcctcgacgactgggtccgcaagcgaggcacggttctggtgcacatcatgcaacaagacgtttaagcgcaagttcgactggaagcgacacgaggaggaattccacgaccggtcgcggaaatatccctgtgacagttgcaaccagagcttctggggccccaacacattcaaccagcaccataagtcggcgcatgggtgtcagacgtgccctcacgctgaaactgtcatgcggcccatgaagaagagaagggcatacggctgtggtttctgcgccgcgttgcacggccaatttgaacgacacatcgaccacgtcgcggcgcacttcgagggcggaatgacaaagaacgactggagccattcgaacgtcatctatggattgctacatcagcacggcatccacgaagcctggaaatcactcatcgctggcaagcagaaccagttcaacgaacatcaacccatgttcggttggtcggcggactcgaccggccgcgcacatggctatgtagagggcgagaatccgggtcaactacaggatctactcgagttctacgacggcagcaaggaaagcgcaaagaagatcgttgagctggctgatgcatgtgtccttgtcgttctacgtccgaagtcaccgtccgagagcccacgcaccacggtactcgagtcgacgcccacgccgccaccaacggcgccgagcggtggtaacggagccatgctaagacaactcagcaaacagctaactgtgcgcgaacctaggcgggcagcttcgacttcagccattggaaaagtgaagacttccaggcgaacggcatcaagtgctactgcgcctgcgatcgctacttctgcgaacaatcatcaatcgcagcctccagtatcctcgtcgagtactctcttctcgaactatataccagcaaacacttctcagccccagcctgcacttacacggcaatcacaggtgccattgtcgattcaaacacaaaacaccacatatgcagacaaagccctcccgccacctccattagatcctgtatcgccgatggccgtagacttcccgacgaatccttttgagaacgagttcaaacacccattgtctccacctcctcatcagcaacagcatcaacatcagcagcataatatgccgacgcaacatctaccatctcaacacattccgcacacacatattccatcccagcagattccacctcagccgctcccgtctcagcaacagggctttctctcacctctcccagaggtagacttcatgagtgactggcagagttttaccagtaccctagtcgacaacggtaatggcatggatggagtgagcagaccacatcccatggccaacgggggattacagcatcacgaaggcatgcaagtcttcgaccccaggggttttccaatgacctgggaggaccttggacattatacaccggggcagtga

SEQ ID NO: 4711 - protein, 579 aa, Muscodor strobelii
  misc_feature: SGI Peptide ID NO. 561270
  misc_feature (2)..(310): NCBI GI: 261353344 Blast Desc: conserved [Verticillium albo-atrum VaMs.102]
  misc_feature (100)..(305): NCBI GI: 46111843 Blast Desc: FG02803.1 [Gibberella zeae PH-1]
  misc_feature (99)..(305): NCBI GI: 256721901 Blast Desc: NECHADRAFT_67804 [Nectria haematococca mpVI 77-13-4]
  misc_feature (112)..(304): NCBI GI: 39969973 Blast Desc: MGG_10595 [Magnaporthe grisea 70-15] gi|145021728|gb|EDK05805.1| MGG_10595 [Magnaporthe grisea 70-15]
  misc_feature (112)..(304): NCBI GI: 149209309 Blast Desc: MGCH7_ch7g147 [Magnaporthe grisea 70-15] gi|86196102|gb|EAQ70740.1| MGCH7_ch7g147 [Magnaporthe grisea 70-15]
  misc_feature (2)..(306): NCBI GI: 116192797 Blast Desc: CHGG_06116 [Chaetomium globosum CBS 148.51] gi|88182029|gb|EAQ89497.1| CHGG_06116 [Chaetomium globosum CBS 148.51]
  misc_feature (76)..(297): NCBI GI: 85091945 Blast Desc: NCU09206 [Neurospora crassa OR74A] gi|28920551|gb|EAA29914.1| [Neurospora crassa OR74A] gi|29150098|emb|CAD79659.1| [Neurospora crassa]
  misc_feature (106)..(297): NCBI GI: 171684177 Blast Desc: protein product [Podospora anserina] gi|170942049|emb|CAP67701.1| protein product [Podospora anserina]
  misc_feature (76)..(297): NCBI GI: 116203989 Blast Desc: CHGG_09878 [Chaetomium globosum CBS 148.51] gi|88176006|gb|EAQ83474.1| CHGG_09878 [Chaetomium globosum CBS 148.51]
  misc_feature (87)..(319): NCBI GI: 189196460 Blast Desc: conserved [Pyrenophora tritici-repentis Pt-1C-BFP] gi|187980447|gb|EDU47073.1| conserved [Pyrenophora tritici-repentis Pt-1C-BFP]
MDDPSRILAQAREHLEALKQAGLSRDDLLALIGEDPQLQEQIPQQQKHVTADATALQNFNYHEINPSFKPPHQYRSSISTISSSSSRDSVFSTNSVRSSVSSTTGSASEARFWCTSCNKTFKRKFDWKRHEEEFHDRSRKYPCDSCNQSFWGPNTFNQHHKSAHGCQTCPHAETVMRPMKKRRAYGCGFCAALHGQFERHIDHVAAHFEGGMTKNDWSHSNVIYGLLHQHGIHEAWKSLIAGKQNQFNEHQPMFGWSADSTGRAHGYVEGENPGQLQDLLEFYDGSKESAKKIVELADACVLVVLRPKSPSESPRTTVLESTPTPPPTAPSGGNGAMLRQLSKQLTVREPRRAASTSAIGKVKTSRRTASSATAPAIATSANNHQSQPPVSSSSTLFSNYIPANTSQPQPALTRQSQVPLSIQTQNTTYADKALPPPPLDPVSPMAVDFPTNPFENEFKHPLSPPPHQQQHQHQQHNMPTQHLPSQHIPHTHIPSQQIPPQPLPSQQQGFLSPLPEVDFMSDWQSFTSTLVDNGNGMDGVSRPHPMANGGLQHHEGMQVFDPRGFPMTWEDLGHYTPGQ

SEQ ID NO: 4712 - DNA, 3885 bp, Muscodor strobelii
  misc_feature: SGI EST ID NO. CUFF.12227.0
  misc_feature: Variant of the nucleotide sequence at SEQ ID NO 4710
cacaatagatcatcccttgcgtccatcattataccatatcaccgatatatgatcatccaaacatcgaaactcaattgacgcagcttgactttagcccgagaagcccagcgaagtagacaaggagaaaacgacagcccaatcacaacaaccatgggcacagcaaggcaccaaaacccagtttcgcttgaaacatgctgggccacgaccgggcaaaccgcatttctcagaattctgcgggccaagcctaatcgagctaaatttaacgagtagcggcatcatgattggcggcgctcgaggctaggcgacccgccgggcgtgtttcgaaacgttccctcaatatgtgctgacgcctgatggtcgtggtgatctgctaccatcacctggggttgtttcaggttgagtccatccagacccagttcttagaccggctgttcatcaacgagccaacgtggtcgatggtgcaagactttgtagaaatgggcgagaagagcagaggggcggttctgacgatccttgtcgtcaaagctgctgttcttgtagattccccagcacaatggcaaacagcccccagaccggcgagagactggtctctatatcgcctcgagcaatctacacagatgctgcgactgaacggtccaaatcactgtgaggtacgcgtaaagaagaaaggcatgagggttcgaggaacttttagacgggatgcaggagataggaatcatacataagatactcatacaaacaactaagtctgtcaggggtcccagctcacgatgtcgaaacgaagcgcactgcgccttgcgcccaatagacactcgtatcagcgctgcagccacagaacaaggaaagatgcagtgcactcggactcgaacacgcgacattggaaggaaggatgtacagcacgaatgtgccgtgtcccctaacatgctagatgtacatacatgtcgttcgaatgcctccattcacacggtcgagtgacggaggggcacggacagacgtggagggagacgatggcaaacccgtcgttgcgaaacgagcaagggtcgagctggtctgggcatctcggtattcccatcccatcctttctcgtttcctgtctgccctcctccggctcccgcttgttcttttctcccgcaatcctggtcgagatcaggtcagagtagtaaggcgagcgaaaggccaacagaactttcattagaacagacgaaaagggacttagttgagctcccacccccgaacccccgtatatgttacaagcgatagccgcctacgcgcgccagaacccccgaaacctcttacttgatgctgtaatcccgtttcgtttcctcttcactttgccccttatttcctccctatttgccgattgaatcatacgacgccgtccgagacaccgttcgagcatcatctcacgcacgcgctcatcaatctcggccgcgcaaatatatctatcagtttccggcccgtatcgcggaggccgccgacccgccgacttgttgattgagtatatttgcatgtacagcgctgagccagatggatgatccgtcgaggatactggctcaggcacgagagcatctcgaggccttgaaacaggccggtctgagtcgagatgacttgttagccttgatcggggaagaccctcaattgcaagaacaaataccgcagcagcagaagcacgtcaccgcagatgctaccgcgctccaaaacttcaattaccacgagatcaacccgtccttcaagcctcctcaccagtaccgctcttcgatatcgacgatctccagcagctcgagtcgcgacagcgtcttctcgactaattcggtccgcagctccgtctcctcgacgactgggtccgcaagcgaggcacggttctggtgcacatcatgcaacaagacgtttaagcgcaagttcgactggaagcgacacgaggaggaattccacgaccggtcgcggaaatatccctgtgacagttgcaaccagagcttctggggccccaacacattcaaccagcaccataagtcggcgcatgggtgtcagacgtgccctcacgctgaaactgtcatgcggcccatgaagaagagaagggcatacggctgtggtttctgcgccgcgttgcacggccaatttgaacgacacatcgaccacgtcgcggcgcacttcgagggcggaatgacaaagaacgactggagccattcgaacgtcatctatggattgctacatcagcacggcatccacgaagcctggaaatcactcatcgctggcaagcagaaccagttcaacgaacatcaacccatgttcggttggtcggcggactcgaccggccgcgcacatggctatgtagagggcgagaatccgggtcaactacaggatctactcgagttctacgacggcagcaaggaaagcgcaaagaagatcgttgagctggctgatgcatgtgtccttgtcgttctacgtccgaagtcaccgtccgagagcccacgcaccacggtactcgagtcgacgcccacgccgccaccaacggcgccgagcggtggtaacggagccatgctaagacaactcagcaaacagctaactgtgcgcgaacctaggcgggcagcttcgacttcagccattggaaaagtgaagacttccaggcgaacggcatcaagtgctactgcgcctgcgatcgctacttctgcgaacaatcatcaatcgcagcctccagtatcctcgtcgagtactctcttctcgaactatataccagcaaacacttctcagccccagcctgcacttacacggcaatcacaggtgccattgtcgattcaaacacaaaacaccacatatgcagacaaagccctcccgccacctccattagatcctgtatcgccgatggccgtagacttcccgacgaatccttttgagaacgagttcaaacacccattgtctccacctcctcatcagcaacagcatcaacatcagcagcataatatgccgacgcaacatctaccatctcaacacattccgcacacacatattccatcccagcagattccacctcagccgctcccgtctcagcaacagggctttctctcacctctcccagaggtagacttcatgagtgactggcagagttttaccagtaccctagtcgacaacggtaatggcatggatggagtgagcagaccacatcccatggccaacgggggattacagcatcacgaaggcatgcaagtcttcgaccccaggggttttccaatgacctgggaggaccttggacattatacaccggggcagtgattgcagagagtgatggggttaataaaatgatgactaacttggagtgggccacatcaaacactgtccggctcttacgcaagcgcttacgtagtgctctctctctctcaccatttcatttttgtctgtacactaacatacgctcttgacttattatgtcacgccatgtacatttaccagcttgatacgaaacgaaataaggggtgcagggtgggccggccatcggagcatctgtattttgcggttacgtgaggaaaaaaacgcaaaaaggggggtggctcaaaaagagggcagacaagctgggaagtattggacgaaagagagcgagcctttttctttgggagaggaaagaaaaacgttatgcccgagatgttaatcggctggacctgcataatgtttgttttacctacctacctacatatctaccttagttgttgatacctgtacacttactacatgggcttgatacttgcacgcttggggtaaagggaaggagggaaggaagggagcaggatgaggcatgatagatatcctaattataaatgagaatacactgagtacataatgtccttttgatgtcctcttggttggacggtgttgtgtgagtgaccactgatcgtg

SEQ ID NO: 4713 - DNA, 1851 bp, Muscodor strobelii
  misc_feature: SGI cDNA ID NO. 561271
  misc_feature: Elevated expression when VOC is produced
  misc_feature: Encodes the peptide sequence at SEQ ID NO 4714
atgcttggtgtgtcatggttgcttttggctgtaattggctttatagcaccggttcgggccattgaacctttcagctctaaatacttatatgagttgggtttctacggtttgtacgccacatccagcttcaaatcaattgatctagaagtgccattgctcaattttcctcgatgggatgaagcaagatgcaatgatggatattatgtcttcgcgcagaaggggaaattagtctccaacccaggagcaacaatatttgatgcgaagggggagctagtatgggccgacgagaacctgggtgttgtcttcaatctccagatccagacatatcaaggcgagcagtacctgaccttttggtctaacccagagggtagtacccacggttatggtcgtggaacatattacatgctcgattcttcatatgaagtgttcagaaagatcgagcctataggcgaaggcttaaagggagatcttcacgaatttaagctcacagacgctggtactattctagtaaccatctatagccccgttccatctagcttaagctccgtgggagggccggaggagggatgggttctcgactgcctattccaagaaatcgatcttgagaccggagaattgctattcgaatggagtgctatcacgaacctagaagtcagcgatacaatccgatttttcggtgacgacgaggatgacggaacaacacccgcaaaggcattcgacttctttcacatcaacagtgtcgacaaagacgatgaaggaaactacattatctcgggtcgccacacatcctcgattttatgcatcacaccgcgaggtcaagtgaaatggacactcggcggtgtgaacagcgatttcaaggatctgtctgaaggttctgctactgatttcatgtatcagcaccatgccgaactacatgataattatactttgagtatcttcgacaacgctgtgtctgagcgatcgggtgttcaatcttcccacagctacagtcgtggcttgctggtccaactagatgtcgaaaagatgacagcgaagctccttcatgactaccatgacccttccaatgaccatgctgcggactcacagggttcgatgcaagtaatggacgataggattgtgcttgggtacggctggttaccgtttatcaaggagttttctttagatggaacgctactctgcgacgtcgagcttgccccatggatcgctgctcgttggggcttgatcaacacttaccgttcattcaaggctaagcgctgggtcgggaaacctctcgatccaccatccgtctatctcaaaccctctgaggctcaggtctttatatcttggaatggtgcaactgaggttgatagatgggttttggaaggcgctgattgggaaagtctgcacatgggcgacgaagctttcatcactctcgatgatgtgaagaaggagacgttcgaaacaagtatcgacatcgatgacagcatgccgacatacatacgcgttgcggcagtggataagcagggcaacgtgctcatgcactctgacatgatggaccgacgggttggaaatgcaccagcccacacgacagaagatatcctagttggggtcagcgtattcttgtcttttattaccattttatatgtggcgaggaagaaaggcatgcgggccgtcaagtgcggctccatccgcacgctacaaaaaggtgttcaagttcttgcagaatgtcaagacagacttcgacatttcctcgagaaagacccgttcacagattcgagtacccataacccgccttccaggtggtggaaggataggcagaatgcgcatccccacgaagtggaatcgctgcgcgagcattctttagacagatag

SEQ ID NO: 4714 - protein, 616 aa, Muscodor strobelii
  misc_feature: SGI Peptide ID NO. 561271
  misc_feature (30)..(511): NCBI GI: 121712289 Blast Desc: conserved [Aspergillus clavatus NRRL 1] gi|119401908|gb|EAW12330.1| conserved [Aspergillus clavatus NRRL 1]
  misc_feature (30)..(513): NCBI GI: 169772893 Blast Desc: [Aspergillus oryzae RIB40] gi|83768776|dbj|BAE58913.1| protein product [Aspergillus oryzae]
  misc_feature (30)..(518): NCBI GI: 145248405 Blast Desc: An13g03160 [Aspergillus niger] gi|134081203|emb|CAK41712.1| protein product [Aspergillus niger]
  misc_feature (29)..(513): NCBI GI: 261355974 Blast Desc: conserved [Verticillium albo-atrum VaMs.102]
  misc_feature (30)..(516): NCBI GI: 70985929 Blast Desc: conserved [Aspergillus fumigatus Af293] gi|66846098|gb|EAL86431.1| conserved [Aspergillus fumigatus Af293]
  misc_feature (30)..(516): NCBI GI: 159128396 Blast Desc: conserved [Aspergillus fumigatus A1163]
  misc_feature (30)..(516): NCBI GI: 119473829 Blast Desc: NFIA_002430 [Neosartorya fischeri NRRL 181] gi|119406943|gb|EAW16893.1| conserved [Neosartorya fischeri NRRL 181]
  misc_feature (30)..(508): NCBI GI: 256733432 Blast Desc: NECHADRAFT_36547 [Nectria haematococca mpVI 77-13-4]
  misc_feature (30)..(552): NCBI GI: 67903142 Blast Desc: AN8558.2 [Aspergillus nidulans FGSC A4] gi|40747827|gb|EAA66983.1| AN8558.2 [Aspergillus nidulans FGSC A4] gi|259484512|tpe|CBF80796.1| TPA: [Aspergillus nidulans FGSC
  misc_feature (8)..(505): NCBI GI: 145239157 Blast Desc: An08g01070 [Aspergillus niger] gi|134076729|emb|CAK39788.1| protein product [Aspergillus niger]
  misc_feature: Useful for introducing or modulating the production of volatile compounds
MLGVSWLLLAVIGFIAPVRAIEPFSSKYLYELGFYGLYATSSFKSIDLEVPLLNFPRWDEARCNDGYYVFAQKGKLVSNPGATIFDAKGELVWADENLGVVFNLQIQTYQGEQYLTFWSNPEGSTHGYGRGTYYMLDSSYEVFRKIEPIGEGLKGDLHEFKLTDAGTILVTIYSPVPSSLSSVGGPEEGWVLDCLFQEIDLETGELLFEWSAITNLEVSDTIRFFGDDEDDGTTPAKAFDFFHINSVDKDDEGNYIISGRHTSSILCITPRGQVKWTLGGVNSDFKDLSEGSATDFMYQHHAELHDNYTLSIFDNAVSERSGVQSSHSYSRGLLVQLDVEKMTAKLLHDYHDPSNDHAADSQGSMQVMDDRIVLGYGWLPFIKEFSLDGTLLCDVELAPWIAARWGLINTYRSFKAKRWVGKPLDPPSVYLKPSEAQVFISWNGATEVDRWVLEGADWESLHMGDEAFITLDDVKKETFETSIDIDDSMPTYIRVAAVDKQGNVLMHSDMMDRRVGNAPAHTTEDILVGVSVFLSFITILYVARKKGMRAVKCGSIRTLQKGVQVLAECQDRLRHFLEKDPFTDSSTHNPPSRWWKDRQNAHPHEVESLREHSLDR

SEQ ID NO: 4715 - DNA, 4045 bp, Muscodor strobelii
  misc_feature: SGI EST ID NO. CUFF.12096.0
  misc_feature: Variant of the nucleotide sequence at SEQ ID NO 4713
attgaggaagccgaatgcgagctgactggcgagagattgctttcattgaatgtcactatgaattagtgaactgttaccggaggagtatgcgaactatgctaatgaactcgggactgacccaaatgatagtaatacccctattttggctgcatcgatgttgtacgagtaacgtgatggatctgatatgagagtcaagatctgcgtctgacaagtagccttttttctttctttttttgtgtctgccatgcgtactcgtgcaccgaccatgtctcaaccaacggattactagagcctttagccttcttgactttgggtttattcgacttgaaatcattgagtcactagatgtacatttcttttagaattagttaattgtcagtacagaaccgatgaggagtcgtcttggttttaacaacttcttcatgcaatccgtactttgcttgacttacaagatggaaaacgcaagatgagggctatcacatatgtgaatatgacgaggctctagaaattcaaggataccccgactcgcctcgtggatcgtaagcaaacccgagacagactatccccgccgagcggttaactgccgagactgaatccgccatcgtcatgattcgatgtggcttgcaacctgcgtctccagatgagacgaaagaaatatgcacaaaacgtcaacgcccgcatccggtctctcactggttttcaaggctggtaatgctcttctgatttgtcttcctgccgacctgcctggctgatgtagggcgaggcgataatcgtaatgttgacggagttaatttccggtgcacattctgctgccaagagaatgctttatcactctcattggccaattgctccaaccaatacatcttgccttgctagccgtgtgtgcgtgtcccagcaatgtctggcttgtacagataccgataaccgcaataatgcaatgacattactgtatcccttttcacccagtattcgacaaaccgtcttggccaacttcttggccagcttggcttgcttggaaagtatgtaagtctggccagcttcaagcactgccggctaaaaactgtaataagcataggaatgaggattactgacgttgatgctgacctctttgttactctctaccattccgttggaatagccccctagcgcgaacaaataccataacttctgtgcttatatacagtatcagacaaacctggcaatctgatacgagctccacatctgttgcaaatttacacacatatgttgcgagctttgagcgagtatacgagtagaaacggtcggtgcgaggggtttgcgagtctatcgacgcgcgtcattacttggttccaagacagccaagaacagccaagattcccctactataccaaatccatcagcctcgccagcttcctattccgaaatccagcacttacacaagttgtgcacgccacgtggataatgacatgatgtattgcgacgctgtatgccaacgctctttgccgcccatacgaccgcaccatagccgtcatcacgttttccggcgcgcctgaaatccgccccgaccttaatgaggtaaccaattggcagtaatgtgccagcaacgacaaatggttcagctatcagcatgtacaccacctcccagaacgtgagagtccactgcatgtagagaacgttgaacgtgcggctaccgtttgtgccgagcggccgttcgaccccctagtcaccctccaacagtggaccttgcggagagagtaattacgttgctgcgtttcttcaaagccatccacactgccctccttgttggtaggcgtttgcttcatccctcattcctattccttgtcaagcttgtcaaatgcccagacattggcgacttggaaatcctgatgcgaaaaacgcatcatcagtagtggactgtgggatgctagtttcgtcctaaactaatcgatggattctccctttcttcttcttggtttatatgtacctaacccaagtccctcattttgaaccggcaggttgttgtatttctcgccggttatttttatgattatactttcaaactcagtagctcatctccttatgctgctgcatatctctatctcacacatgtgctgctatccatcgaccatttccttctttaattggtgaagccatgcttggtgtgtcatggttgcttttggctgtaattggctttatagcaccggttcgggccattgaacctttcagctctaaatacttatatgagttgggtttctacggtttgtacgccacatccagcttcaaatcaattgatctagaagtgccattgctcaattttcctcgatgggatgaagcaagatgcaatgatggatattatgtcttcgcgcagaaggggaaattagtctccaacccaggagcaacaatatttgatgcgaagggggagctagtatgggccgacgagaacctgggtgttgtcttcaatctccagatccagacatatcaaggcgagcagtacctgaccttttggtctaacccagagggtagtacccacggttatggtcgtggaacatattacatgctcgattcttcatatgaagtgttcagaaagatcgagcctataggcgaaggcttaaagggagatcttcacgaatttaagctcacagacgctggtactattctagtaaccatctatagccccgttccatctagcttaagctccgtgggagggccggaggagggatgggttctcgactgcctattccaagaaatcgatcttgagaccggagaattgctattcgaatggagtgctatcacgaacctagaagtcagcgatacaatccgatttttcggtgacgacgaggatgacggaacaacacccgcaaaggcattcgacttctttcacatcaacagtgtcgacaaagacgatgaaggaaactacattatctcgggtcgccacacatcctcgattttatgcatcacaccgcgaggtcaagtgaaatggacactcggcggtgtgaacagcgatttcaaggatctgtctgaaggttctgctactgatttcatgtatcagcaccatgccgaactacatgataattatactttgagtatcttcgacaacgctgtgtctgagcgatcgggtgttcaatcttcccacagctacagtcgtggcttgctggtccaactagatgtcgaaaagatgacagcgaagctccttcatgactaccatgacccttccaatgaccatgctgcggactcacagggttcgatgcaagtaatggacgataggattgtgcttgggtacggctggttaccgtttatcaaggagttttctttagatggaacgctactctgcgacgtcgagcttgccccatggatcgctgctcgttggggcttgatcaacacttaccgttcattcaaggctaagcgctgggtcgggaaacctctcgatccaccatccgtctatctcaaaccctctgaggctcaggtctttatatcttggaatggtgcaactgaggttgatagatgggttttggaaggcgctgattgggaaagtctgcacatgggcgacgaagctttcatcactctcgatgatgtgaagaaggagacgttcgaaacaagtatcgacatcgatgacagcatgccgacatacatacgcgttgcggcagtggataagcagggcaacgtgctcatgcactctgacatgatggaccgacgggttggaaatgcaccagcccacacgacagaagatatcctagttggggtcagcgtattcttgtcttttattaccattttatatgtggcgaggaagaaaggcatgcgggccgtcaagtgcggctccatccgcacgctacaaaaaggtgttcaagttcttgcagaatgtcaagacagacttcgacatttcctcgagaaagacccgttcacagattcgagtacccataacccgccttccaggtggtggaaggataggcagaatgcgcatccccacgaagtggaatcgctgcgcgagcattctttagacagatagatattatacccatcgtcaaaaataacgttaatgaatttaagccaaattaagaacaaggcaatc

SEQ ID NO: 4716 - DNA, 612 bp, Muscodor strobelii
  misc_feature: SGI cDNA ID NO. 561272
  misc_feature: Encodes the peptide sequence at SEQ ID NO 4717
atgaatatcgtcctcgggctcatccttgcctccttggcattgtgcgccagcgtgaaccaaattcctgatgaggcgattcatcgttcccttcccgacggctattcgctggcagacgttacctggactgtgccaataaccgaaggcggcgtcaatcacactttccatggcactgtgcaagatgtttttgcccaaataaatgatgcccgcgctgaacaaggtcttgctcccctcgataaccttacaagtaatttgacggaacgtcttgatgtcaagcgctcgtatgacaaaactctttgcaacgtgggcctcccagcatcagcagatgactggagaatttaccaaggcgttcaataccttcatggggtcaaaggtcggtgtggtatgacgggacctaaggtttgtggtcgcatctcttgtagctggaatggaggcatcttctggtgcaatgataacaatggctactcggaatatgattgttcagtatttgccgactatgccgagcatgtgatcgaaaattgcaggtttattcctgaaaaagggcaacggcaggtatggggtcaggcattcgacacggagaatttcaatgtcatgtgtggctacgacaaatgttag

SEQ ID NO: 4717 - protein, 203 aa, Muscodor strobelii
  misc_feature: SGI Peptide ID NO. 561272
  misc_feature (24)..(203): NCBI GI: 121717032 Blast Desc: conserved [Aspergillus clavatus NRRL 1] gi|119404141|gb|EAW14558.1| conserved [Aspergillus clavatus NRRL 1]
  misc_feature (2)..(203): NCBI GI: 256723698 Blast Desc: NECHADRAFT_86628 [Nectria haematococca mpVI 77-13-4]
  misc_feature (34)..(203): NCBI GI: 170940149 Blast Desc: protein product [Podospora anserina]
  misc_feature (1)..(201): NCBI GI: 171680404 Blast Desc: protein product [Podospora anserina] gi|170939829|emb|CAP65054.1| protein product [Podospora anserina]
  misc_feature (24)..(203): NCBI GI: 238497574 Blast Desc: conserved [Aspergillus flavus NRRL3357] gi|220693296|gb|EED49641.1| conserved [Aspergillus flavus NRRL3357]
  misc_feature (5)..(150): NCBI GI: 115386460 Blast Desc: [Aspergillus terreus NIH2624] gi|114190769|gb|EAU32469.1| [Aspergillus terreus NIH2624]
  misc_feature (11)..(203): NCBI GI: 46133985 Blast Desc: FG09132.1 [Gibberella zeae PH-1]
  misc_feature (32)..(203): NCBI GI: 238506391 Blast Desc: conserved [Aspergillus flavus NRRL3357] gi|220689110|gb|EED45461.1| conserved [Aspergillus flavus NRRL3357]
  misc_feature (12)..(201): NCBI GI: 171693239 Blast Desc: protein product [Podospora anserina] gi|170946568|emb|CAP73369.1| protein product [Podospora anserina]
  misc_feature (2)..(203): NCBI GI: 46117564 Blast Desc: FG04624.1 [Gibberella zeae PH-1]
MNIVLGLILASLALCASVNQIPDEAIHRSLPDGYSLADVTWTVPITEGGVNHTFHGTVQDVFAQINDARAEQGLAPLDNLTSNLTERLDVKRSYDKTLCNVGLPASADDWRIYQGVQYLHGVKGRCGMTGPKVCGRISCSWNGGIFWCNDNNGYSEYDCSVFADYAEHVIENCRFIPEKGQRQVWGQAFDTENFNVMCGYDKC

SEQ ID NO: 4718 - DNA, 825 bp, Muscodor strobelii
  misc_feature: SGI cDNA ID NO. 561273
  misc_feature: Encodes the peptide sequence at SEQ ID NO 4719
atggcatccgacaagaagattctcttcatcactggaggcaacaccggtctcggctacgaggcagtgaaggcactttgccagtctcaagcttcttatgaaatcatcatagggtgccgcacagtctctaagggcgatgatgcaattgcccaggtaaagaaggaggttccacagacttcatccacgctgagcacggtgcaagtcgacttggaatccgacgagtcactcgagaaggcagttgagtcactgacttccaagttcggacggttggacgtgctgatcaacaacggcggagccagcttcgacaatgaaatcgcaagcggcaagttgtcgataagagatggctttaacaagacatggaatgtaaatgttgctggcacgcaggtcttgacgactctagcagttcctctactcctcaaatcttccgacccgcggctcatattcatcacgagcggcactgcgactcttacggagaccgagaagttcgatacgccaacccatgcgcgtatcaacaaacctctacccgcgggctggccaaaaggaccaacctcgggcttgcttacgacgtcataccgcagctcgaagacgggtttgaatatggtcatgcgtgaatggcacagaatactgctcaacgatggtgtcaaggtctggtgtatctcgcccggtttcctagcgacaggcttagccggcgtcggcgcagagaaactgaaagagttgggcgctttggatccttctgttggtggaaatttcattaaggatgtcgtcgagggcgctcgagaccatgatgttggtaaatcgatcaggaaagatatgatccagccctggtaa

SEQ ID NO: 4719 - protein, 274 aa, Muscodor strobelii
  misc_feature: SGI Peptide ID NO. 561273
  misc_feature (6)..(164): Pfam Id: PF00106 Pfam Desc: short chain dehydrogenase
  misc_feature (6)..(155): Pfam Id: PF00106 Pfam Desc: short chain dehydrogenase
  misc_feature (8)..(80): Pfam Id: PF03435 Pfam Desc: Saccharopine dehydrogenase
  misc_feature (1)..(274): NCBI GI: 169610357 Blast Desc: SNOG_08280 [Phaeosphaeria nodorum SN15] gi|160702041|gb|EAT84556.2| SNOG_08280 [Phaeosphaeria nodorum SN15]
  misc_feature (4)..(274): NCBI GI: 67524025 Blast Desc: AN2469.2 [Aspergillus nidulans FGSC A4] gi|40744631|gb|EAA63787.1| AN2469.2 [Aspergillus nidulans FGSC A4] gi|259487890|tpe|CBF86922.1| TPA: short chain dehydrogenase,
  misc_feature (3)..(274): NCBI GI: 238487346 Blast Desc: short chain dehydrogenase, [Aspergillus flavus NRRL3357] gi|220699790|gb|EED56129.1| short chain dehydrogenase, [Aspergillus flavus NRRL3357]
  misc_feature (1)..(274): NCBI GI: 121719374 Blast Desc: short chain dehydrogenase, [Aspergillus clavatus NRRL 1] gi|119404584|gb|EAW14960.1| short chain dehydrogenase, [Aspergillus clavatus NRRL 1]
  misc_feature (3)..(274): NCBI GI: 169770263 Blast Desc: [Aspergillus oryzae RIB40] gi|83767460|dbj|BAE57599.1| protein product [Aspergillus oryzae]
  misc_feature (1)..(274): NCBI GI: 119499239 Blast Desc: short chain dehydrogenase, [Neosartorya fischeri NRRL 181] gi|119414541|gb|EAW24480.1| short chain dehydrogenase, [Neosartorya fischeri NRRL 181]
  misc_feature (6)..(274): NCBI GI: 159125889 Blast Desc: polyglutamate biosynthesis protein, [Aspergillus fumigatus A1163]
  misc_feature (1)..(274): NCBI GI: 261357935 Blast Desc: conserved [Verticillium albo-atrum VaMs.102]
  misc_feature (3)..(274): NCBI GI: 256724418 Blast Desc: NECHADRAFT_105729 [Nectria haematococca mpVI 77-13-4]
  misc_feature (6)..(272): NCBI GI: 146323984 Blast Desc: short chain dehydrogenase [Aspergillus fumigatus Af293] gi|129556381|gb|EAL86151.2| short chain dehydrogenase, [Aspergillus fumigatus Af293]
  misc_feature (1)..(274): SWISSPROT Homolog: EC 1.1.1.189 Prostaglandin-E(2) 9-reductase
  misc_feature (1)..(274): SWISSPROT Homolog: EC 1.1.1.197 15-hydroxyprostaglandin dehydrogenase (NADP(+))
  misc_feature (1)..(274): SWISSPROT Homolog: EC 1.1.1.184 Carbonyl reductase (NADPH)
MASDKKILFITGGNTGLGYEAVKALCQSQASYEIIIGCRTVSKGDDAIAQVKKEVPQTSSTLSTVQVDLESDESLEKAVESLTSKFGRLDVLINNGGASFDNEIASGKLSIRDGFNKTWNVNVAGTQVLTTLAVPLLLKSSDPRLIFITSGTATLTETEKFDTPTHARINKPLPAGWPKGPTSGLLTTSYRSSKTGLNMVMREWHRILLNDGVKVWCISPGFLATGLAGVGAEKLKELGALDPSVGGNFIKDVVEGARDHDVGKSIRKDMIQPW

SEQ ID NO: 4720 - DNA, 1180 bp, Muscodor strobelii
  misc_feature: SGI EST ID NO. CUFF.11939.0
  misc_feature: Variant of the nucleotide sequence at SEQ ID NO 4718
cgtcgatggcacagcaagtgtagtataaatcaccacaaacttcccgtcctcgtttcgaaacgatactctgctatatcaccttcagcaagacctaagtaatcataaccttaaggcttataaaataatcagctaaattctacatcatggcatccgacaagaagattctcttcatcactggaggcaacaccggtctcggctacgaggcagtgaaggcactttgccagtctcaagcttcttatgaaatcatcatagggtgccgcacagtctctaagggcgatgatgcaattgcccaggtaaagaaggaggttccacagacttcatccacgctgagcacggtgcaagtcgacttggaatccgacgagtcactcgagaaggcagttgagtcactgacttccaagttcggacggttggacgtgctgatcaacaacggcggagccagcttcgacaatgaaatcgcaagcggcaagttgtcgataagagatggctttaacaagacatggaatgtaaatgttgctggcacgcaggtcttgacgactctagcagttcctctactcctcaaatcttccgacccgcggctcatattcatcacgagcggcactgcgactcttacggagaccgagaagttcgatacgccaacccatgcgcgtatcaacaaacctctacccgcgggctggccaaaaggaccaacctcgggcttgcttacgacgtcataccgcagctcgaagacgggtttgaatatggtcatgcgtgaatggcacagaatactgctcaacgatggtgtcaaggtctggtgtatctcgcccggtttcctagcgacaggcttagccggcgtcggcgcagagaaactgaaagagttgggcgctttggatccttctgttggtggaaatttcattaaggatgtcgtcgagggcgctcgagaccatgatgttggtaaatcgatcaggaaagatatgatccagccctggtaaaacggcaagatcgcagcattttgttcatgccactggtgtggaacggtgtagatatcttctgatgttcaggtagatgttgcacgttgcgatacaaaagggattcctgatttccacggatcctcaagacaacactgtgaccatgaccactgtgaaatgatcagtacaacgtatcatatgatgattgcgagtctttttcttaaaggagacgaaca

SEQ ID NO: 4721 - DNA, 858 bp, Muscodor strobelii
  misc_feature: SGI cDNA ID NO. 561274
  misc_feature: Encodes the peptide sequence at SEQ ID NO 4722
atgtcgtacgccgatagatataccaaaaagcccgtcacagatttcttcaccaatgacaccgatttcgaccgtcgtgagcaggtgcggacagtgcccatgaaagcgcttctcctcgcacctggacgcacaggcacagcgtccatgcgagcggctatgaaatctctcggtttcgttgacacttatcatatgatgaactgctcgatcgagaacccgccagatgcgcttctgtggatggatgcgctgcgagccaagtatgacggtgtaggcgaatttacacgaaaggattgggacaagctcttgggcaactcgcaggctgtttgcgactggcctgcatgcgcattcgcaaaggagcttatcgaggcatatccagaggctaaagtagtccttaccactcgcgacgttgattcttggcacgcttcaaccatgaaaacggtttattggcgtgctaccgatcctgagcttcgcatgttgtcgcattttagttgggcagccaagatgtactatcccatgctcaagaagttctttgatacgttcttcgagggagacttcccgaaccgcgggaaggaggtcttcacacgccattatgaggaggtgaagaagctggtaccgcccgagagactactagagtaccgtgtgcaagatggctgggagccgctctgcaaatttctggacgtccccgtaccgaaggatcggccgttccccaacgtcaacgacaactcagacttcatcacccgatcgcgtcgacggaaccgaaaccaaatgtacaatgttgctgcacaatggctcgaaatcctcggtcttaccctccttgttctgtatttgatcttctacgtacaactttccatgttctcagcatag

SEQ ID NO: 4722 - protein, 285 aa, Muscodor strobelii
  misc_feature: SGI Peptide ID NO. 561274
  misc_feature (1)..(283): NCBI GI: 256723174 Blast Desc: NECHADRAFT_81259 [Nectria haematococca mpVI 77-13-4]
  misc_feature (1)..(269): NCBI GI: 70996028 Blast Desc: conserved [Aspergillus fumigatus Af293] gi|66850404|gb|EAL90731.1| conserved [Aspergillus fumigatus Af293] gi|159131523|gb|EDP56636.1| conserved [Aspergillus A1163]
  misc_feature (1)..(269): NCBI GI: 119495130 Blast Desc: NFIA_011480 [Neosartorya fischeri NRRL 181] gi|119412519|gb|EAW22460.1| conserved [Neosartorya fischeri NRRL 181]
  misc_feature (3)..(269): NCBI GI: 121701191 Blast Desc: conserved [Aspergillus clavatus NRRL 1] gi|119397003|gb|EAW07434.1| conserved [Aspergillus clavatus NRRL 1]
  misc_feature (1)..(266): NCBI GI: 115492115 Blast Desc: conserved [Aspergillus terreus NIH2624] gi|114197545|gb|EAU39245.1| conserved [Aspergillus terreus NIH2624]
  misc_feature (1)..(284): NCBI GI: 145240367 Blast Desc: An08g07150 [Aspergillus niger] gi|134077347|emb|CAK39962.1| protein product [Aspergillus niger]
  misc_feature (4)..(260): NCBI GI: 259489002 Blast Desc: TPA: [Aspergillus nidulans FGSC A4]
  misc_feature (1)..(269): NCBI GI: 238489037 Blast Desc: NAD dependent epimerase/dehydratase, [Aspergillus flavus NRRL3357] gi|220698144|gb|EED54484.1| NAD dependent epimerase/dehydratase, [Aspergillus flavus NRRL3357]
  misc_feature (1)..(269): NCBI GI: 44889990 Blast Desc: , conserved [Aspergillus fumigatus]
  misc_feature (4)..(269): NCBI GI: 255941556 Blast Desc: Pc16g12480 [Penicillium chrysogenum Wisconsin 54-1255] gi|211586170|emb|CAP93918.1| Pc16g12480 [Penicillium chrysogenum Wisconsin 54-1255]
MSYADRYTKKPVTDFFTNDTDFDRREQVRTVPMKALLLAPGRTGTASMRAAMKSLGFVDTYHMMNCSIENPPDALLWMDALRAKYDGVGEFTRKDWDKLLGNSQAVCDWPACAFAKELIEAYPEAKVVLTTRDVDSWHASTMKTVYWRATDPELRMLSHFSWAAKMYYPMLKKFFDTFFEGDFPNRGKEVFTRHYEEVKKLVPPERLLEYRVQDGWEPLCKFLDVPVPKDRPFPNVNDNSDFITRSRRRNRNQMYNVAAQWLEILGLTLLVLYLIFYVQLSMFSA

SEQ ID NO: 4723 - DNA, 1536 bp, Muscodor strobelii
  misc_feature: SGI EST ID NO. CUFF.11958.0
  misc_feature: Variant of the nucleotide sequence at SEQ ID NO 4721
cccacctgctcatttattcgattgtatcttctgtcgctccttacttagtcattccgagagggcctcccaggacatctttgatcctgtacttctacgtatttgtctttgcactctgctcaccagtactgttttgcaaatcagctcaagttcattgtgcattacaaccgttgtccatcatgtcgtacgccgatagatataccaaaaagcccgtcacagatttcttcaccaatgacaccgatttcgaccgtcgtgagcaggtgcggacagtgcccatgaaagcgcttctcctcgcacctggacgcacaggcacagcgtccatgcgagcggctatgaaatctctcggtttcgttgacacttatcatatgatgaactgctcgatcgagaacccgccagatgcgcttctgtggatggatgcgctgcgagccaagtatgacggtgtaggcgaatttacacgaaaggattgggacaagctcttgggcaactcgcaggctgtttgcgactggcctgcatgcgcattcgcaaaggagcttatcgaggcatatccagaggctaaagtagtccttaccactcgcgacgttgattcttggcacgcttcaaccatgaaaacggtttattggcgtgctaccgatcctgagcttcgcatgttgtcgcattttagttgggcagccaagatgtactatcccatgctcaagaagttctttgatacgttcttcgagggagacttcccgaaccgcgggaaggaggtcttcacacgccattatgaggaggtgaagaagctggtaccgcccgagagactactagagtaccgtgtgcaagatggctgggagccgctctgcaaatttctggacgtccccgtaccgaaggatcggccgttccccaacgtcaacgacaactcagacttcatcacccgatcgcgtcgacggaaccgaaaccaaatgtacaatgttgctgcacaatggctcgaaatcctcggtcttaccctccttgttctgtatttgatcttctacgtacaactttccatgttctcagcatagatgtagagatggattacgacagatttattatggaaaattggttcggcgttggtggcttttggcgtttttttggcgtttctcatctgggtggctcggtcgggccgccattactgcctcgtgaatcgcgagaaatttatatacactatatgcgtgagagagtcaatagagagttaattacccacgtagaaatacagcgcaaggcgtcttcaacttcgacttcaactctgcaagtatgcaatggcaatgacgttccgtggaatggatcatgttgctaatagggcgaaaccgggtatctgccattttttcatttactccgtatatggcggcaccacctctaccattctggaatgtggtcctgtcgctgatttgtcgaaaactgacaaggggtcgacaggaggtcagccttggcatcttggcattgggtatcggtgtcatgattgctttttctgaaaaggcgaaaacgagcaaagatgagagcctcatccaacatttacatgccaag

SEQ ID NO: 4724 - DNA, 1776 bp, Muscodor strobelii
  misc_feature: SGI cDNA ID NO. 561275
  misc_feature: Encodes the peptide sequence at SEQ ID NO 4725
atggccaaagggcgagcttcaacctttaaaggccacggaaggacaacttcgctccagctacgctctgatgattcaccactcccaagccctgaggattttgaccagatgggtgtccctgaaagacgtcaagatgccgaggctcagacacctccaaaaactcccgcgaaaacacataatggaccagtgacgtggatgtcactaccacgaaaggatcaactggcgattctctttctctctcgactagtcgacttcttacaagtcgcatcgcttcaagcctacgttttctaccagcttaaaagcttcgacagcactctttccgatgcccagatctctgggcaagcaggtttattacagggtgcattcaccggcgcacaagtcttgacggcgtttctctggggtaaagcggccgacgcatcgtggtgcggacggaaaaatgtactgattattgggctttttggcactgcgatttcatgcattgggttcggcttcgcgaaaagtttctggactgctgctttctggcgtgcggctggaggcggcattaacgggacggttggaataatccggaccatgatcgctgagatcaccgttgagaggaagtatcagtccagagcttttttgattttacctattagctttagtgttgcagcaacactaggacctttaatgggtggtctgttggccgaccctgcgcttacgttacccgggcttttcggcgagggtgcgatctggggatttgaatggattttcaaatatccgtatgcactacccagtttcgtcaactgcgtgaccatcactatcacagggttgatagtcttcttcggactcgaagagacgtcgagcaaaagaaaggggaaattcgactggggtttgcatctttcacgtcaatggcgggcgaaactgctgcgccagcctgttcaacaaagctacgagacttattaccagcttgacgtattcaacagccccgagagctcgtccgattctccggagaaggtaccggctgtcccgacgccgccgacattcaagcgggcgggtagaacccttccaatgagccgcgtgtggacacgcaatgtcatcttcacattgatcacggaagccctcttcgacttccagcttggcgccttcaccaacctctggaccctctttctgtcgagtccgagatctacgcccgaagagacagccgcgcgctctttaccttgggtctttactggcggtttgggcatgcccgctgcgaccgtgggcttcgcgacatccatcctcgggataatcggcatgatactccagatctttgcttacccgccagtgcacgcacgtcttggaacgctgcgcgggttccgctacttcatgggtctgttcccggttgcatatttccttgcgccgtacctagttgtcttaccatccgctaccctcgcgcccgcaccagcttctggatatattatctgggtgttcatgacaatcgttcaagttttccaagttatggcacgcactgtgacccttccagctagcatcatcctgttgaacaactgcagtcctcatccgagtgtcttgggactcgtgcatggactgggacaaagcgtctcagcagggttcagaactgtcggaccagttgttggaggttggtggtacggcgccagtcttgaagccggcgttgtcggagccagttggtggggcgttgcggttgttgctgcgctcggatgtgcttcatctttcctcatatatgagggaagcggccacgaaataatacttgagggagaagaagatgaaaagctactgagctag

SEQ ID NO: 4725 - protein, 591 aa, Muscodor strobelii
  misc_feature: SGI Peptide ID NO. 561275
  misc_feature (76)..(534): Pfam Id: PF07690 Pfam Desc: Major Facilitator Superfamily
  misc_feature (111)..(534): Pfam Id: PF07690 Pfam Desc: Major Facilitator Superfamily
  misc_feature (12)..(581): NCBI GI: 154291752 Blast Desc: BC1G_15035 [Botryotinia fuckeliana B05.10] gi|150846614|gb|EDN21807.1| BC1G_15035 [Botryotinia fuckeliana B05.10]
  misc_feature (25)..(583): NCBI GI: 156034519 Blast Desc: SS1G_13194 [Sclerotinia sclerotiorum 1980] gi|154698598|gb|EDN98336.1| SS1G_13194 [Sclerotinia sclerotiorum 1980]
  misc_feature (60)..(586): NCBI GI: 256723097 Blast Desc: NECHADRAFT_12433 [Nectria haematococca mpVI 77-13-4]
  misc_feature (5)..(587): NCBI GI: 115492113 Blast Desc: conserved [Aspergillus terreus NIH2624] gi|114197544|gb|EAU39244.1| conserved [Aspergillus terreus NIH2624]
  misc_feature (22)..(587): NCBI GI: 169763164 Blast Desc: [Aspergillus oryzae RIB40] gi|238489033|ref|XP_002375754.1| MFS transporter, [Aspergillus flavus NRRL3357] gi|83770510|dbj|BAE60643.1| protein product MFS
  misc_feature (35)..(588): NCBI GI: 145240359 Blast Desc: An08g07110 [Aspergillus niger] gi|134077343|emb|CAK39958.1| protein product [Aspergillus niger]
  misc_feature (57)..(587): NCBI GI: 121701195 Blast Desc: MFS transporter, [Aspergillus clavatus NRRL 1] gi|119397005|gb|EAW07436.1| MFS transporter, [Aspergillus clavatus NRRL 1]
  misc_feature (60)..(587): NCBI GI: 70996024 Blast Desc: MFS transporter [Aspergillus fumigatus Af293] gi|44889988|emb|CAF32106.1| transporter-like protein [Aspergillus fumigatus] gi|66850402|gb|EAL90729.1| MFS transporter, fumigatus
  misc_feature (60)..(587): NCBI GI: 119495134 Blast Desc: MFS transporter, [Neosartorya fischeri NRRL 181] gi|119412521|gb|EAW22462.1| MFS transporter, [Neosartorya fischeri NRRL 181]
  misc_feature (1)..(587): NCBI GI: 255941568 Blast Desc: Pc16g12540 [Penicillium chrysogenum Wisconsin 54-1255] gi|211586176|emb|CAP93924.1| Pc16g12540 [Penicillium chrysogenum Wisconsin 54-1255]
MAKGRASTFKGHGRTTSLQLRSDDSPLPSPEDFDQMGVPERRQDAEAQTPPKTPAKTHNGPVTWMSLPRKDQLAILFLSRLVDFLQVASLQAYVFYQLKSFDSTLSDAQISGQAGLLQGAFTGAQVLTAFLWGKAADASWCGRKNVLIIGLFGTAISCIGFGFAKSFWTAAFWRAAGGGINGTVGIIRTMIAEITVERKYQSRAFLILPISFSVAATLGPLMGGLLADPALTLPGLFGEGAIWGFEWIFKYPYALPSFVNCVTITITGLIVFFGLEETSSKRKGKFDWGLHLSRQWRAKLLRQPVQQSYETYYQLDVFNSPESSSDSPEKVPAVPTPPTFKRAGRTLPMSRVWTRNVIFTLITEALFDFQLGAFTNLWTLFLSSPRSTPEETAARSLPWVFTGGLGMPAATVGFATSILGIIGMILQIFAYPPVHARLGTLRGFRYFMGLFPVAYFLAPYLVVLPSATLAPAPASGYIIWVFMTIVQVFQVMARTVTLPASIILLNNCSPHPSVLGLVHGLGQSVSAGFRTVGPVVGGWWYGASLEAGVVGASWWGVAVVAALGCASSFLIYEGSGHEIILEGEEDEKLLS

SEQ ID NO: 4726 - DNA, 2760 bp, Muscodor strobelii
  misc_feature: SGI EST ID NO. CUFF.11970.0
  misc_feature: Variant of the nucleotide sequence at SEQ ID NO 4724
cgacaagatgggagaatgcgagtaattggtttgcgttgggagagaaggtggacagcacctcaggtgcacgccaatactcgagtccactgcttcgatttcggttgtgctcaataatcatgcatggctggaatgcggagcatgcctttgacacccggctgagcgcgactcctccgtgggtctgtctcttctggcgccaggcctcttctgcataaatgacgacagcggacgcggcgtcgggtttcgggtggccgtccgttgttagaggcctgccctgtacatgcctgtcgcgctttagattagcagctaaacacaagcttcttcaatactttcttcacttgttggctgagagaactcgcgaccctggatggctcgcatgtccacttctgatacataagtcgatcaaagactggtccgcgtagtaaactcgccgttagcgacagaggcgatccggacgagaggtcatgagatgataatactgcattgccatctacccgttcttgcatacatgattcctgttccgtttcaccctttcgtactatccctaaacccaagccattatctccggagttgtaacgcggattatcttgcatctcaactacacccgcgtcagcaactccgcctccaacactgattcattcgcgcaatctattgctattgaaacattcctccgtcccgggtttatttttacactcatgtaccaataaagcaccactccatcgtcctgttttccttataggtaccccctccaatcggatcggcacactcttccctttcttgcctataatggccaaagggcgagcttcaacctttaaaggccacggaaggacaacttcgctccagctacgctctgatgattcaccactcccaagccctgaggattttgaccagatgggtgtccctgaaagacgtcaagatgccgaggctcagacacctccaaaaactcccgcgaaaacacataatggaccagtgacgtggatgtcactaccacgaaaggatcaactggcgattctctttctctctcgactagtcgacttcttacaagtcgcatcgcttcaagcctacgttttctaccagcttaaaagcttcgacagcactctttccgatgcccagatctctgggcaagcaggtttattacagggtgcattcaccggcgcacaagtcttgacggcgtttctctggggtaaagcggccgacgcatcgtggtgcggacggaaaaatgtactgattattgggctttttggcactgcgatttcatgcattgggttcggcttcgcgaaaagtttctggactgctgctttctggcgtgcggctggaggcggcattaacgggacggttggaataatccggaccatgatcgctgagatcaccgttgagaggaagtatcagtccagagcttttttgattttacctattagctttagtgttgcagcaacactaggacctttaatgggtggtctgttggccgaccctgcgcttacgttacccgggcttttcggcgagggtgcgatctggggatttgaatggattttcaaatatccgtatgcactacccagtttcgtcaactgcgtgaccatcactatcacagggttgatagtcttcttcggactcgaagagacgtcgagcaaaagaaaggggaaattcgactggggtttgcatctttcacgtcaatggcgggcgaaactgctgcgccagcctgttcaacaaagctacgagacttattaccagcttgacgtattcaacagccccgagagctcgtccgattctccggagaaggtaccggctgtcccgacgccgccgacattcaagcgggcgggtagaacccttccaatgagccgcgtgtggacacgcaatgtcatcttcacattgatcacggaagccctcttcgacttccagcttggcgccttcaccaacctctggaccctctttctgtcgagtccgagatctacgcccgaagagacagccgcgcgctctttaccttgggtctttactggcggtttgggcatgcccgctgcgaccgtgggcttcgcgacatccatcctcgggataatcggcatgatactccagatctttgcttacccgccagtgcacgcacgtcttggaacgctgcgcgggttccgctacttcatgggtctgttcccggttgcatatttccttgcgccgtacctagttgtcttaccatccgctaccctcgcgcccgcaccagcttctggatatattatctgggtgttcatgacaatcgttcaagttttccaagttatggcacgcactgtgacccttccagctagcatcatcctgttgaacaactgcagtcctcatccgagtgtcttgggactcgtgcatggactgggacaaagcgtctcagcagggttcagaactgtcggaccagttgttggaggttggtggtacggcgccagtcttgaagccggcgttgtcggagccagttggtggggcgttgcggttgttgctgcgctcggatgtgcttcatctttcctcatatatgagggaagcggccacgaaataatacttgagggagaagaagatgaaaagctactgagctagatagacagccgcacattctgtaaataattgaaagactgcatatatacctttggcctataatggcatgagactcattcacttgaaatgcatttttaaatcaagtatacaatgatttctgctcttcagttacagagagcttccactccgcatctggcacacttgtgctacttagccctgtttaatttcgtaatgcagcctcac

SEQ ID NO: 4727 - DNA, 792 bp, Muscodor strobelii
  misc_feature: SGI cDNA ID NO. 561276
  misc_feature: Elevated expression when VOC is produced
  misc_feature: Encodes the peptide sequence at SEQ ID NO 4728
atgaagtcaatcattgctgccgctttattcgccggggttgcctgggcaactccggttgatgtactcatggcgaatgccaaagctgaattggctgccaggaatgctgcccgtcgctctcgagctatgattgctaccggcgaaattaaaatcaacggtacagctaccactgttgagtcttctaactggtcgggtgctgcggttgtggcttcgggagtcacgaaagtcacgggaacctttactattcctaagccgtcaataccatctggaggtagctctcgtactgaatattgtggcgctgcctgggttggtatcgacggttacaacaacgccgaccttatccagacaggtgtcctctggtgcgtcgaaggtacttcatatttgtatgaagcgtggtatgagtacctgccagctgccttgattcagtattcaggcatcaccgttaccaatggcgaatctgttactgtcaccgcaaccaaaactggaaccaacagcggagttacgactttgactgctggcggaacgaccgtcacgcatactttctcgaatcagaattcgcctcttcctggcgccagcgccgaatggattgtcgaagatttcacgtctggcaactccctggttccgttggcggattggggaactgtgacattcactggcgctagcgccacaatcaatggagcaactgtcacacctggcagcggcaacgccgtcaatattgagctacagagcggtggaaatgtcgtatcttcggagtcgatctctggaagcaccgtctcgatcacttatactggctaa

SEQ ID NO: 4728 - protein, 263 aa, Muscodor strobelii
  misc_feature: SGI Peptide ID NO. 561276
  misc_feature (59)..(262): Pfam Id: PF01828 Pfam Desc: Peptidase A4 family
  misc_feature (32)..(261): NCBI GI: 212534108 Blast Desc: aspergillopepsin, [Penicillium marneffei ATCC 18224] gi|210069609|gb|EEA23699.1| aspergillopepsin, [Penicillium marneffei ATCC 18224]
  misc_feature (3)..(239): NCBI GI: 145251555 Blast Desc: An15g07700 [Aspergillus niger] gi|134082826|emb|CAK42657.1| protein product [Aspergillus niger]
  misc_feature (1)..(263): NCBI GI: 238499183 Blast Desc: aspergillopepsin, [Aspergillus flavus NRRL3357] gi|220692579|gb|EED48925.1| aspergillopepsin, [Aspergillus flavus NRRL3357]
  misc_feature (1)..(259): NCBI GI: 242789335 Blast Desc: aspergillopepsin, [Talaromyces stipitatus ATCC 10500] gi|218717927|gb|EED17347.1| aspergillopepsin, [Talaromyces stipitatus ATCC 10500]
  misc_feature (1)..(239): NCBI GI: 119474281 Blast Desc: aspergillopepsin, [Neosartorya fischeri NRRL 181] gi|119407169|gb|EAW17119.1| aspergillopepsin, [Neosartorya fischeri NRRL 181]
  misc_feature (5)..(261): NCBI GI: 67901056 Blast Desc: AN7515.2 [Aspergillus nidulans FGSC A4] gi|40742905|gb|EAA62095.1| AN7515.2 [Aspergillus nidulans FGSC A4] gi|259483831|tpe|CBF79544.1| TPA: aspergillopepsin, nidulans
  misc_feature (6)..(261): NCBI GI: 212530110 Blast Desc: aspergillopepsin-2 precursor, [Penicillium marneffei ATCC 18224] gi|210074610|gb|EEA28697.1| aspergillopepsin-2 precursor, [Penicillium marneffei ATCC 18224]
  misc_feature (3)..(261): NCBI GI: 255940586 Blast Desc: Pc16g07360 [Penicillium chrysogenum Wisconsin 54-1255] gi|211585685|emb|CAP93406.1| Pc16g07360 [Penicillium chrysogenum Wisconsin 54-1255]
  misc_feature (27)..(261): NCBI GI: 1183902 Blast Desc: acid proteinase [Cryphonectria parasitica]
  misc_feature (6)..(261): NCBI GI: 242761411 Blast Desc: aspergillopepsin-2 precursor, [Talaromyces stipitatus ATCC 10500] gi|218723370|gb|EED22787.1| aspergillopepsin-2 precursor, [Talaromyces stipitatus ATCC 10500]
  misc_feature (48)..(239): SWISSPROT Homolog: EC 3.4.23.19 Aspergillopepsin II
  misc_feature: Useful for introducing or modulating the production of volatile compounds
MKSIIAAALFAGVAWATPVDVLMANAKAELAARNAARRSRAMIATGEIKINGTATTVESSNWSGAAVVASGVTKVTGTFTIPKPSIPSGGSSRTEYCGAAWVGIDGYNNADLIQTGVLWCVEGTSYLYEAWYEYLPAALIQYSGITVTNGESVTVTATKTGTNSGVTTLTAGGTTVTHTFSNQNSPLPGASAEWIVEDFTSGNSLVPLADWGTVTFTGASATINGATVTPGSGNAVNIELQSGGNVVSSESISGSTVSITYTG

SEQ ID NO: 4729 - DNA, 1272 bp, Muscodor strobelii
  misc_feature: SGI EST ID NO. CUFF.11979.0
  misc_feature: Variant of the nucleotide sequence at SEQ ID NO 4727
cggttgttaggtcatcctcacgagggcttaaaggtgctcgtgtggtatcatatcccttgaaagcaaggtgaacttacagtataaaacatcttgtaaatcccaccagcacatgaaatctttaccccatgcctagccatcaactcgcaaatccacaatacacatcgcctcactcactcttgctttcctttgctcagaaggtctttaaagatgaagtcaatcattgctgccgctttattcgccggggttgcctgggcaactccggttgatgtactcatggcgaatgccaaagctgaattggctgccaggaatgctgcccgtcgctctcgagctatgattgctaccggcgaaattaaaatcaacggtacagctaccactgttgagtcttctaactggtcgggtgctgcggttgtggcttcgggagtcacgaaagtcacgggaacctttactattcctaagccgtcaataccatctggaggtagctctcgtactgaatattgtggcgctgcctgggttggtatcgacggttacaacaacgccgaccttatccagacaggtgtcctctggtgcgtcgaaggtacttcatatttgtatgaagcgtggtatgagtacctgccagctgccttgattcagtattcaggcatcaccgttaccaatggcgaatctgttactgtcaccgcaaccaaaactggaaccaacagcggagttacgactttgactgctggcggaacgaccgtcacgcatactttctcgaatcagaattcgcctcttcctggcgccagcgccgaatggattgtcgaagatttcacgtctggcaactccctggttccgttggcggattggggaactgtgacattcactggcgctagcgccacaatcaatggagcaactgtcacacctggcagcggcaacgccgtcaatattgagctacagagcggtggaaatgtcgtatcttcggagtcgatctctggaagcaccgtctcgatcacttatactggctaattacggggtagcgaagttgctatgagacggacggaataggaggtccatggagcttgtcttgttgatattattatatcggtcgttcgtgctctagaatagcctcttgagatgtctcgtaatacaaatggccgtctcctgagtgtcctagagggcatggtatcgaactgcataaagagcattctagcagtgtcgggtagctagatactgagagatacaagtgactatacttcagctcaaaaattaattcatcgtttactccatgttcgactccag

SEQ ID NO: 4730 - DNA, 1050 bp, Muscodor strobelii
  misc_feature: SGI cDNA ID NO. 561277
  misc_feature: Encodes the peptide sequence at SEQ ID NO 4731
atgcggccactagcccctaccacattgttgagcaccctttcgtgcttagcaacagcacaaaaccagacgggcagccgcttcttgggtcgcgttaatccagcgacgcgcgagctgtcatggccagcgtctggcatcgctcttagcttcactggaacatctgccaaagtcccagtcacatctcaatggggtgatacgagtatcgaaatggttgtcgacaatggagcacctattgtcatcgatcacttcagtggcacaagcattaatacccctactggactgaaaagcggcgcccataccgtcgagatccgtaaaaagtctgaggcgtactttggaagtctttacttgggcgagccaagcacagatggcactttcactacgttaaagacaccgcaaagaagattagaacttatcggcgattctatcaccgttggctacggtcttgaaggtgtttatccatgtacgaatgccgcagataacgaaggagcaacattgacctacggcgcgctaacagccaagaatctatcggccgactattcgatagtagcatggtctggtaaagggttgacgcggaattacgtatcgtctacgccagatacgtcgccgcttatgccagagctctggacacgatacggtccaaatgacgccgataacagctatgatttttctgccccggtggacattgtcgtgattaatctgggcaccaacgatttctcatttcaagacggtgtccgagggcagctaaatgtggcaaactttactacggccttggtcaactttgccgacacagttcataaaaagtacccgagcgctgctatgtttatcctcagttctcccttactcgacaacagtacggccgagatgcagaaggcgaaacaacagggcgctattaaatccgctatatctcaattagcattcacggctcattttgttgacattcctactcaggactcgtctaataacaacattggttgcgactatcacccatcggccttaactcaccagaaaatggccgttgtactgacaaatgcaattgaagacgtgcttggataa

SEQ ID NO: 4731 - protein, 349 aa, Muscodor strobelii
  misc_feature: SGI Peptide ID NO. 561277
  misc_feature (134)..(340): Pfam Id: PF00657 Pfam Desc: GDSL-like Lipase/Acylhydrolase
  misc_feature (25)..(349): NCBI GI: 39946700 Blast Desc: MGG_08550 [Magnaporthe grisea 70-15] gi|145012399|gb|EDJ97055.1| MGG_08550 [Magnaporthe grisea 70-15]
  misc_feature (26)..(349): NCBI GI: 212536648 Blast Desc: conserved [Penicillium marneffei ATCC 18224] gi|210070879|gb|EEA24969.1| conserved [Penicillium marneffei ATCC 18224]
  misc_feature (24)..(349): NCBI GI: 116198749 Blast Desc: CHGG_07530 [Chaetomium globosum CBS 148.51] gi|88178809|gb|EAQ86277.1| CHGG_07530 [Chaetomium globosum CBS 148.51]
  misc_feature (8)..(348): NCBI GI: 46139195 Blast Desc: FG11112.1 [Gibberella zeae PH-1]
  misc_feature (16)..(349): NCBI GI: 189199630 Blast Desc: endoglucanase E precursor [Pyrenophora tritici-repentis Pt-1C-BFP] gi|187983251|gb|EDU48739.1| endoglucanase E precursor [Pyrenophora tritici-repentis
  misc_feature (11)..(349): NCBI GI: 256722319 Blast Desc: NECHADRAFT_97898 [Nectria haematococca mpVI 77-13-4]
  misc_feature (11)..(349): NCBI GI: 169611326 Blast Desc: SNOG_08773 [Phaeosphaeria nodorum SN15] gi|111062821|gb|EAT83941.1| SNOG_08773 [Phaeosphaeria nodorum SN15]
  misc_feature (16)..(349): NCBI GI: 242262739 Blast Desc: lipolytic protein G-D-S-L family [Clostridium cellulovorans 743B] gi|242224890|gb|EES28279.1| lipolytic protein G-D-S-L family [Clostridium cellulovorans 743B]
  misc_feature (16)..(349): NCBI GI: 220929575 Blast Desc: lipolytic protein G-D-S-L family [Clostridium cellulolyticum H10] gi|219999903|gb|ACL76504.1| lipolytic protein G-D-S-L family [Clostridium cellulolyticum H10]
  misc_feature (19)..(349): NCBI GI: 256757078 Blast Desc: lipolytic protein G-D-S-L family [Clostridium papyrosolvens DSM 2782] gi|256744038|gb|EEU57204.1| lipolytic protein G-D-S-L family [Clostridium papyrosolvens DSM 2782]
  misc_feature (20)..(349): SWISSPROT Homolog: EC 3.2.1.4 Cellulase
MRPLAPTTLLSTLSCLATAQNQTGSRFLGRVNPATRELSWPASGIALSFTGTSAKVPVTSQWGDTSIEMVVDNGAPIVIDHFSGTSINTPTGLKSGAHTVEIRKKSEAYFGSLYLGEPSTDGTFTTLKTPQRRLELIGDSITVGYGLEGVYPCTNAADNEGATLTYGALTAKNLSADYSIVAWSGKGLTRNYVSSTPDTSPLMPELWTRYGPNDADNSYDFSAPVDIVVINLGTNDFSFQDGVRGQLNVANFTTALVNFADTVHKKYPSAAMFILSSPLLDNSTAEMQKAKQQGAIKSAISQLAFTAHFVDIPTQDSSNNNIGCDYHPSALTHQKMAVVLTNAIEDVLG

SEQ ID NO: 4732 - DNA, 1934 bp, Muscodor strobelii
  misc_feature: SGI EST ID NO. CUFF.11982.0
  misc_feature: Variant of the nucleotide sequence at SEQ ID NO 4730
gggcaaggcgatgtattcattttgagtgcattttcataactcaaattgtaatctcttcgttactgccagttcaatcgatgcagagtcgttagactatatcgctcaatccatgtaaaagaatacagcgtgttcgcagtggatcagacggcacgcacagggcttcatatacccctaccacacccttccatgatgtgtctccccgaggtccccgattaatatcgtagcttcatccgcatcttgtgccttctactaggctcagagataagcttggaaggcgcgctcgttaacgcgactaattcaatacacttttcgggtcaatgtttctgcccgtaacatgcaggtagggtctaatggcggaatgctaataagagaatgtagagagtcaccacccatcgcactgattgtaagaggcgcggcaggatgaacatcactcggatatcgctaccaaatgcatcgcactttctcagcccgcaccacactccggcctgtacattttgaatgaattccggtgaactcatcgattcttcgacgtcgcactattccgcatcaattactacccgaggcgacggcagcttcaaggccgaaggctccggcccgtgtcgcgatagcagccagcaatgcggaggggggagacccgaaatgcctcttttggtcaagcataactcgactgtacatatgcgttctacgcatatactcaagcctgtcatggcacatataaaatacgggtttccccttggggagctcttctttactggtatttcacagctcgtgcatgacacatgtgctttcatcatgcggccactagcccctaccacattgttgagcaccctttcgtgcttagcaacagcacaaaaccagacgggcagccgcttcttgggtcgcgttaatccagcgacgcgcgagctgtcatggccagcgtctggcatcgctcttagcttcactggaacatctgccaaagtcccagtcacatctcaatggggtgatacgagtatcgaaatggttgtcgacaatggagcacctattgtcatcgatcacttcagtggcacaagcattaatacccctactggactgaaaagcggcgcccataccgtcgagatccgtaaaaagtctgaggcgtactttggaagtctttacttgggcgagccaagcacagatggcactttcactacgttaaagacaccgcaaagaagattagaacttatcggcgattctatcaccgttggctacggtcttgaaggtgtttatccatgtacgaatgccgcagataacgaaggagcaacattgacctacggcgcgctaacagccaagaatctatcggccgactattcgatagtagcatggtctggtaaagggttgacgcggaattacgtatcgtctacgccagatacgtcgccgcttatgccagagctctggacacgatacggtccaaatgacgccgataacagctatgatttttctgccccggtggacattgtcgtgattaatctgggcaccaacgatttctcatttcaagacggtgtccgagggcagctaaatgtggcaaactttactacggccttggtcaactttgccgacacagttcataaaaagtacccgagcgctgctatgtttatcctcagttctcccttactcgacaacagtacggccgagatgcagaaggcgaaacaacagggcgctattaaatccgctatatctcaattagcattcacggctcattttgttgacattcctactcaggactcgtctaataacaacattggttgcgactatcacccatcggccttaactcaccagaaaatggccgttgtactgacaaatgcaattgaagacgtgcttggataagagcggagccatagaaattgaaatcaattcaagtcgcgaatagaacacaagtattcgtgattattaaaaccaaatcaaataacagacttatt

SEQ ID NO: 4733 - DNA, 1515 bp, Muscodor strobelii
  misc_feature: SGI cDNA ID NO. 561278
  misc_feature: Encodes the peptide sequence at SEQ ID NO 4734
atgctctacgaggccaaattcaaacgcgccagcgcagttgcgttcggcctaggagcaactctcgttgctgcaggaccatgcgacatctatgcatccggtggtaacccgtgtgttgccgctcacagtacaacgcgtgctttgtacagctcgttcagtggcgccctctatcaagtcaaacgtaattccgatggtgctacaactacgatctcgccgctgtctgcgggtggtgtcgccaatgctgctgctcaggataccttttgtgccagcacgacctgtttaatcaccattatctacgatcagtcagggagaggcaatcacttgacgcaggcccctcccggtggcttcagtggtccggaagccaatggctacgataacttggcgagtgcaattggtgcgccagtcacactaaatggacaaaaggcatacggtgtattcgtctcgcccggcaccggataccgaaatgacaataccaacggcatagcgactggcgatgtagcagagggcatgtatgctgttcttgatggaactcactacaacggcggctgttgcttcgattacggaaacgctgaaacgaacaatcgcgatactggcaatggccacatggaagctatatacttcggaacggagacagcttggggtcgtggcgctggtagtgggccctggttcatggccgatcttgaaaacggactcttctccggtctctcctctggtcaaaatactggcgatccgtccatctcgtaccgatttctcagcgctttccttaaaggacagccgaatcaatgggctctgcgaggcgggaacgccgcatcaggctcgctgtcgacatactatagcggagcgcggccgagtgctagtggttacaatccaatgcataaggagggtgctatcattctcggtatcggcggagataacagtgtcagtgctcagggcactttctacgagggagtgatgacctctggatacccgtcagacgccacggaggcgtcggttcaggccaacatcgtagctgccaaatatgctaccacttcgttgaccagcggcactgctctttcaactggctctaaggtatctctgcgtgtcactacgtcgggatatgatacacgctacatcgctcataccggcaccaccgtaaacactcaagtcgtgacgacctcgagtgccaccgccctcaagcagcaagctagttggacagtggtagctgggctcggaaacagtgcctgcgtgtcttttcaatctgttgacactcccggcagctacatcaggcattacaacttcgcgctgacactcgccgccaatgatggcacgaagcaatttcatgaggatgcgactttctgcccgagggcaggattgagtggtacaggaagctctttcttggcctggggctacccaactcgctttttccggcattatgacaatgttatgtatgttgccagtcaagggggtgtcgacacttttgacgctgcgggttcatacaatgccgacgtcagcttcgtcgtgagcagctcctttgcttaa

SEQ ID NO: 4734 - protein, 504 aa, Muscodor strobelii
  misc_feature: SGI Peptide ID NO. 561278
  misc_feature (356)..(500): Pfam Id: PF05270 Pfam Desc: Alpha-L-arabinofuranosidase B (ABFB)
  misc_feature (26)..(343): Pfam Id: PF09206 Pfam Desc: Alpha-L-arabinofuranosidase B, catalytic
  misc_feature (1)..(504): NCBI GI: 13991905 Blast Desc: AF367026_1 alpha-L-arabinofuranosidase [Penicillium purpurogenum]
  misc_feature (1)..(504): NCBI GI: 154314102 Blast Desc: BC1G_04994 [Botryotinia fuckeliana B05.10] gi|150849140|gb|EDN24333.1| BC1G_04994 [Botryotinia fuckeliana B05.10]
  misc_feature (7)..(504): NCBI GI: 238490130 Blast Desc: fungal alpha-L-arabinofuranosidase, [Aspergillus flavus NRRL3357] gi|220696715|gb|EED53056.1| fungal alpha-L-arabinofuranosidase, [Aspergillus flavus NRRL3357]
  misc_feature (7)..(504): NCBI GI: 169772253 Blast Desc: [Aspergillus oryzae RIB40] gi|83768456|dbj|BAE58593.1| protein product [Aspergillus oryzae]
  misc_feature (7)..(504): NCBI GI: 16754883 Blast Desc: alpha-L-arabinofuranosidase B [Aspergillus oryzae]
  misc_feature (7)..(504): NCBI GI: 16754881 Blast Desc: alpha-L-arabinofuranosidase B [Aspergillus oryzae]
  misc_feature (1)..(504): NCBI GI: 115401944 Blast Desc: alpha-N-arabinofuranosidase precursor [Aspergillus terreus NIH2624] gi|114190501|gb|EAU32201.1| alpha-N-arabinofuranosidase precursor [Aspergillus terreus
  misc_feature (1)..(504): NCBI GI: 121709492 Blast Desc: alpha-L-arabinofuranosidase B domain protein [Aspergillus clavatus NRRL 1] gi|119400586|gb|EAW11011.1| alpha-L-arabinofuranosidase B domain protein [Aspergillus NRRL 1]
  misc_feature (1)..(504): NCBI GI: 255950194 Blast Desc: Pc22g19620 [Penicillium chrysogenum Wisconsin 54-1255] gi|206597158|dbj|BAG71681.1| alfa-L-arabinofuranosidase [Penicillium chrysogenum] gi|211592881|emb|CAP99250.1| Pc22g19620
  misc_feature (1)..(504): NCBI GI: 70992975 Blast Desc: fungal alpha-L-arabinofuranosidase [Aspergillus fumigatus Af293] gi|66848969|gb|EAL89298.1| fungal alpha-L-arabinofuranosidase, [Aspergillus fumigatus Af293]
  misc_feature (1)..(494): SWISSPROT Homolog: EC 3.2.1.55 Alpha-N-arabinofuranosidase
MLYEAKFKRASAVAFGLGATLVAAGPCDIYASGGNPCVAAHSTTRALYSSFSGALYQVKRNSDGATTTISPLSAGGVANAAAQDTFCASTTCLITIIYDQSGRGNHLTQAPPGGFSGPEANGYDNLASAIGAPVTLNGQKAYGVFVSPGTGYRNDNTNGIATGDVAEGMYAVLDGTHYNGGCCFDYGNAETNNRDTGNGHMEAIYFGTETAWGRGAGSGPWFMADLENGLFSGLSSGQNTGDPSISYRFLSAFLKGQPNQWALRGGNAASGSLSTYYSGARPSASGYNPMHKEGAIILGIGGDNSVSAQGTFYEGVMTSGYPSDATEASVQANIVAAKYATTSLTSGTALSTGSKVSLRVTTSGYDTRYIAHTGTTVNTQVVTTSSATALKQQASWTVVAGLGNSACVSFQSVDTPGSYIRHYNFALTLAANDGTKQFHEDATFCPRAGLSGTGSSFLAWGYPTRFFRHYDNVMYVASQGGVDTFDAAGSYNADVSFVVSSSFA

SEQ ID NO: 4735 - DNA, 1080 bp, Muscodor strobelii
  misc_feature: SGI cDNA ID NO. 561279
  misc_feature: Encodes the peptide sequence at SEQ ID NO 4736
atgacgaacattacacccgagcaatcttccataccattgggctcagtcatcctcattactggcgccaacggcatcatcgcatcctgggtcgtggacaaatttctcgcagcggggtaccgagtccgtggaactgttcgtagcgcctcaaagaatgtgtggctgaacagcttttttactgagcgatacggcatcgacaagtttgaacttctagaaatcgcagacttcagtgctcccggggtatggacctcggctgtcaaaggcgtggctgggattgcagctatagccggaaaagtaggcgttgatgttaaaaacctaggcgagtcactaaacgaggagctaccatgggtatatggactcctctcagcggctaaagaggaagcaagcgtccggtcattcgtatacacagggtccgcctgggcggcatggacaccagaagccaacaagaaagtgacgctcggggaatggtcatacaacgaggatgcgattcgaattatgcaaagcggcggaccaagaaacgggaatccattcgtaggctacatggctttcaaagcggttcttgagcaacgaatttgggactgggttcgtcaggagaagcccacatatgcattcaacaccatactgcccgaagctgtcatggggaaagtcttgagcccggaaaatcaaggcattccgagttcatgcgtgtttccgaagtgggtttgggagaacgagaacattgaatttctgaatagctttccgccccaatggttcatcgatactcaggatgttggctcactatacctagcaattatgacatcccctgatgtgaatggtgaacggcttttcggatttggcaacaaattcagcatgttcaagattcgggagatccttcaaaagttggagcctcagagaaatctacaggtgctgcaagataacggctgggatgagacggaggtgcctaataagagatccgaagatcttgtgcggagggtgagtggacgtggttggaacagtttggaaaacagcatcgtccagctacttggtgatatcaagatcgtcgagcagttgccatctgcacctcgtagcatgttggacagataa

SEQ ID NO: 4736 - protein, 359 aa, Muscodor strobelii
  misc_feature: SGI Peptide ID NO. 561279
  misc_feature (17)..(49): Pfam Id: PF01370 Pfam Desc: NAD dependent epimerase/dehydratase family
  misc_feature (5)..(336): NCBI GI: 116197545 Blast Desc: CHGG_06928 [Chaetomium globosum CBS 148.51] gi|88178207|gb|EAQ85675.1| CHGG_06928 [Chaetomium globosum CBS 148.51]
  misc_feature (4)..(336): NCBI GI: 85084995 Blast Desc: NCU07195 [Neurospora crassa OR74A] gi|28918511|gb|EAA28184.1| [Neurospora crassa OR74A] gi|28950220|emb|CAD71087.1| related to aldehyde reductase II
  misc_feature (3)..(336): NCBI GI: 85115862 Blast Desc: NCU00797 [Neurospora crassa OR74A] gi|28926751|gb|EAA35717.1| [Neurospora crassa OR74A]
  misc_feature (11)..(336): NCBI GI: 169765928 Blast Desc: [Aspergillus oryzae RIB40] gi|83765290|dbj|BAE55433.1| protein product [Aspergillus oryzae]
  misc_feature (11)..(336): NCBI GI: 238482541 Blast Desc: aldehyde reductase II [Aspergillus flavus NRRL3357] gi|220700559|gb|EED56897.1| aldehyde reductase II [Aspergillus flavus NRRL3357]
  misc_feature (10)..(342): NCBI GI: 226278768 Blast Desc: aldehyde reductase [Paracoccidioides brasiliensis Pb01]
  misc_feature (4)..(343): NCBI GI: 226295232 Blast Desc: aldehyde reductase [Paracoccidioides brasiliensis Pb18]
  misc_feature (4)..(343): NCBI GI: 225677621 Blast Desc: aldehyde reductase II [Paracoccidioides brasiliensis Pb03]
  misc_feature (7)..(345): NCBI GI: 225561485 Blast Desc: aldehyde reductase [Ajellomyces capsulatus G186AR]
  misc_feature (7)..(343): NCBI GI: 154282725 Blast Desc: [Ajellomyces capsulatus NAm1] gi|150410338|gb|EDN05726.1| [Ajellomyces capsulatus NAm1]
  misc_feature (7)..(341): SWISSPROT Homolog: EC 1.1.1.2 Alcohol dehydrogenase (NADP(+))
MTNITPEQSSIPLGSVILITGANGIIASWVVDKFLAAGYRVRGTVRSASKNVWLNSFFTERYGIDKFELLEIADFSAPGVWTSAVKGVAGIAAIAGKVGVDVKNLGESLNEELPWVYGLLSAAKEEASVRSFVYTGSAWAAWTPEANKKVTLGEWSYNEDAIRIMQSGGPRNGNPFVGYMAFKAVLEQRIWDWVRQEKPTYAFNTILPEAVMGKVLSPENQGIPSSCVFPKWVWENENIEFLNSFPPQWFIDTQDVGSLYLAIMTSPDVNGERLFGFGNKFSMFKIREILQKLEPQRNLQVLQDNGWDETEVPNKRSEDLVRRVSGRGWNSLENSIVQLLGDIKIVEQLPSAPRSMLDR

SEQ ID NO: 4737 - DNA, 678 bp, Muscodor strobelii
  misc_feature: SGI cDNA ID NO. 561280
  misc_feature: Encodes the peptide sequence at SEQ ID NO 4738
atgcgttctgcactttgccttttaggcgctgccgctcttgttgcggcagctcccgccatggtgcagccacgagtgacttgtgttgatggattatacatcatcgtcgctcgtggttcaacagaggatcctggcgagggaacactaatggttgtcgctgacgcggtcgaggctcaagttcccggttctttaagcgtcgccgttgactatcccgcgacgatttttgggtcaggaacatatgtcaactccgtcatccagggtataaataatgccaagagtttgatcacggcatacgtcgacacgtgcgggtccgcgagcaagatcgcgcttttggggtatagccagggtggcaatgtcttgacggatgtattggctgccggcgttgcgaagcccgccccattgggtaccgagtatacacaatatatcaaaggggtcgctgtctttggtgatcctaccttcactgtcgggcagagcttcgacgtaggaaatgctacaaagagcggaattttctcccgtggtggagatagtcttgctatgctgaacacatatgcggatattcttcagagctattgcatggtccacgatcctgtctgtgcgtttggtgatgatctagatgtccactacgccgaagtgtcaacgtttgctgacgctgcggtcacgtttcttgcgagcaaggcatag

SEQ ID NO: 4738 - protein, 225 aa, Muscodor strobelii
  misc_feature: SGI Peptide ID NO. 561280
  misc_feature (26)..(225): Pfam Id: PF01083 Pfam Desc: Cutinase
  misc_feature (1)..(223): NCBI GI: 212525994 Blast Desc: acetylxylan esterase 2 precursor, [Penicillium marneffei ATCC 18224] gi|210072552|gb|EEA26639.1| acetylxylan esterase 2 precursor, [Penicillium marneffei ATCC 18224]
  misc_feature (25)..(221): NCBI GI: 225561142 Blast Desc: conserved [Ajellomyces capsulatus G186AR]
  misc_feature (4)..(221): NCBI GI: 154277416 Blast Desc: [Ajellomyces capsulatus NAm1] gi|150413134|gb|EDN08517.1| [Ajellomyces capsulatus NAm1]
  misc_feature (8)..(224): NCBI GI: 256723195 Blast Desc: NECHADRAFT_122630 [Nectria haematococca mpVI 77-13-4]
  misc_feature (25)..(222): NCBI GI: 240280301 Blast Desc: conserved [Ajellomyces capsulatus H143]
  misc_feature (7)..(224): NCBI GI: 46116470 Blast Desc: FG04077.1 [Gibberella zeae PH-1]
  misc_feature (4)..(224): NCBI GI: 238846094 Blast Desc: acetylxylan esterase [Microsporum canis CBS 113480]
  misc_feature (30)..(224): NCBI GI: 31747152 Blast Desc: Axe2 [Hypocrea jecorina]
  misc_feature (13)..(221): NCBI GI: 225683754 Blast Desc: [Paracoccidioides brasiliensis Pb03]
  misc_feature (27)..(224): NCBI GI: 85091084 Blast Desc: NCU09663 [Neurospora crassa OR74A] gi|28920111|gb|EAA29493.1| [Neurospora crassa OR74A]
  misc_feature (31)..(224): SWISSPROT Homolog: EC 3.1.1.72 Acetylxylan esterase
MRSALCLLGAAALVAAAPAMVQPRVTCVDGLYIIVARGSTEDPGEGTLMVVADAVEAQVPGSLSVAVDYPATIFGSGTYVNSVIQGINNAKSLITAYVDTCGSASKIALLGYSQGGNVLTDVLAAGVAKPAPLGTEYTQYIKGVAVFGDPTFTVGQSFDVGNATKSGIFSRGGDSLAMLNTYADILQSYCMVHDPVCAFGDDLDVHYAEVSTFADAAVTFLASKA

SEQ ID NO: 4739 - DNA, 1243 bp, Muscodor strobelii
  misc_feature: SGI EST ID NO. CUFF.12072.0
  misc_feature: Variant of the nucleotide sequence at SEQ ID NO 4737
ccctatcgacctgaaacgcgcacataacctgtaaatcctcgccttacaggtagacacagaatggtatagtcttgagtatgggtttaagctaactgatatcggaaggtgtgttgtcaccctaaaataatgatcctagcgaactcaccataacacatcacaaaatgaggctacgatgatatacctctaagttccatatataaaagggcagcgttcccaggcagagttggaatggagatgtagagcaagctttgcacatcccttgctcctcccttggtctataccaagcagctcgtcgaaaaagccctgcctggatccgagtgaaactctttcagtgacagatttgcccggcgtcgtgtttgataacaacgtcatgcgttctgcactttgccttttaggcgctgccgctcttgttgcggcagctcccgccatggtgcagccacgagtgacttgtgttgatggattatacatcatcgtcgctcgtggttcaacagaggatcctggcgagggaacactaatggttgtcgctgacgcggtcgaggctcaagttcccggttctttaagcgtcgccgttgactatcccgcgacgatttttgggtcaggaacatatgtcaactccgtcatccagggtataaataatgccaagagtttgatcacggcatacgtcgacacgtgcgggtccgcgagcaagatcgcgcttttggggtatagccagggtggcaatgtcttgacggatgtattggctgccggcgttgcgaagcccgccccattgggtaccgagtatacacaatatagggtcgctgtctttggtgatcctaccttcactgtcgggcagagcttcgacgtaggaaatgctacaaagagcggaattttctcccgtggtggagatagtcttgctatgctgaacacatatgcggatattcttcagagctattgcatggtccacgatcctgtctgtgcgtttggtgatgatctagatgtccactacgccgaagtgtcaacgtttgctgacgctgcggtcacgtttcttgcgagcaaggcatagacccaagattacttgatataatgataaaactgtcgctattacatgttcaaattcctctacaaaccaacattttgatatgttagagagatcgtgaaaagcgtatatttccatgggagtggacaagtgataataattgcctgtcttagtgcgtgtgtagtttttacccctttattctcttagtcaatgcttaaggagtcatgc

SEQ ID NO: 4740 - DNA, 1539 bp, Muscodor strobelii
  misc_feature: SGI cDNA ID NO. 561281
  misc_feature: Encodes the peptide sequence at SEQ ID NO 4741
atgtccgtcggtcctctagaacttataggtcttatttctggtgtaatcggaatcggccgtttcttgctcgacatcgtctcctcaccctcacaggcaccggtagtatcaatggtccgagtcagggtcgcgcttttccactccgcctgtcgagaagatgctggcgggagtccgcctaaagtacgactcttcgatgaactagggcagttcattgctgagacaagcggcccagataatggcggtcgcatttcagaaggccacttcatggatttagaggcagaacaccgcaatcgcaacaatgtgcagccctcgtacggcctagttgaggcaggcgacaacagtatctgcattgccactcttggtgtcactgatcccagtggagatagatggggctgggtcggcgattggggcagggcctgtggtggatcatggtatttttcgaatatcgccgccgctgacaacggccataaacctgactgcctatggatcgatcgtgatggaaacgagaaagcaatacctgagactgggtttcaaatacatttccaagaatatcttggatcggatcataataacagcatacccacggataacgagtttcagactcagctgaggaattatatgtgccacagcggcaagcccttcaaaccacggacagatcgcgatttcggactttatgtcgacgtttgggatcctccgctgacccagaatgatccgcgcaagtacgagaagtactatcctcctccaaagatcgaacccccccaacaggctttgggcgctcctgatttagtacggaatggcaaacgaagctttgatgttcttgtaacggaacatcacgaagcgagcgatgcacagaaactctgcaacgacaagagatcctatgggcccgacttcaaagatacatttcacaagctcttctgtcggatgggtgataagaagttgttcccattctgtgatggtaccaatgataagagctgttttgacactcgtttgaatctaactagaagcagcggcattgtggcacaagctagaggccgcgcgccctactccagatttgtgaactggggaggtgaagcctcgataattgcaaatgaggctgctacgcagctcgccagcgcaaatggagtcggtgtaaacgaggctaacaaacctgtcgacaatgcgataagcgacgaggacctgttttctacgcaccatgattgtacaataggccattgggcgagctttcgggacgatgacgagtgctcagagaaggggaaaggtatcgacgtgaatctagctaaccagggttgcttggatcagacaaaccgtggtcggaaatctatcctcttccacaccgattccctttggaattggaagcactgcttcgggcgcattcgacttctcgctacagcggatagtaaatgtaattgcacaactggttctttacgcttgccggccctgccagggtgttggaatatcaccgactttccggcgaatagttataagttcgactgggtaaaggatcctctggatgaaatataccctaattgttgccttccgtga

SEQ ID NO: 4741 - protein, 512 aa, Muscodor strobelii
  misc_feature: SGI Peptide ID NO. 561281
  misc_feature (6)..(366): NCBI GI: 39942458 Blast Desc: MGG_03309 [Magnaporthe grisea 70-15] gi|145015685|gb|EDK00175.1| MGG_03309 [Magnaporthe grisea 70-15]
  misc_feature (2)..(353): NCBI GI: 171682656 Blast Desc: protein product [Podospora anserina] gi|170941287|emb|CAP66937.1| protein product [Podospora anserina]
  misc_feature (6)..(353): NCBI GI: 238838945 Blast Desc: conserved [Microsporum canis CBS 113480]
  misc_feature (3)..(353): NCBI GI: 67540572 Blast Desc: AN6456.2 [Aspergillus nidulans FGSC A4] gi|40739288|gb|EAA58478.1| AN6456.2 [Aspergillus nidulans FGSC A4] gi|259479315|tpe|CBF69436.1| TPA: conserved [Aspergillus FGSC
  misc_feature (10)..(343): NCBI GI: 238842244 Blast Desc: conserved [Microsporum canis CBS 113480]
  misc_feature (2)..(337): NCBI GI: 149209779 Blast Desc: MGCH7_ch7g372 [Magnaporthe grisea 70-15] gi|86196327|gb|EAQ70965.1| MGCH7_ch7g372 [Magnaporthe grisea 70-15]
  misc_feature (36)..(335): NCBI GI: 146324267 Blast Desc: conserved [Aspergillus fumigatus Af293] gi|129553759|gb|EAL84208.2| conserved [Aspergillus fumigatus Af293]
  misc_feature (53)..(345): NCBI GI: 258570055 Blast Desc: [Uncinocarpus reesii 1704] gi|237904101|gb|EEP78502.1| [Uncinocarpus reesii 1704]
  misc_feature (36)..(335): NCBI GI: 159122718 Blast Desc: conserved [Aspergillus fumigatus A1163]
  misc_feature (3)..(343): NCBI GI: 121719470 Blast Desc: conserved [Aspergillus clavatus NRRL 1] gi|119404632|gb|EAW15008.1| conserved [Aspergillus clavatus NRRL 1]
MSVGPLELIGLISGVIGIGRFLLDIVSSPSQAPVVSMVRVRVALFHSACREDAGGSPPKVRLFDELGQFIAETSGPDNGGRISEGHFMDLEAEHRNRNNVQPSYGLVEAGDNSICIATLGVTDPSGDRWGWVGDWGRACGGSWYFSNIAAADNGHKPDCLWIDRDGNEKAIPETGFQIHFQEYLGSDHNNSIPTDNEFQTQLRNYMCHSGKPFKPRTDRDFGLYVDVWDPPLTQNDPRKYEKYYPPPKIEPPQQALGAPDLVRNGKRSFDVLVTEHHEASDAQKLCNDKRSYGPDFKDTFHKLFCRMGDKKLFPFCDGTNDKSCFDTRLNLTRSSGIVAQARGRAPYSRFVNWGGEASIIANEAATQLASANGVGVNEANKPVDNAISDEDLFSTHHDCTIGHWASFRDDDECSEKGKGIDVNLANQGCLDQTNRGRKSILFHTDSLWNWKHCFGRIRLLATADSKCNCTTGSLRLPALPGCWNITDFPANSYKFDWVKDPLDEIYPNCCLP

SEQ ID NO: 4742 - DNA, 380 bp, Muscodor strobelii
  misc_feature: SGI EST ID NO. CUFF.12022.0
  misc_feature: Variant of the nucleotide sequence at SEQ ID NO 4740
attggggcagggcctgtggtggatcatggtatttttcgaatatcgccgccgctgacaacggccataaacctgactgcctatggatcgatcgtgatggaaacgagaaagcaatacctgagactgggtttcaaatacatttccaagaatatcttggatcggatcataataacagcatacccacggataacgagtttcagactcagctgaggaattatatgtgccacagcggcaagcccttcaaaccacggacagatcgcgatttcggactttatgtcgacgtttgggatcctccgctgacccagaatgatccgcgcaagtacgagaagtactatcctcctccaaagatcgaacccccccaacaggctttgggcgctcctgat

SEQ ID NO: 4743 - DNA, 1293 bp, Muscodor strobelii
  misc_feature: SGI cDNA ID NO. 561282
  misc_feature: Reduced expression when VOC is produced
  misc_feature: Encodes the peptide sequence at SEQ ID NO 4744
atgagcagctcaccttcgacgatccgaatagcgattctcggcggggggatatctgcagcagcgctccttcgcgggcttttacgtcactctcacatcgctgtggacatctacaatccgcaaccgcagttcaaagaagaaggtcaaggagtcgcggtgacaccagtcggggaagaaattctcaacaagctagatccctccttggatgctgttctggaccgaataggagcatttcagagctataccgagctgagagtcgcatccggcccatatgcaggcgaaagcgtcagttttccggctcgtcgcggtaacgaaaccaaaaccatcgaacgacagtcatttctcgatgagttgatgaagggcactccgccgcgctcgattcatcgcaacgcgcgaatatcgtctgtcaccgaagcactgaacggtgctggcctagtaatcgccttcgcagacggcacagagaagaagtatgatgtagtcattggtgctgatggcgtacacggtatcactcggaagttcgttctcggtgtcaacgaatcatccttacagcctcggcataccggcatctggggattgacgctccaagtaccttacgacaaggcacgagaggcaatgggcgacgaatttcttgacattaaccaaccgcttcagatgtcgtggattggcaatggtacaattatgcagcatcatctgacaagtgagggtcaagaagtttatctcgccgcttatgcacgccatagtgattgtgcacccaacgatccctgggccaaagtcctgacgccggaagagttcggagccgtgttctctcagagcgaggttccagcatgtcagggcatggtgaaactgatacagaatgtgtacactgttcaagtagcggcgatttgccagatgcggcatattcccgccaaaacgtatgtcaggaaaaatgtggctttgataggtgatgcagcgcattccactatcaaaatgcaagggacaagcataaccaccgctttggaagaggcctacatcctcagcacactcctgggtcaggcatcgtcaaaagatgcaattccagcagctttgcaagcatttgatgaggtttgtcggcccagggctgaagatctagctcgtcacgtcgccgactgcggtatagtcatgacaggcgcacacccagacattgggttggatccctatctaatggggcagcaactccaacatcattgggaggtgatccgcgattccaacatacaagctcaacacaaggctgcgatcaacaaaatgaatcagctgctaatgatacaatcaccaccttga

SEQ ID NO: 4744 - protein, 430 aa, Muscodor strobelii
  misc_feature: SGI Peptide ID NO. 561282
  misc_feature (7)..(372): Pfam Id: PF01494 Pfam Desc: FAD binding domain
  misc_feature (1)..(424): NCBI GI: 171682930 Blast Desc: protein product [Podospora anserina] gi|170941424|emb|CAP67075.1| protein product [Podospora anserina]
  misc_feature (7)..(420): NCBI GI: 225557710 Blast Desc: salicylate hydroxylase [Ajellomyces capsulatus G186AR]
  misc_feature (8)..(420): NCBI GI: 240274173 Blast Desc: salicylate hydroxylase [Ajellomyces capsulatus H143]
  misc_feature (17)..(420): NCBI GI: 154288340 Blast Desc: [Ajellomyces capsulatus NAm1] gi|150408606|gb|EDN04147.1| [Ajellomyces capsulatus NAm1]
  misc_feature (26)..(423): NCBI GI: 169610297 Blast Desc: SNOG_08247 [Phaeosphaeria nodorum SN15] gi|160702028|gb|EAT84523.2| SNOG_08247 [Phaeosphaeria nodorum SN15]
  misc_feature (1)..(368): NCBI GI: 239609275 Blast Desc: FAD binding domain-containing protein [Ajellomyces dermatitidis ER-3]
  misc_feature (1)..(421): NCBI GI: 256681298 Blast Desc: salicylate hydroxylase [Pseudomonas aeruginosa]
  misc_feature (1)..(421): NCBI GI: 4104764 Blast Desc: salicylate hydroxylase [Pseudomonas stutzeri]
  misc_feature (1)..(421): NCBI GI: 37220703 Blast Desc: salicylate hydroxylase [Pseudomonas putida]
  misc_feature (1)..(421): NCBI GI: 70779190 Blast Desc: SalA [Pseudomonas pseudoalcaligenes]
  misc_feature (29)..(421): SWISSPROT Homolog: EC 1.14.13.1 Salicylate 1-monooxygenase
  misc_feature: Useful for introducing or modulating the production of volatile compounds
MSSSPSTIRIAILGGGISAAALLRGLLRHSHIAVDIYNPQPQFKEEGQGVAVTPVGEEILNKLDPSLDAVLDRIGAFQSYTELRVASGPYAGESVSFPARRGNETKTIERQSFLDELMKGTPPRSIHRNARISSVTEALNGAGLVIAFADGTEKKYDVVIGADGVHGITRKFVLGVNESSLQPRHTGIWGLTLQVPYDKAREAMGDEFLDINQPLQMSWIGNGTIMQHHLTSEGQEVYLAAYARHSDCAPNDPWAKVLTPEEFGAVFSQSEVPACQGMVKLIQNVYTVQVAAICQMRHIPAKTYVRKNVALIGDAAHSTIKMQGTSITTALEEAYILSTLLGQASSKDAIPAALQAFDEVCRPRAEDLARHVADCGIVMTGAHPDIGLDPYLMGQQLQHHWEVIRDSNIQAQHKAAINKMNQLLMIQSPP

SEQ ID NO: 4745 - DNA, 2762 bp, Muscodor strobelii
  misc_feature: SGI EST ID NO. CUFF.12031.0
  misc_feature: Variant of the nucleotide sequence at SEQ ID NO 4743
cagaaactgccttgctaattctgatcctggcgagtgtcatccttgtcagtctgcttttggtcgaacttctcttgcttggctccacctgcagagaccttttctggttgcctggtgctgaccctgctagggttcgcacaatgcgaagctgcagcatgtgaagtccgatcccagacctgcatagcaagtaagcggagacacctctattcattaggtcagcactttggacgtctttcggagcgcttcggtcaagatggggaagatgactgcgcacaatatcctgtgatgtaatgcatttcatcttgaccttcgggaccatgtctcgcgatccagactttcttgacacggcatcccaaatacttgacggaccgatttataatctccacccctgcacgggccgccattgcgcagtcgcgagtgatgttgtcaggaaagatccgagctgcttgtggctttctcggtggcagttccaatttacttcttttttagaaaaaatcaaacggccaagctcaagtttcgccgtcagacagtcttctgctaagcttcattgaggctgtctacgggtcccaatgagtgcaggggtgggaagtgagcacaggtgctagattacagctcggcatcgatcgagatggaaagaaactacttaaagagcacgaacaaagccgattgttgaaacgaaaagatcaagtttactacaagaagtttcatatatcagatacaaccattcgtatctcccatcaagcacaagtcattgctcacatatcaccaacccatccctcactcaccatcaacatgagcagctcaccttcgacgatccgaatagcgattctcggcggggggatatctgcagcagcgctccttcgcgggcttttacgtcactctcacatcgctgtggacatctacaatccgcaaccgcagttcaaagaagaaggtcaaggagtcgcggtgacaccagtcggggaagaaattctcaacaagctagatccctccttggatgctgttctggaccgaataggagcatttcagagctataccgagctgagagtcgcatccggcccatatgcaggcgaaagcgtcagttttccggctcgtcgcggtaacgaaaccaaaaccatcgaacgacagtcatttctcgatgagttgatgaagggcactccgccgcgctcgattcatcgcaacgcgcgaatatcgtctgtcaccgaagcactgaacggtgctggcctagtaatcgccttcgcagacggcacagagaagaagtatgatgtagtcattggtgctgatggcgtacacggtatcactcggaagttcgttctcggtgtcaacgaatcatccttacagcctcggcataccggcatctggggattgacgctccaagtaccttacgacaaggcacgagaggcaatgggcgacgaatttcttgacattaaccaaccgcttcagatgtcgtggattggcaatggtacaattatgcagcatcatctgacaagtgagggtcaagaagtttatctcgccgcttatgcacgccatagtgattgtgcacccaacgatccctgggccaaagtcctgacgccggaagagttcggagccgtgttctctcagagcgaggttccagcatgtcagggcatggtgaaactgatacagaatgtgtacactgttcaagtagcggcgatttgccagatgcggcatattcccgccaaaacgtatgtcaggaaaaatgtggctttgataggtgatgcagcgcattccactatcaaaatgcaagggacaagcataaccaccgctttggaagaggcctacatcctcagcacactcctgggtcaggcatcgtcaaaagatgcaattccagcagctttgcaagcatttgatgaggtttgtcggcccagggctgaagatctagctcgtcacgtcgccgactgcggtatagtcatgacaggcgcacacccagacattgggttggatccctatctaatggggcagcaactccaacatcattgggaggtgatccgcgattccaacatacaagctcaacacaaggctgcgatcaacaaaatgaatcagctgctaatgatacaatcaccaccttgatcattcgttagtggatggcatgatatacggatgtgctttctctaggcaactacctagtgacctgtctcgagagactgcccaaggcgacaaacggacgacgagctatggtggagccaaagctggtcgcgctaattgaaagatattcgtggtcatttagcgttcgaccttgttttaagagattagcgcagtgatttaaacatgagaaagaggatagcacaatagggatttgcatggattacgatcgcaagaatggcaacatggatatgactatcgttgtcgaatcacgatttatctcaatggtgatgcatgatcattcgtcgtaccatatgatgcactaatagcaatagcaaggcgagcatttgatcaagatggatgcggagttttgatactcaatcacaagaagaaagtccccgattttctgtatccaaaatggttttgcttctgatagcacccaagcattgaacagctgatctagggtgtggcattcttaggaatttatggtccgatgctgtcaacttctcagcgtatggtcaacttcatgggagcgccttagcgcaaccacggtcgaatagtgattctctgggcttgtgttggttccaaaagagattgagtcaccgatatttggtagctagagcataatatgcattcttgttggtcactgtagctccttcacttttgtg

SEQ ID NO: 4746 - DNA, 1326 bp, Muscodor strobelii
  misc_feature: SGI cDNA ID NO. 561283
  misc_feature: Encodes the peptide sequence at SEQ ID NO 4747
atggaccgcgaatcccatcttctcactcagttcccaatcgagttgtcacatgccgtcagccgcgacgtgggggaccaggcaagacccgataccccatttgaagatatttcaacagctgtgaactctcgtcgtcccagtgtggtcattcatgattctacaagaggaaaggaacatgcaatcaacatctacgatctgactcgaccaaagttagccttgaaacagcgcttacgccatttcacctgggcgtggtttacttggccgatgagtacaggtggactttctctgttaatctacgcacagccctatcagtttcctggtctttggcagatcggtttcaccgtttacctcgcgaacctggccttattcacaattcttctagttgccatgatcacgcggttctccttgcaccgtagcgcccttcgcgattcgttgacacatccccgggaaggacttttcttccccaccttcttcttagccatcgcgacaattattacaagtacagagcgctacatcgtcccacaaaatgacggtgctcttcgcatcgcgatcctgtctgcattttggagttacttgatcataacactgattttggctgtcgggcaatacagcttcgtattcgcggcgcaccgattcggactgcaaactatgatgccaacctggattctgccaatattccctattatgtcagtcagattttgtctcaagcggctctctgggactattgcctccgtcattgccgagtcgcaaccagaaattgctgccatcccggtcatcgtaggaggactcactttccaggggttgggaatatccgtttcacttatgatgtatgcccacatgataggaagattgatgcaagacctaccaaacagagaacaccgtcctggactctttatgaacgttggccctccagcatttacggctcttgcgttcattggaatggcgaatggtcttcctgattcatttgaccgggaaaatgacggcttcctcgatgccaacgttatccgtacgttcgcgttgatatgcgcaatcttcctctgggcgctgtcgctctggtggttttcaatcgctgctgttgctgtactcagctcaagaccaaagtacttccatctaggatggtgggccatggtattcccaaacacaggcttcatccttgcaaccatatcaattgggaaggagtttcggaatgaacatgttttgagatttacgtccgcgctttcgatcctacttacactcatatatctttttgtattgtcgtctcagatacgggcagtcttcaagcaggacatcatgtaccctggacgtgatgaggatgtcaacgaccactaa

SEQ ID NO: 4747 - protein, 441 aa, Muscodor strobelii
  misc_feature: SGI Peptide ID NO. 561283
  misc_feature (81)..(385): Pfam Id: PF03595 Pfam Desc: C4-dicarboxylate transporter/malic acid transport protein
  misc_feature (1)..(441): NCBI GI: 46115602 Blast Desc: FG03643.1 [Gibberella zeae PH-1]
  misc_feature (18)..(441): NCBI GI: 261357176 Blast Desc: malic acid transport protein [Verticillium albo-atrum VaMs.102]
  misc_feature (64)..(441): NCBI GI: 116208756 Blast Desc: CHGG_03671 [Chaetomium globosum CBS 148.51] gi|88184268|gb|EAQ91736.1| CHGG_03671 [Chaetomium globosum CBS 148.51]
  misc_feature (57)..(441): NCBI GI: 164423915 Blast Desc: NCU07517 [Neurospora crassa OR74A] gi|157070285|gb|EAA29129.2| NCU07517 [Neurospora crassa OR74A]
  misc_feature (67)..(441): NCBI GI: 145609015 Blast Desc: MGG_09085 [Magnaporthe grisea 70-15] gi|145016476|gb|EDK00906.1| MGG_09085 [Magnaporthe grisea 70-15]
  misc_feature (67)..(441): NCBI GI: 171685252 Blast Desc: protein product [Podospora anserina] gi|170942587|emb|CAP68239.1| protein product [Podospora anserina]
  misc_feature (70)..(441): NCBI GI: 46110799 Blast Desc: FG02281.1 [Gibberella zeae PH-1]
  misc_feature (56)..(441): NCBI GI: 46114364 Blast Desc: FG03024.1 [Gibberella zeae PH-1]
  misc_feature (68)..(440): NCBI GI: 119484216 Blast Desc: C4-dicarboxylate transporter/malic acid transport protein, [Neosartorya fischeri NRRL 181] gi|119410167|gb|EAW20114.1| C4-dicarboxylate transporter/malic
  misc_feature (68)..(440): NCBI GI: 70983484 Blast Desc: C4-dicarboxylate transporter/malic acid transport protein, [Aspergillus fumigatus Af293] gi|66844895|gb|EAL85231.1| C4-dicarboxylate transporter/malic acid transport protein, Af293]
MDRESHLLTQFPIELSHAVSRDVGDQARPDTPFEDISTAVNSRRPSVVIHDSTRGKEHAINIYDLTRPKLALKQRLRHFTWAWFTWPMSTGGLSLLIYAQPYQFPGLWQIGFTVYLANLALFTILLVAMITRFSLHRSALRDSLTHPREGLFFPTFFLAIATIITSTERYIVPQNDGALRIAILSAFWSYLIITLILAVGQYSFVFAAHRFGLQTMMPTWILPIFPIMSVRFCLKRLSGTIASVIAESQPEIAAIPVIVGGLTFQGLGISVSLMMYAHMIGRLMQDLPNREHRPGLFMNVGPPAFTALAFIGMANGLPDSFDRENDGFLDANVIRTFALICAIFLWALSLWWFSIAAVAVLSSRPKYFHLGWWAMVFPNTGFILATISIGKEFRNEHVLRFTSALSILLTLIYLFVLSSQIRAVFKQDIMYPGRDEDVNDH

SEQ ID NO: 4748 - DNA, 1617 bp, Muscodor strobelii
  misc_feature: SGI EST ID NO. CUFF.12046.0
  misc_feature: Variant of the nucleotide sequence at SEQ ID NO 4746
accgaaagttttagaatgaattgatctcattaacagactgacattgtcttatatataaatcaggctctctgggactattgcctccgtcattgccgagtcgcaaccagaaattgctgccatcccggtcatcgtaggaggactcactttccaggggttgggaatatccgtttcacttatgatgtatgcccacatgataggaagattgatgcaagacctaccaaacagagaacaccgtcctggactctttatgaacgttggccctccagcatttacggctcttgcgttcattggaatggcgaatggtcttcctgattcatttgaccgggaaaatgacggcttcctcgatgccaacgttatccgtacgttcgcgttgatatgcgcaatcttcctctgggcgctgtcgctctggtggttttcaatcgctgctgttgctgtactcagctcaagaccaaagtacttccatctaggatggtgggccatggtattcccaaacacaggcttcatccttgcaaccatatcaattgggaaggagtttcggaatgaacatgttttgagatttacgtccgcgctttcgatcctacttacactcatatatctttttgtattgtcgtctcagatacgggcagtcttcaagcaggacatcatgtaccctggacgtgatgaggatgtcaacgaccactaaaacagtctctcacacttttgcttaatcaaaatccttcatcccccccccccaattagcagtacacagcttcaccattcatccttcccactatagccagcttgacatatctctcgcgtcttagtaagagcgcgcacttgtgctgtgtacgactgattgaacagactcgatgcccttaacacttcaatataagtttgcacagaaccaaatgagttcccaaattataacaagttccagtctactgcgctgtcgtttgtttggtgtgggcgagaatatggacaacatcggacactggcagaaccctctcagtatggtctcgttgcgtcactacaatgattgttttagtttatattcattgatacaaataattgtatcttaggtgtgaattccgctcatgctgctgtcgattagggatgtctggtccttctaatgaatgctacggcgctccagaaggatcgtgaaggattcgagctattacactgcaatgatgtgacataatgcctgaattccaaattttgccgcggcatgaatatgtaacgatccatagacaacactataatctgcattctttagtgcaccatgacgtcctgtcagagagttcaagttacccagaacaaaacagagcaagaattgagccgcacggttacttccgaaagaccgagcggtgggcccattttcggcgcgaagatcaggattgatgacaatcgaggattgacggatgttgtaaactcaatcatcattctctataaacgagtctagcaagttcgtagatccctacttccagaccgatctcgggactgaaattgaagccgtggggtgcaatcaatttctgagcttggccgcctagctcaattaaagtgagaacgcgccccacggcacgttggtaatatttcatatggatagttttccttaaaagacgtaccgtagaaaatatgcac

SEQ ID NO: 4749 - DNA, 507 bp, Muscodor strobelii
  misc_feature: SGI cDNA ID NO. 561284
  misc_feature: Encodes the peptide sequence at SEQ ID NO 4750
atgccggtacagcctgagacggtagctgcaatcacatcaaagaaggcaaaatacgctcgctacgccgacttgaagcaatgggataagttcgaagccgaggtcgcgctgccagactgcaagatgtcgtatcttacaattgacggagcgccattgcacatgagctcaacgcgcttggtcttcaatacggcatcagcaatgacgacgttcttcaataagttattcgcacctatgcagacgctccataatatcggcatcggagatttcgaagaaacgggtcgacccgatgaagtgcgcgccatctttggcttcgaggatcagcttttattgcccccatttgggtcctggatggagatccgtggaggcgggtactacaccgagacatggaaagagattgaaggtgaatggtttttgaaggacttgataatgcgtcggacatatcaaaagcagacctttttggtatcggtggcgttattcatacagaggatcactggcttttcccctgtgtag

SEQ ID NO: 4750 - protein, 168 aa, Muscodor strobelii
  misc_feature: SGI Peptide ID NO. 561284
  misc_feature (3)..(159): NCBI GI: 256724359 Blast Desc: NECHADRAFT_102143 [Nectria haematococca mpVI 77-13-4]
  misc_feature (3)..(148): NCBI GI: 145608232 Blast Desc: MGG_03272 [Magnaporthe grisea 70-15] gi|145015727|gb|EDK00217.1| MGG_03272 [Magnaporthe grisea 70-15]
  misc_feature (1)..(148): NCBI GI: 46118186 Blast Desc: FG04691.1 [Gibberella zeae PH-1]
  misc_feature (1)..(100): NCBI GI: 115384444 Blast Desc: [Aspergillus terreus NIH2624] gi|114196461|gb|EAU38161.1| [Aspergillus terreus NIH2624]
  misc_feature (69)..(148): NCBI GI: 46102636 Blast Desc: FG00022.1 [Gibberella zeae PH-1]
  misc_feature (11)..(150): NCBI GI: 85102739 Blast Desc: NCU01292 [Neurospora crassa OR74A] gi|28922923|gb|EAA32142.1| [Neurospora crassa OR74A] gi|28950094|emb|CAD70857.1| [Neurospora crassa]
  misc_feature (8)..(164): NCBI GI: 120403178 Blast Desc: Mvan_2186 [Mycobacterium vanbaalenii PYR-1] gi|119955996|gb|ABM13001.1| conserved [Mycobacterium vanbaalenii PYR-1]
  misc_feature (8)..(160): NCBI GI: 145224756 Blast Desc: Mflv_4177 [Mycobacterium gilvum PYR-GCK] gi|145217242|gb|ABP46646.1| conserved [Mycobacterium gilvum PYR-GCK]
  misc_feature (11)..(155): NCBI GI: 269126969 Blast Desc: Tcur_2755 [Thermomonospora curvata DSM 43183] gi|268311927|gb|ACY98301.1| conserved [Thermomonospora curvata DSM 43183]
  misc_feature (15)..(158): NCBI GI: 54024439 Blast Desc: nfa24700 [Nocardia farcinica IFM 10152] gi|54015947|dbj|BAD57317.1| [Nocardia farcinica IFM 10152]
MPVQPETVAAITSKKAKYARYADLKQWDKFEAEVALPDCKMSYLTIDGAPLHMSSTRLVFNTASAMTTFFNKLFAPMQTLHNIGIGDFEETGRPDEVRAIFGFEDQLLLPPFGSWMEIRGGGYYTETWKEIEGEWFLKDLIMRRTYQKQTFLVSVALFIQRITGFSPV

SEQ ID NO: 4751 - DNA, 767 bp, Muscodor strobelii
  misc_feature: SGI EST ID NO. CUFF.12054.0
  misc_feature: Variant of the nucleotide sequence at SEQ ID NO 4749
gtaaggttctgcgcacgcagttgcgcgtactaccattcttcgtgaagcaagaaaatgccggtacagcctgagacggtagctgcaatcacatcaaagaaggcaaaatacgctcgctacgccgacttgaagcaatgggataagttcgaagccgaggtcgcgctgccagactgcaagatgtcgtatcttacaattgacggagcgccattgcacatgagctcaacgcgcttggtcttcaatacggcatcagcaatgacgacgttcttcaataagttattcgcacctatgcagacgctccataatatcggcatcggagatttcgaagaaacgggtcgacccgatgaagtgcgcgccatctttggcttcgaggatcagcttttattgcccccatttgggtcctggatggagatccgtggaggcgggtactacaccgagacatggaaagagattgaaggtgaatggtttttgaaggacttgataatgcgtcggacatatcaaaagcagacctttttggtatcggtggcgttattcatacagaggatcactggcttttcccctgtgtagcttcggcccatgggccgcgaacagcgcgacagtcgagacgtgaaagcccgatttaacaagcaagctgacagctcggtatctgatggactgaccacttggattttaacgagtataattttggttgaaatactctgcaataaaggcgatagcagctgctccctagatatcaatcgcttgaacatgtccgtctcaccggcgacgacgag

SEQ ID NO: 4752 - DNA, 2718 bp, Muscodor strobelii
  misc_feature: SGI cDNA ID NO. 561285
  misc_feature: Encodes the peptide sequence at SEQ ID NO 4753
atggagcatcaaagcaagacagacgagtcttatttagtctccgagatgcctggaccaggcgggccttatttttcaaaccaacaacaccaggatcttaatcaacagtactcaggccatcaatgggtcgcatataacccataccaacaagtcatgtcccagcagcatgcgcaaaaccatccccaatccaatatgatgtatacacaagatcaaacatacgtctcatatcctctagagactctgcagccagctcatcaacaatgggcttacagcgaggctccaaataatcctcgtattaacgcacatgatcataaaccactaccgcagcccgacgttaccgctaatgatgtgcgtttccacgacttatcaagcgagcatcagcttcaatcacagcatgaaactcaggagacgtcttggtggccttgggcaaaatcggccgagcagaaggcacatgagaacttcgcaaagcagttcagtggtggccggagtttcaacggtcatttctttcgaaaacccacccgcgatgccacggtcgaagaaggccatgtgaatgcgaaaagacccgaagactacggtggggccgtcgatcagcacccaaagacaggcaaattcatttacagaaaccaattcggccaactggagcacaaatacagcgatgtcgccgtttacctgtcgccgacgacatatagaccgaagagactgatagtccaatgtagcgatcatgttcgtaagaatgcccatagggcgggcggcgattggagacggagaaagatgaacggcgacataccgaaagttctcactatatccgagtgggcactgaggccattcgaaagacggactgcctggggcaagatcgtgggaactattcgattgttatgggtcgcggtccccctgcaactcctcctcgcttggccgggaacgacaacttgggatgacggtgatatgtcagaattcgtataccgattttcctggatatcactggcactgggcaaaacgctagctgagaaggttatgtctagtcgcaaaagagaagtacgacctcgaaaattgtacatctaccaaccagatggacagtggaaagtagtcgacaatccgccgagaaacaagaaatacatcttcattagctatgcggctgagtcattcaaagtcaaaggtgtgctcgatactgagcgcatacggcagatggctcaggctgctacgcttgacgctgaccttgatgcatgttggatggacactgactgtatagagaccgttaatggtatacggaaggatgtcgatatctacaccatgtgtgatgtcattcgggccgcgagtcgcgttgtggtaatactagccgacgacaaagctgagacagcgcaggactggggtagtcgcttatggacattacccgaggccctacttgcccaccaacacgaaatagactttttcgtcgacgtccggggtagatatgagaagacaacaaaatctcttgtggagataacgggtgacatctgggacgaccgcgacgaccacgaagaagcagctggctcaacacgtctcctcgctgaacacttctcaggtctgctcactctcagccgactggagctcttcgcagcagctatcgacgcatttcgcagcaagagatatcgggcttggactgccagcgatgttactctcgccgtcatgtccttgatgcactaccgcattgacaagaacgaagatgacagcgcctttcagtctctcgcacaactatccttgagtaacgacagcgatagcatcattgagcgcatgatatcgctacatccgtacgagtatcaagtggataagctaggacgagacgtcaaccctttctataaacttgccgatccagaccagttctcgacgcacgtctgggacattgaacccacttgtgacgtcgttggcgttgggcatgaagataataccattataatagacgcagcgcgcgttatgcacattagatggaaaggcttccctcggatggtcgtcacaagagactacggtcttggtcgccttcttgcgacgctgttcgtgacggctgggacatggtggttcatacaaggcgtcacgatcacgatcacatatgcaccactcctgtcatcgtccggcctcaccccagaattgattcttagtttagaatacgtcattagtgcgatcttcgccgccgcggtatttctcagcgtctttggaccactatcagtccgtcgtctgtacggtgggcaagtcctgcagagcgcgagcaacctggttggatttgagggcgtcatgcctctagccgagttggagcgtctaatgtttggtaatgtcaatggtcgattgaactatgaggcctcatcgacccctatctgcgctcagtacagggatcacactctgcgagtcggcaatgaacctgactgggtcgcgaacggacaacctgagagatgtccactgccccaaggccatcgcctgtttacacttgtcgatactggaacattgacggtcaacattttcagcgcggagcggccaccaacggtcgcagttttgacaggtcgcgagggtggtatgcttagagccgtgctgtgcagctggcagttcgagaatgattgtctttataaggaaactgtgatacggatgccgagtaatattgaagatgccgccaatctcaagggctggctgaagctgtgtctcatgaccttgaatcagtcaagaaaaatggaaagagagaggtggggaatacaagggtga

SEQ ID NO: 4753 - protein, 905 aa, Muscodor strobelii
  misc_feature: SGI Peptide ID NO. 561285
  misc_feature (2)..(897): NCBI GI: 85114966 Blast Desc: NCU00869 [Neurospora crassa OR74A] gi|28926579|gb|EAA35549.1| [Neurospora crassa OR74A]
  misc_feature (218)..(885): NCBI GI: 156037828 Blast Desc: SS1G_12628 [Sclerotinia sclerotiorum 1980] gi|154698036|gb|EDN97774.1| SS1G_12628 [Sclerotinia sclerotiorum 1980]
  misc_feature (186)..(885): NCBI GI: 154315292 Blast Desc: BC1G_04685 [Botryotinia fuckeliana B05.10] gi|150847648|gb|EDN22841.1| BC1G_04685 [Botryotinia fuckeliana B05.10]
  misc_feature (201)..(894): NCBI GI: 255938293 Blast Desc: Pc13g15220 [Penicillium chrysogenum Wisconsin 54-1255] gi|211584537|emb|CAP92591.1| Pc13g15220 [Penicillium chrysogenum Wisconsin 54-1255]
  misc_feature (146)..(904): NCBI GI: 46111403 Blast Desc: FG02583.1 [Gibberella zeae PH-1]
  misc_feature (147)..(904): NCBI GI: 256726168 Blast Desc: [Nectria haematococca mpVI 77-13-4]
  misc_feature (213)..(904): NCBI GI: 67538450 Blast Desc: AN5395.2 [Aspergillus nidulans FGSC A4] gi|40743365|gb|EAA62555.1| AN5395.2 [Aspergillus nidulans FGSC A4] gi|259485160|tpe|CBF81979.1| TPA: conserved [Aspergillus FGSC
  misc_feature (332)..(887): NCBI GI: 189196016 Blast Desc: conserved [Pyrenophora tritici-repentis Pt-1C-BFP] gi|187980225|gb|EDU46851.1| conserved [Pyrenophora tritici-repentis Pt-1C-BFP]
  misc_feature (342)..(792): NCBI GI: 238844829 Blast Desc: conserved [Microsporum canis CBS 113480]
  misc_feature (369)..(650): NCBI GI: 154299295 Blast Desc: BC1G_11133 [Botryotinia fuckeliana B05.10] gi|150857398|gb|EDN32590.1| BC1G_11133 [Botryotinia fuckeliana B05.10]
MEHQSKTDESYLVSEMPGPGGPYFSNQQHQDLNQQYSGHQWVAYNPYQQVMSQQHAQNHPQSNMMYTQDQTYVSYPLETLQPAHQQWAYSEAPNNPRINAHDHKPLPQPDVTANDVRFHDLSSEHQLQSQHETQETSWWPWAKSAEQKAHENFAKQFSGGRSFNGHFFRKPTRDATVEEGHVNAKRPEDYGGAVDQHPKTGKFIYRNQFGQLEHKYSDVAVYLSPTTYRPKRLIVQCSDHVRKNAHRAGGDWRRRKMNGDIPKVLTISEWALRPFERRTAWGKIVGTIRLLWVAVPLQLLLAWPGTTTWDDGDMSEFVYRFSWISLALGKTLAEKVMSSRKREVRPRKLYIYQPDGQWKVVDNPPRNKKYIFISYAAESFKVKGVLDTERIRQMAQAATLDADLDACWMDTDCIETVNGIRKDVDIYTMCDVIRAASRVVVILADDKAETAQDWGSRLWTLPEALLAHQHEIDFFVDVRGRYEKTTKSLVEITGDIWDDRDDHEEAAGSTRLLAEHFSGLLTLSRLELFAAAIDAFRSKRYRAWTASDVTLAVMSLMHYRIDKNEDDSAFQSLAQLSLSNDSDSIIERMISLHPYEYQVDKLGRDVNPFYKLADPDQFSTHVWDIEPTCDVVGVGHEDNTIIIDAARVMHIRWKGFPRMVVTRDYGLGRLLATLFVTAGTWWFIQGVTITITYAPLLSSSGLTPELILSLEYVISAIFAAAVFLSVFGPLSVRRLYGGQVLQSASNLVGFEGVMPLAELERLMFGNVNGRLNYEASSTPICAQYRDHTLRVGNEPDWVANGQPERCPLPQGHRLFTLVDTGTLTVNIFSAERPPTVAVLTGREGGMLRAVLCSWQFENDCLYKETVIRMPSNIEDAANLKGWLKLCLMTLNQSRKMERERWGIQG

SEQ ID NO: 4754 - DNA, 486 bp, Muscodor strobelii
  misc_feature: SGI cDNA ID NO. 561286
  misc_feature: Encodes the peptide sequence at SEQ ID NO 4755
gaccccaccattccctcgactatggccgacctccgttccgtaatgcaaactacaattgacagcttcgtcaacaacaatactcaggcggtaaagcaaaaagacgtcaagcttctgtccgcctccctggcggagaactgtgtccgcatgtaccgcccgctctcgttcgtccagcgttactcccagttcttcaagccgcagcttaacaatgccgaatacgaggctcagatggaacacgagctgcaaaccatgcaggacgtgtcgcagaacgtgaccagaaccgtaatcgacgccgcggggttaaaggcctcggtcgcgatcgagaaaaccgtcttcacttctgatgcaaagaacgtcgttgaggtcatcatggatctggatttcaatgggtgtgggacgcaaattacccaggttatcgagttcgtcgacacttaccaaagcacaaaggtcttggaagagattctaagcaacatggccactacgcaatag

SEQ ID NO: 4755 - protein, 161 aa, Muscodor strobelii
  misc_feature: SGI Peptide ID NO. 561286
  misc_feature (11)..(153): NCBI GI: 46114500 Blast Desc: FG03092.1 [Gibberella zeae PH-1]
  misc_feature (7)..(153): NCBI GI: 46122665 Blast Desc: FG05710.1 [Gibberella zeae PH-1]
  misc_feature (9)..(143): NCBI GI: 256725287 Blast Desc: NECHADRAFT_45882 [Nectria haematococca mpVI 77-13-4]
  misc_feature (6)..(152): NCBI GI: 46116058 Blast Desc: FG03871.1 [Gibberella zeae PH-1]
  misc_feature (9)..(142): NCBI GI: 46115604 Blast Desc: FG03644.1 [Gibberella zeae PH-1]
DPTIPSTMADLRSVMQTTIDSFVNNNTQAVKQKDVKLLSASLAENCVRMYRPLSFVQRYSQFFKPQLNNAEYEAQMEHELQTMQDVSQNVTRTVIDAAGLKASVAIEKTVFTSDAKNVVEVIMDLDFNGCGTQITQVIEFVDTYQSTKVLEEILSNMATTQ

SEQ ID NO: 4756 - DNA, 1031 bp, Muscodor strobelii
  misc_feature: SGI EST ID NO. CUFF.12090.0
  misc_feature: Variant of the nucleotide sequence at SEQ ID NO 4754
atttattcggggctctcccaatcttgtcctgaccttgaaagctactctaaaaactaccgcgcagttcatcgtgacaagtcgacacaacccgctcccagcacatatccaaatttcagatttcgaccccaccattccctcgactatggccgacctccgttccgtaatgcaaactacaattgacagcttcgtcaacaacaatactcaggcggtaaagcaaaaagacgtcaagcttctgtccgcctccctggcggagaactgtgtccgcatgtaccgcccgctctcgttcgtccagcgttactcccagttcttcaagccgcagcttaacaatgccgaatacgaggctcagatggaacacgagctgcaaaccatgcaggacgtgtcgcagaacgtgaccagaaccgtaatcgacgccgcggggttaaaggcctcggtcgcgatcgagaaaaccgtcttcacttctgatgcaaagaacgtcgttgaggtcatcatggatctggatttcaatgggtgtgggacgcaaattacccaggttatcgagttcgtcgacacttaccaaagcacaaaggtcttggaagagattctaagcaacatggccactacgcaatagtacaggacagaccgtggagacagacaatggattcggactgagtagtacgatagacgttgaagtctgcagcctttgccgcacatcaacgtctattttctgtttcttcaattgtgtcaaacccactgagggcgagtctaaattcactataaaagagattgaacacccaattgtttcgttcgttatgtccttgatctatgtatctgagctgtacctatttaaggacagattgtctataagaggcgatagtggtaaaacaaggctatggtattgagtttctagtagttcttacgataccgaaggatttggcgacttcgacttattactgctataaatataccactcgttgttttccgacataacgatctgatgattacgtcaatgggttttatttcctcgactagtttcaatagaacgttaattttac

SEQ ID NO: 4757 - DNA, 1560 bp, Muscodor strobelii
  misc_feature: SGI cDNA ID NO. 561287
  misc_feature: Encodes the peptide sequence at SEQ ID NO 4758
atgtcgagtctccatatcacttcttccctccagctcgtcgccgatttgttgcacacgctgagttgggcgcaatcaataggtcttgtagtcgccggtgtctggatcttgtcgagaatcgttgggaagaggaattcgaacattcgcagtgtcccaatccatgggtacagaagtgccttagagccgaccttcctcctgcaatggaggttcatcttgggcgcgaggcccatcatagcgagcggctaccaaaaattcaaggatgcccctttcatcgtccgccgtttcgataccgactacaacatcttacctgtccgctatcttgaggaaatacgactcgcatcgcctgcgatcttgagcagcaagattgccacgacctataacatgctctacgagtggactgatcttcatttcctgaagagatccgacctccacacatccgttctcaagaacaagttgacaccggagttgtctagacatctggagaaggcatatgacgagttggactatgcgtggcaatctgacgttcctcaacaagaagacattcaggagctggcgcgtatgctggttgcacgcatgtcgtcgaggatctttatcggtgtgccggcatgccgagacccagactggctcagagtgtcactagacttcactattgacgccttcaccaccgcgtttcttctgaggatgtttcctacctgggtgcgcttcttggtagcctggttcattcctgcgcgttatcgattgaagcggcatcgcgccaaagctgcctccgtcgtgcgagagttcaaggggaaaaccacgtgcagggtaaaagaaggtgaagacgtcaacaatgaagagtcgcttctatgctggatgttggacaatggcagcagcgaggagacgactatcaccgagatggcaaaccggcaactgatcatgacccttgcgagcgtgcacaccacgtctacaaatacatcgatctttctctttgagctatgcgagcacccagagtggatttccgtcctgaggaaagaaatagaggatgtaaagaaacagactggtgattcctttaggactgatataaggcactggcaccgacagctcgagcggatggactcgttccttctagaatgctttcgacttcaccctcctatcgtcctgagcccccaaagagtggcgcttcagccttttacattcaaagacgggatccacataccaaaggggtgcaggatagcatttgcaaacgcagagcaccaaatggaccccgaggtggtgaccgatccacacacgttcgatccgatgcgcgcttaccgcaagcggcactcggctgcagaccagtacgaccggaaccaggctgtcctaacagacctgagcaacaacctgacattcggctacggcaatcaatcatgcccggggaggttcctcggcgtcgcagagattaagatgctcctcgctaggctgatcgccgacttcgacttcaagtaccccgagggcaaatcgatgcccttcatcatgtccgctgacgaaaacgtgtttgttgacccgaccgcgacgctgatgatgaaaagaaggaaaattttgtag

SEQ ID NO: 4758 - protein, 519 aa, Muscodor strobelii
  misc_feature: SGI Peptide ID NO. 561287
  misc_feature (57)..(515): Pfam Id: PF00067 Pfam Desc: Cytochrome P450
  misc_feature (303)..(515): Pfam Id: PF00067 Pfam Desc: Cytochrome P450
  misc_feature (13)..(516): NCBI GI: 85090597 Blast Desc: NCU09274 [Neurospora crassa OR74A] gi|28919860|gb|EAA29257.1| [Neurospora crassa OR74A]
  misc_feature (1)..(516): NCBI GI: 39968359 Blast Desc: MGG_02272 [Magnaporthe grisea 70-15] gi|145014162|gb|EDJ98803.1| MGG_02272 [Magnaporthe grisea 70-15]
  misc_feature (29)..(518): NCBI GI: 119494789 Blast Desc: cytochrome P450 monooxygenase, [Neosartorya fischeri NRRL 181] gi|119412362|gb|EAW22303.1| cytochrome P450 monooxygenase, [Neosartorya fischeri NRRL 181]
  misc_feature (29)..(518): NCBI GI: 67522282 Blast Desc: AN1598.2 [Aspergillus nidulans FGSC A4] gi|40745149|gb|EAA64305.1| AN1598.2 [Aspergillus nidulans FGSC A4]
  misc_feature (29)..(518): NCBI GI: 259486929 Blast Desc: TPA: cytochrome P450, (Eurofung) [Aspergillus nidulans FGSC A4]
  misc_feature (127)..(519): NCBI GI: 169598079 Blast Desc: SNOG_01838 [Phaeosphaeria nodorum SN15] gi|160707654|gb|EAT91487.2| SNOG_01838 [Phaeosphaeria nodorum SN15]
  misc_feature (17)..(516): NCBI GI: 145254738 Blast Desc: An18g02700 [Aspergillus niger] gi|134084313|emb|CAK48653.1| protein product [Aspergillus niger]
  misc_feature (50)..(516): NCBI GI: 238839986 Blast Desc: phoma betae P450 monooxygenase No.2 [Microsporum canis CBS 113480]
  misc_feature (50)..(519): NCBI GI: 258578343 Blast Desc: conserved [Uncinocarpus reesii 1704] gi|237903619|gb|EEP78020.1| conserved [Uncinocarpus reesii 1704]
  misc_feature (12)..(518): NCBI GI: 240108704 Blast Desc: Cytochrome P450 family protein [Coccidioides posadasii C735 delta SOWgp]
  misc_feature (29)..(518): SWISSPROT Homolog: EC 1.14.13.78 Ent-kaurene oxidase
MSSLHITSSLQLVADLLHTLSWAQSIGLVVAGVWILSRIVGKRNSNIRSVPIHGYRSALEPTFLLQWRFILGARPIIASGYQKFKDAPFIVRRFDTDYNILPVRYLEEIRLASPAILSSKIATTYNMLYEWTDLHFLKRSDLHTSVLKNKLTPELSRHLEKAYDELDYAWQSDVPQQEDIQELARMLVARMSSRIFIGVPACRDPDWLRVSLDFTIDAFTTAFLLRMFPTWVRFLVAWFIPARYRLKRHRAKAASVVREFKGKTTCRVKEGEDVNNEESLLCWMLDNGSSEETTITEMANRQLIMTLASVHTTSTNTSIFLFELCEHPEWISVLRKEIEDVKKQTGDSFRTDIRHWHRQLERMDSFLLECFRLHPPIVLSPQRVALQPFTFKDGIHIPKGCRIAFANAEHQMDPEVVTDPHTFDPMRAYRKRHSAADQYDRNQAVLTDLSNNLTFGYGNQSCPGRFLGVAEIKMLLARLIADFDFKYPEGKSMPFIMSADENVFVDPTATLMMKRRKIL

SEQ ID NO: 4759 - DNA, 1371 bp, Muscodor strobelii
  misc_feature: SGI EST ID NO. CUFF.12078.0
  misc_feature: Variant of the nucleotide sequence at SEQ ID NO 4757
gcgatcttgagcagcaagattgccacgacctataacatgctctacgagtggactgatcttcatttcctgaagagatccgacctccacacatccgttctcaagaacaagttgacaccggagttgtctagacatctggagaaggcatatgacgagttggactatgcgtggcaatctgacgttcctcaacaagaaggtgagagtcacatttcatggacagttcgaaaactaatgattagcagattgggctgaagtagacattcaggagctggcgcgtatgctggttgcacgcatgtcgtcgaggatctttatcggtgtgccggcatgccgagacccagactggctcagagtgtcactagacttcactattgacgccttcaccaccgcgtttcttctgaggatgtttcctacctgggtgcgcttcttggtagcctggttcattcctgcgcgttatcgattgaagcggcatcgcgccaaagctgcctccgtcgtgcgagagttcaaggggaaaaccacgtgcagggtaaaagaaggtgaagacgtcaacaatgaagagtcgcttctatgctggatgttggacaatggcagcagcgaggagacgactatcaccgagatggcaaaccggcaactgatcatgacccttgcgagcgtgcacaccacgtctacaaatacatcgatctttctctttgagctatgcgagcacccagagtggatttccgtcctgaggaaagaaatagaggatgtaaagaaacagactggtgattcctttaggactgatataaggcactggcaccgacagctcgagcggatggactcgttccttctagaatgctttcgacttcaccctcctatcgtcctgagcccccaaagagtggcgcttcagccttttacattcaaagacgggatccacataccaaaggggtgcaggatagcatttgcaaacgcagagcaccaaatggaccccgaggtggtgaccgatccacacacgttcgatccgatgcgcgcttaccgcaagcggcactcggctgcagaccagtacgaccggaaccaggctgtcctaacagacctgagcaacaacctgacattcggctacggcaatcaatcatgcccggggaggttcctcggcgtcgcagagattaagatgctcctcgctaggctgatcgccgacttcgacttcaagtaccccgagggcaaatcgatgcccttcatcatgtccgctgacgaaaacgtgtttgttgacccgaccgcgacgctgatgatgaaaagaaggaaaattttgtagaatcaggacttggccgcaggggtgaggacagagtagagaggaagcggcagggactacgcgacatatttagctagagtaaaacaacggatggc

SEQ ID NO: 4760 - DNA, 1668 bp, Muscodor strobelii
  misc_feature: SGI cDNA ID NO. 561288
  misc_feature: Encodes the peptide sequence at SEQ ID NO 4761
atgtcagacctgttgctgagtcgagctttcgcgcttatccagagacttcagaaccagcagcgaactggccgaggcctcggctctatgtcctcgtctgtctacgacacggcctggctgtccatgataagaaaaccggcggcacccagcggcgggcctggaggatggctgtttcccgagtcctttgactacatattgctccaacaatcgtcgtccggggcgtgggagtcgtatgccacacctgtcgatggtattcttaatactgctgccgctctcctgtcactgaaggcgcgattgaggattgagccaagcagctatcatgaggaatggatgagcaggagtgatacggccgaaagatcactgagacagctgctgtcggactgggacatagactcaagcgaccaggtcgggttcgagctacttgtcatcgcccatttggagctcttagaacagcatggcgtccacatccaagagcttccgcacctcgacgccctccgcgagctgcgcaaagccaagttggacaagatcccgttgtgcatgatctacgagtcgcggtctacgctgcatcactcacttgaggccttcatcggccgcattgactttgacagggtccgccatctgcaagatctcgatggatcaatgatgggctcgccggcttccaccgctgcatatcttatgaattgctccacctgggatgagaaagccgagacttatttattcgacgtggtgagacggggtaatcgggattctaccccagggggtgtcccaattgcttggccgacgccaatctttgagttgagctggatcatcacagctcttgcatcggcgggcatgtctctaaagtcacctgttgcagacgacttgagagctttcttgagaaccacacttgaagatcaaggcaacgtagtcgggtttgctccaggcagtttgcccgatgccgacgacacagcgaaggctctcgaggctctctactatctaggcgatgtgtgtgatccggacagcctcatccggacatatgaacgagccgaatatttcgtgacgtaccccgacgagcgcaatcctagcttcagcaccaactgcaatgttctcatactgttgttggtgcgcgaggacgacggcaatgccaatctacgtcgcatcatcaagattttgcgctttctcacatcgacggcgagagagagacgcgtgcgagataaatggcacttgagtcagctgtactggatgatgttattgtcgcgagcgctcgagctacttgctcgacggcagtcattgctgacggaaatatccaatttggagcccgagctactgggggacatcagatttgtgtcccaggccatgaagtcgcagatatttcgctctcatcaggacgatgggtcttgggaaggcatgtgcgagactaccgcatacgcagtgctaacccttaactcgctttcgaagctcccatggctcggcacaagcagtcaaatggttgtcgatgttgtcggggctatggtgtcgggcaagtcatacctccaatcccgaagggcagattgggccaaaggggcgtatctctggatcgagaaagtgacgtacagtcagtgttcgcttagcgaagcctactgcatcgctgcgtcgttcgttactctgccccaaccggagacgctcgtcgacaaggcaggttgcagaggataa

SEQ ID NO: 4761 - protein, 555 aa, Muscodor strobelii
  misc_feature: SGI Peptide ID NO. 561288
  misc_feature (24)..(533): NCBI GI: 116203031 Blast Desc: CHGG_09400 [Chaetomium globosum CBS 148.51] gi|88177918|gb|EAQ85386.1| CHGG_09400 [Chaetomium globosum CBS 148.51]
  misc_feature (2)..(542): NCBI GI: 85090593 Blast Desc: NCU09272 [Neurospora crassa OR74A] gi|28919858|gb|EAA29255.1| [Neurospora crassa OR74A]
  misc_feature (4)..(536): NCBI GI: 242821230 Blast Desc: terpene synthase family protein [Talaromyces stipitatus ATCC 10500] gi|218712559|gb|EED11984.1| terpene synthase family protein [Talaromyces stipitatus ATCC 10500]
  misc_feature (5)..(546): NCBI GI: 145254740 Blast Desc: An18g02710 [Aspergillus niger] gi|134084314|emb|CAK48654.1| protein product [Aspergillus niger]
  misc_feature (5)..(536): NCBI GI: 242815971 Blast Desc: polyprenyl-diphosphate synthase, [Talaromyces stipitatus ATCC 10500] gi|218715015|gb|EED14438.1| polyprenyl-diphosphate synthase, [Talaromyces stipitatus ATCC
  misc_feature (5)..(536): NCBI GI: 212545524 Blast Desc: geranylgeranyl pyrophosphate synthase, [Penicillium marneffei ATCC 18224] gi|210065885|gb|EEA19979.1| geranylgeranyl pyrophosphate synthase, [Penicillium marneffei ATCC 18224]
  misc_feature (5)..(536): NCBI GI: 119494777 Blast Desc: NFIA_009790 [Neosartorya fischeri NRRL 181] gi|119412358|gb|EAW22299.1| conserved [Neosartorya fischeri NRRL 181]
  misc_feature (9)..(555): NCBI GI: 186704304 Blast Desc: phyllocladan-16a-ol synthase [Phomopsis amygdali]
  misc_feature (5)..(536): NCBI GI: 238839982 Blast Desc: ent-kaurene synthase [Microsporum canis CBS 113480]
  misc_feature (5)..(536): NCBI GI: 186704306 Blast Desc: copalyl diphosphate synthase [Phomopsis amygdali]
  misc_feature (5)..(536): SWISSPROT Homolog: EC 5.5.1.13 Ent-copalyl diphosphate synthase
  misc_feature (5)..(536): SWISSPROT Homolog: EC 4.2.3.19 Ent-kaurene synthase
MSDLLLSRAFALIQRLQNQQRTGRGLGSMSSSVYDTAWLSMIRKPAAPSGGPGGWLFPESFDYILLQQSSSGAWESYATPVDGILNTAAALLSLKARLRIEPSSYHEEWMSRSDTAERSLRQLLSDWDIDSSDQVGFELLVIAHLELLEQHGVHIQELPHLDALRELRKAKLDKIPLCMIYESRSTLHHSLEAFIGRIDFDRVRHLQDLDGSMMGSPASTAAYLMNCSTWDEKAETYLFDVVRRGNRDSTPGGVPIAWPTPIFELSWIITALASAGMSLKSPVADDLRAFLRTTLEDQGNVVGFAPGSLPDADDTAKALEALYYLGDVCDPDSLIRTYERAEYFVTYPDERNPSFSTNCNVLILLLVREDDGNANLRRIIKILRFLTSTARERRVRDKWHLSQLYWMMLLSRALELLARRQSLLTEISNLEPELLGDIRFVSQAMKSQIFRSHQDDGSWEGMCETTAYAVLTLNSLSKLPWLGTSSQMVVDVVGAMVSGKSYLQSRRADWAKGAYLWIEKVTYSQCSLSEAYCIAASFVTLPQPETLVDKAGCRG

SEQ ID NO: 4762 - DNA, 1812 bp, Muscodor strobelii
  misc_feature: SGI EST ID NO. CUFF.12084.0
  misc_feature: Variant of the nucleotide sequence at SEQ ID NO 4760
gtatgccacacctgtcgatggtattcttaatactgctgccgctctcctgtcactgaaggcgcgattgaggattgagccaagcagctatcatgaggaatggatgagcaggagtgatacggccgaaagatcactgagacagctgctgtcggactgggacatagactcaagcgaccaggtcgggttcgagctacttgtcatcgcccatttggagctcttagaacagcatggcgtccacatccaagagcttccgcacctcgacgccctccgcgagctgcgcaaagccaagttggacaagatcccgttgtgcatgatctacgagtcgcggtctacgctgcatcactcacttgaggccttcatcggccgcattgactttgacagggtccgccatctgcaagatctcgatggatcaatgatgggctcgccggcgtatacatcaacccttgtgcttttacatgctaagatgactgataatatctcatcagttccaccgctgcatatcttatgaattgctccacctgggatgagaaagccgagacttatttattcgacgtggtgagacggggtaatcgggattctaccccagggggtgtcccaattgcttggccgacgccaatctttgagttgagctgggtacgtaatatgagtcaacgcccttgtggcgtcgattgaggactaagccatgcacaagatcatcacagctcttgcatcggcgggcatgtctctaaagtcacctgttgcagacgacttgagagctttcttgagaaccacacttgaagatcaaggcaacgtagtcgggtttgctccaggcagtttgcccgatgccgacgacacagcgaaggctctcgaggctctctactatctaggcgatgtgtgtgatccggacagcctcatccggacatatgaacgagccgaatatttcgtgacgtaccccgacgagcgcaatcctagcttcagcaccaactgcaatgttctcatactgttgttggtgcgcgaggacgacggcaatgccaatctacgtcgcatcatcaagattttgcgctttctcacatcgacggcgagagagagacgcgtgcgagataaatggcacttgagtcagctgtactggatgatgttattgtcgcgagcgctcgagctacttgctcgacggcagtcattgctgacggaaatatccaatttggagcccgagctactgggggacatcagatttgtgtcccaggccatgaagtcgcagatatttcgctctcatcaggacgatgggtcttgggaaggcatgtgcgagactaccgcatacgcagtgctaacccttaactcgctttcgaagctcccatggctcggcacaagcagtcaaatggttgtcgatgttgtcggggctatggtgtcgggcaagtcatacctccaatcccgaagggcagattgggccaaaggggcgtatctctggatcgagaaagtgacgtacagtcagtgttcgcttagcgaagcctactgcatcgctgcgtcgttcgttactctgccccaaccggagacgctcgtcgacaaggcaggttgcagaggataaattacgggatccacactgttgtgttcgtaattccccgtgtcttatatttagattgcttcagatagagatgaatctcaaaaatatcaaggcttccattctgccggcatccctcatagtactatcgtcacatcatcacacatgctgtcaacgccagtattgcggagagaacacagagaaaagcgaaatgggggaaacgatagtgataatatagcacatggaagtaatgaatctaattattagcaccctcgtgcttttca

SEQ ID NO: 4763 - DNA, 1359 bp, Muscodor strobelii
  misc_feature: SGI cDNA ID NO. 561289
  misc_feature: Encodes the peptide sequence at SEQ ID NO 4764
atgaatcgagccgttgagtacatttgctcggagatcccagagcactcgacactgggtgaagaaggctcagccactattgaggtcaaaatctcgagacttgccgtttcgaaagctttgcagtcggcaggtacaacagttggatcaggcttgaggcggaacacagactctatacatcgactcctaaagctatggaaacagacaccactgtttgcggagattccagagtgggagatccgcgcgtctatgctcgaagggacgttgttccgcccagttgtagaagcccggcgactaaacatcttcactcggcagggtgtcgaggacgacaagtattttgacgtgatccccttggcatggccaacatgcaataatcggacccgtacttttgctccgtcatgcttcttattcgagggtatgatggcagggcttttgaactaccaggtcgatgagttcatggaatccgtggcgagcatcaactattctgggaagatctctgagctgagacagctcattgacgacgtcattacttccaccagtgaagaaagcgcacaagatgatgcatacgatgctctttggaatagttcggctgccgatacgattgacgaactgattggcgccgctgataaagtcaacaaggctgccaatggtcatggcaacgcttcggaagagaagaaccggcaacaagtcctggtccctctgaagaaattcgtcacgcacgccctaaagcatccagtcatcctgtcggcaagctcatgggatcgcaaaaacatgatatgcgagcttcgtatctatctgcaaactcacgtcacacagagcgaagataacgcgctgctgcagggcgggaatttcggcaacagcgtcatgagggagcacttcttccgctgggtgcgaaccacatcggccgaccacacctcggcaacctacaccttcaacttcgtcagctgcctcctcggctcctggatccaaggtggtagggattgctttccgtcggcgcaggagaaatactacgcggctgcggcgtgccaacacctagccaccatgtgtcgcatgtataatgatcacggctccgccgtacgcgaccacgacgaggccaacgtgaattcggtcgactttcccgagttcggcccgcgaaatgcgagctttgcgccgaagaaagaggcattgttcgagatggcgcagtacgagagagacggtattgaggaagcactccgccggcttgagaaacacccatcggccggggatgatacgcaggcacgaaagacaaggcagatggagatctggcggctgttctacaatgtgacggacctttttgggcaaatatatgtactccgtgacattgggagtcgcttgaccgtcaagtag

SEQ ID NO: 4764 - protein, 452 aa, Muscodor strobelii
  misc_feature: SGI Peptide ID NO. 561289
  misc_feature (43)..(449): NCBI GI: 186704306 Blast Desc: copalyl diphosphate synthase [Phomopsis amygdali]
  misc_feature (29)..(449): NCBI GI: 145616408 Blast Desc: MGG_00027 [Magnaporthe grisea 70-15] gi|145010177|gb|EDJ94833.1| MGG_00027 [Magnaporthe grisea 70-15]
  misc_feature (33)..(447): NCBI GI: 14915688 Blast Desc: aphidicolan-16beta-ol synthase [Phoma betae]
  misc_feature (68)..(449): NCBI GI: 119494777 Blast Desc: NFIA_009790 [Neosartorya fischeri NRRL 181] gi|119412358|gb|EAW22299.1| conserved [Neosartorya fischeri NRRL 181]
  misc_feature (33)..(447): NCBI GI: 50355632 Blast Desc: aphidicolan-16b-ol synthase [Phoma betae]
  misc_feature (36)..(449): NCBI GI: 62900107 Blast Desc: CPSKS_GIBFU RecName: Full=Ent-kaur-16-ene synthase; AltName: Full=Ent-kaurene synthase; AltName: Full=Ent-copalyl diphosphate synthase; AltName: Full=CPS/KS; AltName: GfCPS/KS
  misc_feature (36)..(449): NCBI GI: 3549899 Blast Desc: copalyl diphosphate synthase [Gibberella fujikuroi]
  misc_feature (36)..(449): NCBI GI: 83755105 Blast Desc: ent-kaurene synthase [Fusarium proliferatum]
  misc_feature (36)..(449): NCBI GI: 51469022 Blast Desc: ent-copalyl diphosphate/ent-kaurene synthase [Fusarium proliferatum]
  misc_feature (56)..(449): NCBI GI: 238839982 Blast Desc: ent-kaurene synthase [Microsporum canis CBS 113480]
  misc_feature (36)..(449): SWISSPROT Homolog: EC 5.5.1.13 Ent-copalyl diphosphate synthase
  misc_feature (36)..(449): SWISSPROT Homolog: EC 4.2.3.19 Ent-kaurene synthase
MNRAVEYICSEIPEHSTLGEEGSATIEVKISRLAVSKALQSAGTTVGSGLRRNTDSIHRLLKLWKQTPLFAEIPEWEIRASMLEGTLFRPVVEARRLNIFTRQGVEDDKYFDVIPLAWPTCNNRTRTFAPSCFLFEGMMAGLLNYQVDEFMESVASINYSGKISELRQLIDDVITSTSEESAQDDAYDALWNSSAADTIDELIGAADKVNKAANGHGNASEEKNRQQVLVPLKKFVTHALKHPVILSASSWDRKNMICELRIYLQTHVTQSEDNALLQGGNFGNSVMREHFFRWVRTTSADHTSATYTFNFVSCLLGSWIQGGRDCFPSAQEKYYAAAACQHLATMCRMYNDHGSAVRDHDEANVNSVDFPEFGPRNASFAPKKEALFEMAQYERDGIEEALRRLEKHPSAGDDTQARKTRQMEIWRLFYNVTDLFGQIYVLRDIGSRLTVK

SEQ ID NO: 4765 - DNA, 849 bp, Muscodor strobelii
  misc_feature: SGI EST ID NO. CUFF.12087.0
  misc_feature: Variant of the nucleotide sequence at SEQ ID NO 4763
cgctgataaagtcaacaaggctgccaatggtcatggcaacgcttcggaagagaagaaccggcaacaagtcctggtccctctgaagaaattcgtcacgcacgccctaaagcatccagtcatcctgtcggcaagctcatgggatcgcaaaaacatgatatgcgagcttcgtatctatctgcaaactcacgtcacacagagcgaagataacgcgctgctgcagggcgggaatttcggcaacagcgtcatgagggagcacttcttccgctgggtgcgaaccacatcggccgaccacacctcggcaacctacaccttcaacttcgtcagctgcctcctcggctcctggatccaaggtggtagggattgctttccgtcggcgcaggagaaatactacgcggctgcggcgtgccaacacctagccaccatgtgtcgcatgtataatgatcacggctccgccgtacgcgaccacgacgaggccaacgtgaattcggtcgactttcccgagttcggcccgcgaaatgcgagctttgcgccgaagaaagaggcattgttcgagatggcgcagtacgagagagacggtattgaggaagcactccgccggcttgagaaacacccatcggccggggatgatacgcaggcacgaaagacaaggcagatggagatctggcggctgttctacaatgtgacggacctttttgggcaaatatatgtactccgtgacattgggagtcgcttgaccgtcaagtagacagtcgcccgctataacggcactacgtaaatggtatgggacggacctgtatatacctacataggcgtggcttttttcagatcatttagcttactgcttctttt

SEQ ID NO: 4766 - DNA, 501 bp, Muscodor strobelii
  misc_feature: SGI cDNA ID NO. 561290
  misc_feature: Encodes the peptide sequence at SEQ ID NO 4767
atgagggagcacttcttccgctgggtgcgaaccacatcggccgaccacacctcggcaacctacaccttcaacttcgtcagctgcctcctcggctcctggatccaaggtggtagggattgctttccgtcggcgcaggagaaatactacgcggctgcggcgtgccaacacctagccaccatgtgtcgcatgtataatgatcacggctccgccgtacgcgaccacgacgaggccaacgtgaattcggtcgactttcccgagttcggcccgcgaaatgcgagctttgcgccgaagaaagaggcattgttcgagatggcgcagtacgagagagacggtattgaggaagcactccgccggcttgagaaacacccatcggccggggatgatacgcaggcacgaaagacaaggcagatggagatctggcggctgttctacaatgtgacggacctttttgggcaaatatatgtactccgtgacattgggagtcgcttgaccgtcaagtag

SEQ ID NO: 4767 - protein, 166 aa, Muscodor strobelii
  misc_feature: SGI Peptide ID NO. 561290
  misc_feature (5)..(163): NCBI GI: 186704306 Blast Desc: copalyl diphosphate synthase [Phomopsis amygdali]
  misc_feature (5)..(163): NCBI GI: 145616408 Blast Desc: MGG_00027 [Magnaporthe grisea 70-15] gi|145010177|gb|EDJ94833.1| MGG_00027 [Magnaporthe grisea 70-15]
  misc_feature (2)..(163): NCBI GI: 119494777 Blast Desc: NFIA_009790 [Neosartorya fischeri NRRL 181] gi|119412358|gb|EAW22299.1| conserved [Neosartorya fischeri NRRL 181]
  misc_feature (2)..(163): NCBI GI: 238839982 Blast Desc: ent-kaurene synthase [Microsporum canis CBS 113480]
  misc_feature (2)..(163): NCBI GI: 14915688 Blast Desc: aphidicolan-16beta-ol synthase [Phoma betae]
  misc_feature (2)..(163): NCBI GI: 50355632 Blast Desc: aphidicolan-16b-ol synthase [Phoma betae]
  misc_feature (2)..(156): NCBI GI: 67522274 Blast Desc: AN1594.2 [Aspergillus nidulans FGSC A4] gi|40745145|gb|EAA64301.1| AN1594.2 [Aspergillus nidulans FGSC A4] gi|259486925|tpe|CBF85181.1| TPA: conserved [Aspergillus FGSC
  misc_feature (3)..(163): NCBI GI: 83755105 Blast Desc: ent-kaurene synthase [Fusarium proliferatum]
  misc_feature (3)..(163): NCBI GI: 62900107 Blast Desc: CPSKS_GIBFU RecName: Full=Ent-kaur-16-ene synthase; AltName: Full=Ent-kaurene synthase; AltName: Full=Ent-copalyl diphosphate synthase; AltName: Full=CPS/KS; AltName: GfCPS/KS
  misc_feature (3)..(163): NCBI GI: 3549899 Blast Desc: copalyl diphosphate synthase [Gibberella fujikuroi]
  misc_feature (3)..(163): SWISSPROT Homolog: EC 5.5.1.13 Ent-copalyl diphosphate synthase
  misc_feature (3)..(163): SWISSPROT Homolog: EC 4.2.3.19 Ent-kaurene synthase
MREHFFRWVRTTSADHTSATYTFNFVSCLLGSWIQGGRDCFPSAQEKYYAAAACQHLATMCRMYNDHGSAVRDHDEANVNSVDFPEFGPRNASFAPKKEALFEMAQYERDGIEEALRRLEKHPSAGDDTQARKTRQMEIWRLFYNVTDLFGQIYVLRDIGSRLTVK

SEQ ID NO: 4768 - DNA, 849 bp, Muscodor strobelii; identical to SEQ ID NO: 4765
  misc_feature: SGI EST ID NO. CUFF.12087.0
  misc_feature: Variant of the nucleotide sequence at SEQ ID NO 4766

SEQ ID NO: 4769 - DNA, 768 bp, Muscodor strobelii
  misc_feature: SGI cDNA ID NO. 561291
  misc_feature: Encodes the peptide sequence at SEQ ID NO 4770
atgagcgacgatctcgttacccaagatcgcagccaggtcgacgcagacatgcctgacgcctgtgatgtcgccaatggcgataattcaactaaccaagtctcttggatcaacatgttccaacctcctgttgttgctgacggccaactgtctcccaactacatctccgaccctgaggacggcgtcgagctccctccctacaaccccaacatggctcgactctccaacctgggcgacatgtacaatccccacgcttacagtgccggtctcagcgctgattccactggcatcccttctagccccagctctggcttcgtcgctgccgcccgaggtgccactaccggcaaccgcgcccctgtcccagtcatgggtatcactgacggctcatccatccctctcgatctccatcttgatgctactttctcggacatgaactcggactggtctgagcacaccaacgacggtgcccctcagggaactgtctaccgcaaggtctctcgcaaccagggtcgtagcaagcacttcgtcttccccaacgatgcttccgtcgccgacatcaaggagatcgttggaaaggcagccggaaggatggccagacgctttcctggttatgaggtggaggtggagatttggactcaccagaatgctcctcttcctggtgatgaagtcgatgaggatgatagcagcgagaatcaggaggatgctagtgatgtggtttctggcgttgaggctcacgagagtgagggtggtgagcagcatgctagtgcttag

SEQ ID NO: 4770 - protein, 255 aa, Muscodor strobelii
  misc_feature: SGI Peptide ID NO. 561291
MSDDLVTQDRSQVDADMPDACDVANGDNSTNQVSWINMFQPPVVADGQLSPNYISDPEDGVELPPYNPNMARLSNLGDMYNPHAYSAGLSADSTGIPSSPSSGFVAAARGATTGNRAPVPVMGITDGSSIPLDLHLDATFSDMNSDWSEHTNDGAPQGTVYRKVSRNQGRSKHFVFPNDASVADIKEIVGKAAGRMARRFPGYEVEVEIWTHQNAPLPGDEVDEDDSSENQEDASDVVSGVEAHESEGGEQHASA

SEQ ID NO: 4771 - DNA, 1212 bp, Muscodor strobelii
  misc_feature: SGI cDNA ID NO. 561292
  misc_feature: Encodes the peptide sequence at SEQ ID NO 4772
atggcagacgtagactccaaggccgtagaccccagggccgcccagcggttcgcactcatcaaggagaatctcgccgagttcctcaaccccgagattatcgagaacatcctcaatgagggccgcaacccgcgcatctactggggcactgcgacgacgggccggccgcactgtggctacctcgtccccggcgtcaagatggcccagttactagccgccgactgcgaattggttgttctccttgctgatatccacggcttcctcgacaacctgaaggctcccatcgaactcgtcgaaaaaagagccgagtactaccgattcgctatcacggcgctgctccaggcatgtggtgtatccaccgacaaggtcacctttgtactgggtagctcctaccagaagagccccgaatacatcatggacatctacaaaatgacctcattgacctctgaacacgatgctaaaaaggcgggagctgaggttgtgaagcagtcagcaaacagccccctgagtggtctactttaccccatattgcaggtgctggacgagcagcatctgaatgtcgacgcgcagttcggcggcttggaccagcggaagctgttcacagctgccaaggagtggctgcccaaactcgggtacagagaacgcgcacatctcatgaacgacatgattcctggcttacagggtggcaaaatgagctcgagcgatccggacagcaaaattgatcttctagatacccctgaagccgttgcgaagaaaatcaaaaaggcttacgcaatcccaaaggttgttgagggtaatggactgttagcttatatcgagaatgtcttcctacccatcgcggaactcaagggtaaacgcgaattcgttgtacttcgtgaaagggatggcctcgagccactggtgtacactgatgtgacacaggtgaaaactgactatgagaatgatattctcacgcctcagcttttgaaggccgctgtcacgaaatttctacaggagattctcactcccatccaggaagcttacaacgcatcgaaagagtggcaagaggtcactcagcaagcttatccaccacccccgcccccagagaagaaggccaagaaagtcaagaaaattggtactggctatgccggcaacaagaatgttaaagattctggacctgccgatatacctgccgctgaggtggcgaacctagatcttgatggcaacaaatcatga

SEQ ID NO: 4772 - protein, 403 aa, Muscodor strobelii
  misc_feature: SGI Peptide ID NO. 561292
  misc_feature (37)..(334): Pfam Id: PF00579 Pfam Desc: tRNA synthetases class I (W and Y)
  misc_feature (1)..(354): NCBI GI: 121712682 Blast Desc: tyrosyl-tRNA synthetase [Aspergillus clavatus NRRL 1] gi|119402105|gb|EAW12526.1| tyrosyl-tRNA synthetase [Aspergillus clavatus NRRL 1]
  misc_feature (15)..(378): NCBI GI: 256730899 Blast Desc: NECHADRAFT_71656 [Nectria haematococca mpVI 77-13-4]
  misc_feature (8)..(351): NCBI GI: 171677871 Blast Desc: protein product [Podospora anserina] gi|170937004|emb|CAP61662.1| protein product [Podospora anserina]
  misc_feature (15)..(351): NCBI GI: 116201495 Blast Desc: CHGG_08632 [Chaetomium globosum CBS 148.51] gi|88177150|gb|EAQ84618.1| CHGG_08632 [Chaetomium globosum CBS 148.51]
  misc_feature (10)..(354): NCBI GI: 119479191 Blast Desc: tyrosyl-tRNA synthetase [Neosartorya fischeri NRRL 181] gi|119407778|gb|EAW17727.1| tyrosyl-tRNA synthetase [Neosartorya fischeri NRRL 181]
  misc_feature (15)..(356): NCBI GI: 145606232 Blast Desc: MGG_02449 [Magnaporthe grisea 70-15] gi|145013947|gb|EDJ98588.1| MGG_02449 [Magnaporthe grisea 70-15]
  misc_feature (13)..(354): NCBI GI: 70997685 Blast Desc: tyrosyl-tRNA synthetase [Aspergillus fumigatus Af293] gi|66851216|gb|EAL91542.1| tyrosyl-tRNA synthetase [Aspergillus fumigatus Af293] gi|159126689|gb|EDP51805.1| tyrosyl-tRNA A1163]
  misc_feature (9)..(357): NCBI GI: 67515551 Blast Desc: AN0057.2 [Aspergillus nidulans FGSC A4] gi|40746079|gb|EAA65235.1| AN0057.2 [Aspergillus nidulans FGSC A4] gi|259489754|tpe|CBF90286.1| TPA: tyrosyl-tRNA synthetase,
  misc_feature (15)..(354): NCBI GI: 46126117 Blast Desc: FG07436.1 [Gibberella zeae PH-1]
  misc_feature (9)..(357): NCBI GI: 238499123 Blast Desc: tyrosyl-tRNA synthetase [Aspergillus flavus NRRL3357] gi|220692549|gb|EED48895.1| tyrosyl-tRNA synthetase [Aspergillus flavus NRRL3357]
  misc_feature (9)..(354): SWISSPROT Homolog: EC 6.1.1.1 Tyrosine--tRNA ligase
MADVDSKAVDPRAAQRFALIKENLAEFLNPEIIENILNEGRNPRIYWGTATTGRPHCGYLVPGVKMAQLLAADCELVVLLADIHGFLDNLKAPIELVEKRAEYYRFAITALLQACGVSTDKVTFVLGSSYQKSPEYIMDIYKMTSLTSEHDAKKAGAEVVKQSANSPLSGLLYPILQVLDEQHLNVDAQFGGLDQRKLFTAAKEWLPKLGYRERAHLMNDMIPGLQGGKMSSSDPDSKIDLLDTPEAVAKKIKKAYAIPKVVEGNGLLAYIENVFLPIAELKGKREFVVLRERDGLEPLVYTDVTQVKTDYENDILTPQLLKAAVTKFLQEILTPIQEAYNASKEWQEVTQQAYPPPPPPEKKAKKVKKIGTGYAGNKNVKDSGPADIPAAEVANLDLDGNKS

SEQ ID NO: 4773 - DNA, 1934 bp, Muscodor strobelii
  misc_feature: SGI EST ID NO. CUFF.12198.0
  misc_feature: Variant of the nucleotide sequence at SEQ ID NO 4771
tggagaggacccctgctttaccccaccacagcatccagttgcccctccaagacatgacacatcccacctttttttcgaaggtgcaagtgactcaggtcgccgccgattctcgtctgggcgcatataagtagaaatccaacccgctctgtcgccggtcggtcctgcccacgactgtctcacagctttgcctcgcttctgctcattggcccagcatggcagacgtagactccaaggccgtagaccccagggccgcccagcggttcgcactcatcaaggagaatctcgccgagttcctcaaccccgagattatcgagaacatcctcaatgagggccgcaacccgcgcatctactggggcactgcgacgacgggccggccgcactgtggctacctcgtccccggcgtcaagatggcccagttactagccgccgactgcgaattggttgttctccttgctgatgtaggcactcgttttcatctggccgcgtccgatactcaaagctgatcgcatttctgttagatccacggcttcctcgacaacctgaaggctcccatcgaactcgtcgaaaaaagagccgagtactaccgattcgctatcacggcgctgctccaggcatgtggtgtatccaccgacaaggtcacctttgtactgggtagctcctaccagaagagccccgaatacatcatggacatctacaaaatgacctcattgacctctgaacacgatgctaaaaaggcgggagctgaggttgtgaagcagtcagcaaacagccccctgagtggtctactttaccccatattgcaggtgctggacgagcagcatctgaatgtcgacgcgcagttcggcggcttggaccagcggaagctgttcacagctgccaaggagtggctgcccaaactcgggtacagagaacgcgcacatctcatgaacgacatgattcctggcttacagggtggcaaaatgagctcgagcgatccggacagcaaaattgatcttctagatacccctgaagccgttgcgaagaaaatcaaaaaggcttacgcaatcccaaaggttgttgagggtaatggactgttagcttatatcgagaatgtcttcctacccatcgcggaactcaagggtaaacgcgaattcgttgtacttcgtgaaagggatggcctcgagccactggtgtacactgatgtgacacaggtgaaaactgactatgagaatgatattctcacgcctcagcttttgaaggccgctgtcacgaaatttctacaggagattctcactcccatccaggaagcttacaacgcatcgaaagagtggcaagaggtcactcagcaagcttatccaccacccccgcccccagagaagaaggccaagaaagtcaagaaaattggtactggctatgccggcaacaagaatgttaaagattctggacctgccgatatacctgccgctgaggtggcgaacctagatcttgatggcaacaaatcatgatgtctcatttagaacacggctcattaccattcattgcctgtgttggattgagtatttagagcaagactaagactgatggttccccattgagcgagacttatacccatgaattgccctggttggtagtctagatgataaaagatccaagcaaaacaaataagagaagaaaaaattcacaagaactcactcgactggttattatatgcattgctttagatgtgttgaacctgataattattctacgtgggaggactgttgaagtgggcgcatttggacctggagaaagaacataatgactggacgatgattcgagcgtgtcattaatcgtcagttcgaaatattatctgatgctcgatgccgctccagccccacacaatgagcttgatctctcccttctgcctcaaaatacttgatagagtctttgagttggatgaccctttaagaaggaat

SEQ ID NO: 4774 - DNA, 402 bp, Muscodor strobelii
  misc_feature: SGI cDNA ID NO. 561293
  misc_feature: Encodes the peptide sequence at SEQ ID NO 4775
atgacaatcatacatatcggtgagtacagtgcagtcctgttcaagtttcagtcttgggtgactgaggagcaggggaatgcatttataactggagttaaagccatgaagaacttggcttgtataaaagaaggccgcctcttcgtgggcggaccgtcattgacggatccgattgagtggtctaagggtcttcaatacgcggtcgtaagctaccacgaagacatgtctgcgctgaatgcatatcaagtagccaaagtagaaaatcgcgacaaattgccatttgacgaccctcttgattacgagacagtgtgccgctttgactttgaggtggccgccgaggacgagtacatgtgtcaattcggttcactagcaaagctcgtaggaaatgttaggtccgtcgactag

SEQ ID NO: 4775 - protein, 133 aa, Muscodor strobelii
  misc_feature: SGI Peptide ID NO. 561293
  misc_feature (11)..(123): NCBI GI: 121700531 Blast Desc: stress responsive A/B barrel domain protein [Aspergillus clavatus NRRL 1] gi|119396673|gb|EAW07104.1| stress responsive A/B barrel domain protein [Aspergillus clavatus NRRL
  misc_feature (1)..(123): NCBI GI: 145236128 Blast Desc: [Aspergillus niger] gi|134075163|emb|CAK96476.1| [Aspergillus niger]
  misc_feature (11)..(130): NCBI GI: 259483959 Blast Desc: TPA: conserved [Aspergillus nidulans FGSC A4]
  misc_feature (1)..(130): NCBI GI: 67901280 Blast Desc: AN7627.2 [Aspergillus nidulans FGSC A4] gi|40742623|gb|EAA61813.1| AN7627.2 [Aspergillus nidulans FGSC A4]
  misc_feature (1)..(122): NCBI GI: 238482825 Blast Desc: conserved [Aspergillus flavus NRRL3357] gi|220700701|gb|EED57039.1| conserved [Aspergillus flavus NRRL3357]
  misc_feature (1)..(125): NCBI GI: 70996853 Blast Desc: AFUA_5G14760 [Aspergillus fumigatus Af293] gi|66850817|gb|EAL91143.1| AFUA_5G14760 [Aspergillus fumigatus Af293] gi|159127088|gb|EDP52204.1| AFUB_062430 [Aspergillus
  misc_feature (1)..(119): NCBI GI: 119476584 Blast Desc: stress responsive A/B barrel domain protein [Neosartorya fischeri NRRL 181] gi|119407359|gb|EAW17308.1| stress responsive A/B barrel domain protein [Neosartorya fischeri
  misc_feature (1)..(88): NCBI GI: 238506269 Blast Desc: conserved [Aspergillus flavus NRRL3357] gi|220689049|gb|EED45400.1| conserved [Aspergillus flavus NRRL3357]
  misc_feature (13)..(119): NCBI GI: 242787246 Blast Desc: TSTA_037520 [Talaromyces stipitatus ATCC 10500] gi|218721113|gb|EED20532.1| TSTA_037520 [Talaromyces stipitatus ATCC 10500]
  misc_feature (13)..(127): NCBI GI: 238497718 Blast Desc: conserved [Aspergillus flavus NRRL3357] gi|220693368|gb|EED49713.1| conserved [Aspergillus flavus NRRL3357]
MTIIHIGEYSAVLFKFQSWVTEEQGNAFITGVKAMKNLACIKEGRLFVGGPSLTDPIEWSKGLQYAVVSYHEDMSALNAYQVAKVENRDKLPFDDPLDYETVCRFDFEVAAEDEYMCQFGSLAKLVGNVRSVD

SEQ ID NO: 4776 - DNA, 1689 bp, Muscodor strobelii
  misc_feature: SGI cDNA ID NO. 561294
  misc_feature: Encodes the peptide sequence at SEQ ID NO 4777
atggctggcattgctgacattgtccttacaccgtccttcctcgtctatcctccactgatttatcttttcagcaatatcgtgagcttcatacttaatacccttcgtcccaaggcttttccacctggaccaagcccgtttcctggtgttggcaacctccttcagctcaatagagtcttccctttcctcacatttggagcctgggcaaaggaatatggcaatgacacgccgcttggaatcaagcggggctctgccaatgttgtcgtcttgaatagtggtcgccttgtgaacgaattgtttgaaaagcgcggggcagtatatgctgatcgcccttatattcctatgaatgactgggtcttccaagatgaccttaggccggcgctattctacaagagttctgcctatcacacgcgttggcgcagagaattcaataacaattttggtcccaccgccatcacgcgattgcgcccagtctatgaagccgaagctgccagacttctagtgaagttgatcgagtcaccgggagcgcggggtcagcagttagaggacatgctcgtgtgctggatgattagtgttccttcgcttggtgtttgcggcaggcgtccagactatatggatgactacggattttcaatcaaagaattcacagagaacaacgaagcatatgcgtcgttacttgcacctagtgctaaggacttgctacctttcttgcgctatctccctgagtttctcggtatgtcggcatggaagaaagaggcattggcggtgcgagagggggttctcaaagtaggcagtcagtttttgagtgccgctaaggaacagcgtaaagcccttgacgagggaaagccaattgcttgggaaagtgtcttggccagaatgcttcgagaacagcgcgagaagaatgagactatgtttacggcgaccgacatgggtaatgcggctttccacattgtttcaaccgctacaagcgccccaattgcatatttttcgacattattgatgaccttggcgaaatttccagaggttcaggaacgcgtcaggaacgaggttcttacagtctctaagggcgctgtgccaatggcaactgatttgccaaatatgaagtacatggacgcgttttggaacgaggtccaccgttggcgacctgttgcgccccaggcagtcccccatgtgcccacacaggacgacacttacaacggccatctcatccccaagggtacggcagttatcatgaacgtctggcaaattcatcataacgaagaagactacgaagatcccgacaagttcgaccctgaacgtttcttgcggcacccacttggcatgcgaatcgacaaagcacatgacccagctcatatggatatttcaagtatacgtccacactatgactttggtgctggccggagaatttgtccgggaatgtgtcccggtgtgctagacttagcgaagcagacgttccttctcggactagcaaagatgctctgggctttcgagatccgatcgccagagggtaaagaggttgatctgagcctcgagacgggactcgtgcaagggactgctctacaccccaacgactttgatcttgttatgaagttaagatctgagcgcaccaaggaagacatcatgaaccactacttcgagacttatgagggggaagccgagatcatgggatggagagatggccaattcagatag

SEQ ID NO: 4777 - protein, 562 aa, Muscodor strobelii
  misc_feature: SGI Peptide ID NO. 561294
  misc_feature (40)..(528): Pfam Id: PF00067 Pfam Desc: Cytochrome P450
  misc_feature (335)..(435): Pfam Id: PF00067 Pfam Desc: Cytochrome P450
  misc_feature (40)..(116): Pfam Id: PF00067 Pfam Desc: Cytochrome P450
  misc_feature (462)..(528): Pfam Id: PF00067 Pfam Desc: Cytochrome P450
  misc_feature (26)..(546): NCBI GI: 225682289 Blast Desc: cytochrome P450 21 [Paracoccidioides brasiliensis Pb03]
  misc_feature (26)..(546): NCBI GI: 226289668 Blast Desc: cytochrome P450 21 [Paracoccidioides brasiliensis Pb18]
  misc_feature (26)..(553): NCBI GI: 226279789 Blast Desc: cytochrome P450 3 monooxygenase [Paracoccidioides brasiliensis Pb01]
  misc_feature (338)..(556): NCBI GI: 116194930 Blast Desc: CHGG_04063 [Chaetomium globosum CBS 148.51] gi|88179976|gb|EAQ87444.1| CHGG_04063 [Chaetomium globosum CBS 148.51]
  misc_feature (33)..(549): NCBI GI: 67524539 Blast Desc: AN2727.2 [Aspergillus nidulans FGSC A4] gi|40743839|gb|EAA63025.1| AN2727.2 [Aspergillus nidulans FGSC A4] gi|259486362|tpe|CBF84139.1| TPA: cytochrome P450, (Eurofung)
  misc_feature (31)..(538): NCBI GI: 256725705 Blast Desc: NECHADRAFT_81689 [Nectria haematococca mpVI 77-13-4]
  misc_feature (7)..(546): NCBI GI: 169603513 Blast Desc: SNOG_04767 [Phaeosphaeria nodorum SN15] gi|111067407|gb|EAT88527.1| SNOG_04767 [Phaeosphaeria nodorum SN15]
  misc_feature (20)..(545): NCBI GI: 121710950 Blast Desc: Cytochrome P450 oxidoreductase, [Aspergillus clavatus NRRL 1] gi|119401241|gb|EAW11665.1| Cytochrome P450 oxidoreductase, [Aspergillus clavatus NRRL 1]
  misc_feature (20)..(545): NCBI GI: 195971095 Blast Desc: m-hydroxybenzyl alcohol hydroxylase [Aspergillus clavatus]
  misc_feature (1)..(283): NCBI GI: 116194930 Blast Desc: CHGG_04063 [Chaetomium globosum CBS 148.51] gi|88179976|gb|EAQ87444.1| CHGG_04063 [Chaetomium globosum CBS 148.51]
  misc_feature (49)..(513): SWISSPROT Homolog: EC 1.14.14.1 Unspecific monooxygenase
MAGIADIVLTPSFLVYPPLIYLFSNIVSFILNTLRPKAFPPGPSPFPGVGNLLQLNRVFPFLTFGAWAKEYGNDTPLGIKRGSANVVVLNSGRLVNELFEKRGAVYADRPYIPMNDWVFQDDLRPALFYKSSAYHTRWRREFNNNFGPTAITRLRPVYEAEAARLLVKLIESPGARGQQLEDMLVCWMISVPSLGVCGRRPDYMDDYGFSIKEFTENNEAYASLLAPSAKDLLPFLRYLPEFLGMSAWKKEALAVREGVLKVGSQFLSAAKEQRKALDEGKPIAWESVLARMLREQREKNETMFTATDMGNAAFHIVSTATSAPIAYFSTLLMTLAKFPEVQERVRNEVLTVSKGAVPMATDLPNMKYMDAFWNEVHRWRPVAPQAVPHVPTQDDTYNGHLIPKGTAVIMNVWQIHHNEEDYEDPDKFDPERFLRHPLGMRIDKAHDPAHMDISSIRPHYDFGAGRRICPGMCPGVLDLAKQTFLLGLAKMLWAFEIRSPEGKEVDLSLETGLVQGTALHPNDFDLVMKLRSERTKEDIMNHYFETYEGEAEIMGWRDGQFR

SEQ ID NO: 4778 - DNA, 3216 bp, Muscodor strobelii
  misc_feature: SGI EST ID NO. CUFF.12103.0
  misc_feature: Variant of the nucleotide sequence at SEQ ID NO 4776
cttcaaacagtcagatcattgctaaatcagacatcgttctgtgtcgtttgctcagctatgtcttttgctagcatcaaatgcattattattatcaaatacataatgctcttctctccaaagcccccaaagaccgcaacatctaccgtcgctagtcgacggacctaacatttcctacgagctttgctagtgaaccgaattgacacatgtactcgtcctcggcggccacctcaaagtcaaagcggcacactgtctcgtaatcaagagggtcgtcaaatggcaatttgtcgctttgaaaacaacattagcagattgctcaggtgcgggatgaatggcgtgggataacacaatgctcataccgattttctactttggctacttgatatgcattcagcgcagacatgtcttcgtggtagcttacgaccgcgtattgaagacccttagaccactcaatcggatccgtcaatgacggtccgcccacgaagaggcggccttcttttatacaagccaagttcttcatggctttaactccagttataaatgcattcccctgctcctcagtcacccaagactgaaacttgaacaggactgcacttgagcgtgttagaaaatcagaaatagaattcagacggttcgcggctcacgtggcaccaacccaccgcgcaagttaacctgtactcaccgatatgtatgattgtcatcttggagacgaataatgcggattctcttctagggctattcggtaccacgcttagcattacggtttagttacaagactatataactagcccgacaacagcaaaacatcgtaatctgtcaatgatcctgcagcggtgctacagctgaaattacgagtatgcagagctgccgcgacactcgaccggactgcgtggatctggtggccgccgaccttccgaccggcactccgatcaacctccggccgatttccgactctcacattttccgacctgaaaatgcattcacacgcagttcaaggaacaggcaatggccatgtcggatccgatgatcaatatgtgattcaaatcgtaagagatgtggctccagctcaatcagctgaatgcgacgtctcaacatgctaggtcacatttctaacatcctccactaatgatgcctcgcattgctctcatcaagagacctcggatcttgaatacatatccttcaactctactgttttgagctaggttctattcgctgtgctgttcgcattctctcacatcaacagtacatccattgcgaacagggtcaatatggctggcattgctgacattgtccttacaccgtccttcctcgtctatcctccactgatttatcttttcagcaatatcgtgagcttcatacttaatacccttcgtcccaaggcttttccacctggaccaagcccgtttcctggtgttggcaacctccttcagctcaatagagtcttccctttcctcacatttggagcctgggcaaaggaatatggcaatgacacgccgcttggaatcaagcggggctctgccaatgttgtcgtcttgaatagtggtcgccttgtgaacgaattgtttgaaaagcgcggggcagtatatgctgatcgcccttatattcctatgaatgactgggtcttccaagatgaccttaggccggcgctattctacaagagttctgcctatcacacgcgttggcgcagagaattcaataacaattttggtcccaccgccatcacgcgattgcgcccagtctatgaagccgaagctgccagacttctagtgaagttgatcgagtcaccgggagcgcggggtcagcagttagaggacatgctcgtgtgctggatgattagtgttccttcgcttggtgtttgcggcaggcgtccagactatatggatgactacggattttcaatcaaagaattcacagagaacaacgaagcatatgcgtcgttacttgcacctagtgctaaggacttgctacctttcttgcgctatctccctgagtttctcggtatgtcggcatggaagaaagaggcattggcggtgcgagagggggttctcaaagtaggcagtcagtttttgagtgccgctaaggaacagcgtaaagcccttgacgagggaaagccaattgcttgggaaagtgtcttggccagaatgcttcgagaacagcgcgagaagaatgagactatgtttacggcgaccgacatgggtaatgcggctttccacattgtttcaaccgctacaagcgccccaattgcatatttttcgacattattgatgaccttggcgaaatttccagaggttcaggaacgcgtcaggaacgaggttcttacagtctctaagggcgctgtgccaatggcaactgatttgccaaatatgaagtacatggacgcgttttggaacgaggtccaccgttggcgacctgttgcgccccaggcagtcccccatgtgcccacacaggacgacacttacaacggccatctcatccccaagggtacggcagttatcatgaacgtctggcaaattcatcataacgaagaagactacgaagatcccgacaagttcgaccctgaacgtttcttgcggcacccacttggcatgcgaatcgacaaagcacatgacccagctcatatggatatttcaagtatacgtccacactatgactttggtgctggccggagaatttgtccgggaatgtgtaagtttggcttatcaatccgataactacaatgcggaccagaaatcccctataatactgtaagtcttttgtgattatactaacagtcccggtgtgctagacttagcgaagcagacgttccttctcggactagcaaagatgctctgggctttcgagatccgatcgccagagggtaaagaggttgatctgagcctcgagacgggactcgtgcaagggactgctctacaccccaacgactttgatcttgttatgaagttaagatctgagcgcaccaaggaagacatcatgaaccactacttcgagacttatgagggggaagccgagatcatgggatggagagatggccaattcagatagttggcggtccaagacatcagtggtacaaaggtcttgaatcctgataagatttttccgtcatttgataaattacacatgagaaatctcccaacaaagcgtcaaggcgcagtaaaggcatctcataggcctacaaacgtcatctaagtgtcacatacagatagataccttctattacag

SEQ ID NO: 4779 - DNA, 375 bp, Muscodor strobelii
  misc_feature: SGI cDNA ID NO. 561295
  misc_feature: Encodes the peptide sequence at SEQ ID NO 4780
atgtatctaccctacgtcaacgaagatggcagcatccccaacggtctccagctcgcggccgacatgatgcccgcgctccagcgtctcgggatacccgtcgagaaccggatttcagtgcagacctactacaagagtctgtcatggaatattctgaacgttgtgcaacatattgctcctacaccagcgatgatggtgactccggagttcgatgtgtcgtgtcctacggaggaacagcttatgtgctttaagcaaatgaaggagccgaaagaattggacatattgaagggcaaaggacatcttgactgggtgtttggagatgttgagagtatcttgagtcggcagttagacttcttgaagcgacatatgaagttttga

SEQ ID NO: 4780 - protein, 124 aa, Muscodor strobelii
  misc_feature: SGI Peptide ID NO. 561295
  misc_feature (1)..(124): NCBI GI: 116194936 Blast Desc: CHGG_04066 [Chaetomium globosum CBS 148.51] gi|88179979|gb|EAQ87447.1| CHGG_04066 [Chaetomium globosum CBS 148.51]
  misc_feature (1)..(124): NCBI GI: 70983277 Blast Desc: DltD N-terminal domain protein [Aspergillus fumigatus Af293] gi|66844791|gb|EAL85128.1| DltD N-terminal domain protein [Aspergillus fumigatus Af293] gi|159124052|gb|EDP49171.1| DltD
  misc_feature (1)..(124): NCBI GI: 119483532 Blast Desc: NFIA_093920 [Neosartorya fischeri NRRL 181] gi|119409825|gb|EAW19772.1| conserved [Neosartorya fischeri NRRL 181]
  misc_feature (2)..(119): NCBI GI: 67541839 Blast Desc: AN7083.2 [Aspergillus nidulans FGSC A4] gi|40742022|gb|EAA61212.1| AN7083.2 [Aspergillus nidulans FGSC A4] gi|259483597|tpe|CBF79117.1| TPA: DltD N-terminal domain FGSC
  misc_feature (19)..(119): NCBI GI: 154315479 Blast Desc: BC1G_04312 [Botryotinia fuckeliana B05.10] gi|150847252|gb|EDN22445.1| BC1G_04312 [Botryotinia fuckeliana B05.10]
  misc_feature (54)..(122): NCBI GI: 169783002 Blast Desc: [Aspergillus oryzae RIB40] gi|83774707|dbj|BAE64830.1| protein product [Aspergillus oryzae]
  misc_feature (34)..(122): NCBI GI: 255944129 Blast Desc: Pc20g02780 [Penicillium chrysogenum Wisconsin 54-1255] gi|211587567|emb|CAP85607.1| Pc20g02780 [Penicillium chrysogenum Wisconsin 54-1255]
  misc_feature (54)..(122): NCBI GI: 238492747 Blast Desc: DltD N-terminal domain protein [Aspergillus flavus NRRL3357] gi|220696104|gb|EED52446.1| DltD N-terminal domain protein [Aspergillus flavus NRRL3357]
  misc_feature (2)..(119): NCBI GI: 255939982 Blast Desc: Pc16g04050 [Penicillium chrysogenum Wisconsin 54-1255] gi|211585383|emb|CAP93075.1| Pc16g04050 [Penicillium chrysogenum Wisconsin 54-1255]
  misc_feature (34)..(122): NCBI GI: 284043499 Blast Desc: peptidase S15 [Conexibacter woesei DSM 14684] gi|283947720|gb|ADB50464.1| peptidase S15 [Conexibacter woesei DSM 14684]
MYLPYVNEDGSIPNGLQLAADMMPALQRLGIPVENRISVQTYYKSLSWNILNVVQHIAPTPAMMVTPEFDVSCPTEEQLMCFKQMKEPKELDILKGKGHLDWVFGDVESILSRQLDFLKRHMKF

SEQ ID NO: 4781 - DNA, 1050 bp, Muscodor strobelii
  misc_feature: SGI cDNA ID NO. 561296
  misc_feature: Encodes the peptide sequence at SEQ ID NO 4782
atgcctagtatgaaggcacttgttggcgctgaagcaggtggctaccgctttgcagatgatatcgatattcctgagccgcaacgaggctcgatgctagtccgtgtccacgcagtcgctctaaacccacgagacgcaaaaattgtcgacttcaacaactcacctggatctctaggcggctgtgattttgccggcattgttgaaaaagtgggagagggagtcacgcggttcaaagagggcgatcgcgtactcgccgtcactttcggctcagatccttttgacaaaacacaaggcgcctttgccgagttcgcgttggcggaggaggatatcagttgtcacattccagaagacttcactttcgaacaggcatgttcaatcgggctctcgttagcaactgccggtctggctctttttcaagcacctgggttgcaattgtctatacacgggggcctgggagagacggtactgatatccggaggagccacagctactggcactatggcaacgcagcttttgaggatggccgggtacactcccattgttacgtgttcgcctggcaataatgtactctgtgaatcttacggggcgggtgcctgcttcgattatcactctgctgcctgcggtgccgacatccgcgtgcacactgataatactctcaagtatgtacttgattgtgtcactgatgcggggacgatgaagacctgctatgaagctattggttcgtcgggtggtagttacatcgcactcgagacgctcaatacgagtgtgaagtatacgcggagagatgttcgtgccgattggttcctagctgattgcattatgggagatggtgttcatatgacgggcacttatggtcgccctccctcgcctgaacacaggcatttcggcaaacaattctttgccatggctgagaactggttgcgagaaggaagtattagacaccatccgctcgatatacaaaagggtggcctagaggacatacctagtatcacggacgacatgaaacttggcaaggtgcatgcgaagaaactcatcatgccactggtaggatga

SEQ ID NO: 4782 - protein, 349 aa, Muscodor strobelii
  misc_feature: SGI Peptide ID NO. 561296
  misc_feature (28)..(113): Pfam Id: PF08240 Pfam Desc: Alcohol dehydrogenase GroES-like domain
  misc_feature (28)..(108): Pfam Id: PF08240 Pfam Desc: Alcohol dehydrogenase GroES-like domain
  misc_feature (150)..(238): Pfam Id: PF00107 Pfam Desc: Zinc-binding dehydrogenase
  misc_feature (3)..(348): NCBI GI: 116194938 Blast Desc: CHGG_04067 [Chaetomium globosum CBS 148.51] gi|88179980|gb|EAQ87448.1| CHGG_04067 [Chaetomium globosum CBS 148.51]
  misc_feature (12)..(344): NCBI GI: 242815622 Blast Desc: alcohol dehydrogenase, [Talaromyces stipitatus ATCC 10500] gi|218714944|gb|EED14367.1| alcohol dehydrogenase, [Talaromyces stipitatus ATCC 10500]
  misc_feature (4)..(349): NCBI GI: 169635734 Blast Desc: oxidoreductase [Botryotinia fuckeliana]
  misc_feature (6)..(344): NCBI GI: 121701579 Blast Desc: zinc-binding dehydrogenase family oxidoreductase, [Aspergillus clavatus NRRL 1] gi|119397197|gb|EAW07628.1| zinc-binding dehydrogenase family oxidoreductase, [Aspergillus 1]
  misc_feature (1)..(344): NCBI GI: 255941842 Blast Desc: Pc16g13920 [Penicillium chrysogenum Wisconsin 54-1255] gi|211586313|emb|CAP94062.1| Pc16g13920 [Penicillium chrysogenum Wisconsin 54-1255]
  misc_feature (23)..(344): NCBI GI: 238498032 Blast Desc: alcohol dehydrogenase, [Aspergillus flavus NRRL3357] gi|220693525|gb|EED49870.1| alcohol dehydrogenase, [Aspergillus flavus NRRL3357]
  misc_feature (3)..(344): NCBI GI: 145248361 Blast Desc: An13g02940 [Aspergillus niger] gi|134081180|emb|CAK41690.1| protein product [Aspergillus niger]
  misc_feature (13)..(345): NCBI GI: 242805070 Blast Desc: alcohol dehydrogenase, [Talaromyces stipitatus ATCC 10500] gi|218717845|gb|EED17266.1| alcohol dehydrogenase, [Talaromyces stipitatus ATCC 10500]
  misc_feature (3)..(349): NCBI GI: 145244248 Blast Desc: An11g06440 [Aspergillus niger] gi|134079313|emb|CAK96942.1| protein product [Aspergillus niger]
  misc_feature (1)..(344): NCBI GI: 145239689 Blast Desc: An08g03740 [Aspergillus niger] gi|134077002|emb|CAK45411.1| protein product [Aspergillus niger]
  misc_feature (16)..(201): SWISSPROT Homolog: EC 1.6.5.5 NADPH:quinone reductase
MPSMKALVGAEAGGYRFADDIDIPEPQRGSMLVRVHAVALNPRDAKIVDFNNSPGSLGGCDFAGIVEKVGEGVTRFKEGDRVLAVTFGSDPFDKTQGAFAEFALAEEDISCHIPEDFTFEQACSIGLSLATAGLALFQAPGLQLSIHGGLGETVLISGGATATGTMATQLLRMAGYTPIVTCSPGNNVLCESYGAGACFDYHSAACGADIRVHTDNTLKYVLDCVTDAGTMKTCYEAIGSSGGSYIALETLNTSVKYTRRDVRADWFLADCIMGDGVHMTGTYGRPPSPEHRHFGKQFFAMAENWLREGSIRHHPLDIQKGGLEDIPSITDDMKLGKVHAKKLIMPLVG

SEQ ID NO: 4783 - DNA, 7596 bp, Muscodor strobelii
  misc_feature: SGI cDNA ID NO. 561297
  misc_feature: Encodes the peptide sequence at SEQ ID NO 4784
atgggaggccagcccatcgcgatagtaggcagtagctgccgcttccctggcggcgccacatctccttctaagctctgggagcttttggaaaaccctcgcgatgttttacaagaaatacccacaagtcgttttagcaccaaagcaatccaccatccaaatagccaacatcacgggagcatgaacgtgaggcacgcatatctactagatgaagacccgagggcttttgatcgtgactttttctcgataaatcctaaggaggccgagagcatggatcctcagcagcgcttacttctcgaaacagtatacgagggcatcgaatccgcaggctattctatgcaacagctccgtggatcatcgactgctgtctttgttggatgtatgagctttgactatcagtttactgcgatacgaggtatcgaaagcttgccgcaatatcatgcgaccggcactgccgcatccatcctagctaaccgcttatcgtacttttacgattggagaggcccatcggtaaccattgacacggcgtgttcatctagtctggttgctgtgcatcaagcggtatctgccttgcgaaacggagagaccacgatggcagtagcagcaggctcgaatctaatcatcgggcctgagcctttcgttagtgaatctaagcttaacatgttatcgcccaacggccggtcgttcatgtgggattccgctgctgatggatatacacgaggagaggggttctcggctatttttctcaagacacttagccaagcaattgcagacggcgaccacatcgaatgcatcattcgcgaaacaggcgtgaattcggatggcaagacgccgggtatcacgatgccgagttctgagtcacaagcgcgacttatcagggacacatatgcccggtgcgggcttgacccaactcttgaatccgatcgacctcaatatttcgaggctcatgggactggcacacctgctggcgacccgatcgaggcacgcgccatacagagtgtctttttccccaatggccaagatggtcagctcatggttggctccatcaagacagtgatagggcataccgaggggaccgcaggtgttgcaggagtactcaaagcatcgttggcagtgcagcacggcaagatcccggcaaatctgcatttcaataacctcaatcccaagatcaagccatattataccaacttacgcatccccaccgagacgatcgagtggccttctacaccagaagggacaacacgccgtgtcagtgtcaatagtttcggctttggtggcactaatgctcatgccatcatcgagagttggggtgagcagatttcctcgtcgaatggccggacgacaaacgggcagaaggtaaatggccatggactcaacggccatgcaacaaatgaacacgcaagaaatgggcttgctaccaacgggcatactactaacgggcatactactaacggtcatgccacaaacgggcacaccacgaatggcagtgccacaaatggacacgcaaccaacggacatggttcaaatggcaatgcaaaaaacgaccacgcactgaacggcgatggcgtcattgacacgacagaaacgcaaaccgctgggcctttcgtcctgtcggctaattcgagtacggctttggcaggaggcgctggagcattagctgcatatcttcgtgcaaatcccgatacggatcttgaccgtctcgcttatacgctattccgaagagcagacttcccattccgagccgcattctctgccacgtcccccgatcagcttgccgataagctcgaggctggcaaggattccctcaagggtagttctcgtactgcaaccattccggaggtcctgccgcctcggatattaggcgtatttactggtcaaggtgcgcaatggccgacaatgggcaaagagctctacgcaacctcagagctgttccgtgaagctattgacaagatgcaagacagtctggacactctcccggagagcgatcgacctgactggaccttggtcgatcagatcaatgcaccagcgaagacttcccgcgttggcgaggctgctatttctcaacccctttgcactgcgctccaagtaggattagtcgatgtcctgcatgctgccggtgtagagctcgccgccgttgttggtcactcttctggcgagattggcgctgcatatgctgcgggataccttaccgctaaagacgcgatccgcgtcgcctattacaggggcgttcactctcacttggcgcaagggccagggggcaagcgtggcaaaatgatggcggtagggatgtccctgagccaagccacagctttgtgcagcgattttgctggggcaattgtagtggctgccagcaattcactaaccagctgcacgctcgcgggaaatgctgaggccatcgaacaagctcaggcgcgtctgaatgagaacggcacgtttgcacgcgtgttgcaggtcgatactgcgtatcactcgcatcacatgaagccatgtggaaatccatatcttgcgtctatgaaacaatgcggcatcaaggtccagaaaggtaacaagaaatgcaagtggtattcaagtgtttggggagcgaatggccgcattcggtcattcgaccaggccgatggcttccttcttgaaggcgagtattgggtggacaacatgacacaagctgttctcttcaatcaggctgtctcgcgagccttgaatgaagaccagtattttgacttcgctttggaagttggaccgcatcccgctctcaagggtcctagttctgagactatcaaatcgctgactggcctctccctcccatactcgggtgttctcaagcgcggtcaaaacgcggcaaagtctcttgccgacgcgttaggcctcttgtggaaagctttcccgtcttcaaggccattaatcacatttggtggaatccgccggcctttctcaggcggcacggctaagaagctcacggtattgaaaggtttaccgggttattcgtgggatcatcccaatctcatctggaaggagtcaagaacggctcgtatatacaggactcagagtcagtcccggcatgagcttctgggacattctgtcacgcatggtgagcgtgctaagcgtgaggtccactggaaacagctcatccgtttgaatgagctgccatggatcgcaggtcaccggatacaaggtgaggttcttttcccagcatctgggtatttgtcgatggcctacgaggctgccgtccgtcttgtggataaccaacagtcactgcgtcttgtcgagctgcatgatatcgatattgcacgtgctatgcgcctcgaagaagactcatccggccttgaggttgtatttacagttcatgtgacaagccagtctgatgattgcattactgctgaggtctcctgctatagcggttcagttgactcagtgcagccactggacgctcctcaggccgggttaacattccatttcactggcggcgtacgcctctggctaggcgagcccagcaaggatgttctacctcgacgggctgagcctctactgccgatggatgatctagacatcgagcagctctattcgagtctgtccaaagaaggcttcaattatgccgaccgtttccaggccaaagggatgcttcggcgtctcaatcgtacagtagtgacggtttcttcgccccctgagggttctaatcttcgatcatccatgcatcccgcgcctgtggataccgctttccaaggtctcttagctggattctcatttccaggagatggtcgtgtcggaagcatatatctacccacacgggttgattcagtcagggtcagcatgatgcattctgggtcgcaagcgtctgttctcacagcggatgcaacagtgacctcaaccggcaaaactaccttaacaggtgacgttgatctctttgatgcggcagatgggcaaacagaagtccagatcaggggagttcatctcactgccgtaggacaacgtcgtgatccttggctttatgcaggcacaacctggaccagagatgcccgatgcggtctggagcctggtctggagaccaagctttcggaacaacagcaaatcttgtacgagcagttaacgcgcacagctcatttctacctgcgacagcttcgtaggaagattttgcctcaagagttgatgctcatgggcaagcatcgcaagcagatgatgacttgggttctggagcatttgctgcccgagatcgatgcagggaaacaccccgaagtcaaacctgagtggaagaatgacacgctccaaatggtccaggaatggcgtgagagtcaaccatcagacaacaacgacatgaacattctccacgcaatgggaaagaaccttgtgagcatcgtccgtggaacaacaccgcctctcaaagttctcactcaggatgggatgcttgatcgtctgtatgtggaagggctcggtgctaaagacggtaatgcagacctcagtgtcctagtcaaacaactcggacaccaacatcccggcatgaaaatcctcgaagttggagctggcacgggaggaactacgcgagctgtcctagatgctctgggaaatcattacagctcttatacatacacagatatctcgactggtttctttgacaatgcgcgcagcattttcaatcatcacatcaacaaatttgtctttaagacactgaatatcgaaaacggcccagcagagcaaggcttcacggaaggctcatacgatatggtggtttcctcgaattgtttgcatgcaacgagaagtcttgatgagaccttgcgccactgtcgccagctcctacggcctggtggacgattagttctgctagagatcaccaaagaccacttgcccacgcagctagtgatgtcaactcttccaggttggttcttaggagtagacgacggacgagtatgggcgcccactgtcggccttgaacgatgggatcagcttctgaaggctaatggattctctggagtcgacgtcagctcgacgccttctttctgttctgttatcatgtccgaagcagtcgatgacacgatacagcttctgcgcgtgccgcttgctgcaactgcagacacggtatcgctgtcaggagatattattatcatcggcgaaggtaacctcgcggtccagactcagaccattctgcagacggccgtcccttcgagatctatcactgtagttgctggactcgaaggaattcaggtacccaagcaagcaactgtcctttgtcttagcgacctagatacgcccgcgttccgtgatatgaaccagaaaagattcagaggcctgcaagacgttatggaaacagctgaatcagtgctatgggtcacgaaaggtgcaaaatcaggcaaggatcccgaagcaaacatcactttaggactctcgagcactatacgcgctgagcgcatggacctcagactccagttccttgatgttgacgatccgttgtctctttcaccatccatgctagcagaaatgctcctccgtcttgcaatcgtggacccatccaagatcgataatatgctctggacccaagagcctgagcttgtgttgaaagacggtgcaacttatataccgagagtgtcatcactggatgacatcaatctccggtctgccgcgaggatccgaaatgtgacgcgaccaaccagcctcacttctaaggatactgctgttgtactgaataagctcaagggtgaactcgagctgcaagtcgttgcccctgatgtcacaaaagacgatggaattcatatccaggtcttggcgtcttctctgcgaaccctgacctttgatgaacatgggccagtgaacttgtgtatagggcgtgatctcgcctcagaggacaaaattctcgctctcatacctattctcagctcccaggtcaaggtttccaaggagcaagtcttacaccgctggcaacgaggcaacacaactgtcgaggaagctacacggctctacaggttcctcaccatggctctggcagagcacctcatcgatgagctggaagtgcctacttggatccatggcgcatcagatagcctcagtgcagctatcgaaattgttgcacgggagcgtaaaattgctgtgttccagacgacatctgacatgaaaagaacttctgctgtcaacttcgttcacccttacgcaaatgagggagacgtgcagactatacgtccgaaaggtctacagagctttgtcaatctagcgcagtcgcagcacagtacattatctacattgatccgtacgacttggccagccgcaactatccttaacaaggacattgagaatctagctactggtttaagtgtcgccaagctgcgcagtctagccgcgaaacttcagagcgacgagcatatcttgctacaagttacagaggttgtgggcatcgaagatgtctcgggagcaaagagcaagggattcggtccttcagccgttgtcgactggaacaccgtagatatcgtcaacgccctgattgctcctctcaagcaccaaggacttttctctccccacaagacatatcttctatgcgggatgaccggagatctaggagtctctgtgtgtttgtggatggtggataacggcgctcggcacgtcgtattgactagtcgaaaccccaacgtgtctcccaatgttcttaagtatatggaacagaagggggcagatgtgagaccaatggccgtcgacatcgtcaacatggactccctacgcgctgcctacgctgagatcaagtctaatatgccacctatcggtggagtcatgaatgcggctatggtgctacgtgatcgccttttccaccacctgccatgggaagacttcaatgccacgttggcaccgaaggtagtcggatccaagaacctcgacgcactattcggtgatgagaagcttgacttctttatctgcttctcatccacgacctctattgtcggcagtattggccagtctgcctacgcagccgcaaatcactatatggcgagcctagttgaacagcggcgacaacggggtctggctggttccgtcattcacattgctattctaacgggctttggatacatcttccgccgcgattctgatcatgctgagacaatctacaaggctattcttccacgcttcgacagacagtcagagacagatctacatgagatgctggcagaggccgttgtatgtgggcgtcccggttcgaacaagaccggagaactcatcactggtatcaggactgtgtttcaaggcgaatggcgtgacgatcctcgcctatcttgttatatcggtcaggaccaaatgcaggatgactccgatcagcaaaaatctgcgggctctgtcagcgtcaaggcacaactcgccgcagctgaagaccccgccgaatgcctgctcatcatggagaactgcttcaagatagcgctagggcagatgctcgagatcgatcctgattccctagacagtaaactacctgttgctagcttgggtattgattctctagtggctattcgcgtccgagagtggttcctaaaggagatgagtgtcgatgtgccggttctcaaggtcatgtctgatagctattcgatgtcgcgcatgtgtgacgatgtgcttgtggactggaggaagaataataagtcatag

SEQ ID NO: 4784 - protein, 2531 aa, Muscodor strobelii
  misc_feature: SGI Peptide ID NO. 561297
  misc_feature (621)..(965): Pfam Id: PF00698 Pfam Desc: Acyl transferase domain
  misc_feature (2165)..(2329): Pfam Id: PF00106 Pfam Desc: short chain dehydrogenase
  misc_feature (4)..(254): Pfam Id: PF00109 Pfam Desc: Beta-ketoacyl synthase, N-terminal domain
  misc_feature (262)..(383): Pfam Id: PF02801 Pfam Desc: Beta-ketoacyl synthase, C-terminal domain
  misc_feature (2166)..(2342): Pfam Id: PF08659 Pfam Desc: KR domain
  misc_feature (1499)..(1602): Pfam Id: PF08241 Pfam Desc: Methyltransferase domain
  misc_feature (1499)..(1600): Pfam Id: PF08242 Pfam Desc: Methyltransferase domain
  misc_feature (687)..(828): Pfam Id: PF00698 Pfam Desc: Acyl transferase domain
  misc_feature (621)..(649): Pfam Id: PF00698 Pfam Desc: Acyl transferase domain
  misc_feature (313)..(383): Pfam Id: PF02801 Pfam Desc: Beta-ketoacyl synthase, C-terminal domain
  misc_feature (262)..(302): Pfam Id: PF02801 Pfam Desc: Beta-ketoacyl synthase, C-terminal domain
  misc_feature (506)..(2520): NCBI GI: 255931693 Blast Desc: Pc12g05590 [Penicillium chrysogenum Wisconsin 54-1255] gi|211582022|emb|CAP80186.1| Pc12g05590 [Penicillium chrysogenum Wisconsin 54-1255]
  misc_feature (526)..(2511): NCBI GI: 47109414 Blast Desc: polyketide synthase/peptide synthetase [Magnaporthe grisea]
  misc_feature (533)..(2508): NCBI GI: 240109583 Blast Desc: polyketide synthase, [Coccidioides posadasii C735 delta SOWgp]
  misc_feature (533)..(2520): NCBI GI: 212536392 Blast Desc: polyketide synthase, [Penicillium marneffei ATCC 18224] gi|210070751|gb|EEA24841.1| polyketide synthase, [Penicillium marneffei ATCC 18224]
  misc_feature (518)..(2518): NCBI GI: 40787395 Blast Desc: polyketide synthase [Cochliobolus heterostrophus]
  misc_feature (533)..(2509): NCBI GI: 121704559 Blast Desc: hybrid NRPS/PKS enzyme, [Aspergillus clavatus NRRL 1] gi|119398688|gb|EAW09117.1| hybrid NRPS/PKS enzyme, [Aspergillus clavatus NRRL 1]
  misc_feature (533)..(2511): NCBI GI: 121701571 Blast Desc: equisetin synthetase, [Aspergillus clavatus NRRL 1] gi|119397193|gb|EAW07624.1| equisetin synthetase, [Aspergillus clavatus NRRL 1]
  misc_feature (532)..(2508): NCBI GI: 169595148 Blast Desc: SNOG_00308 [Phaeosphaeria nodorum SN15] gi|160701027|gb|EAT91803.2| SNOG_00308 [Phaeosphaeria nodorum SN15]
  misc_feature (533)..(2509): NCBI GI: 255938466 Blast Desc: Pc14g00080 [Penicillium chrysogenum Wisconsin 54-1255] gi|211584624|emb|CAP74149.1| Pc14g00080 [Penicillium chrysogenum Wisconsin 54-1255]
  misc_feature (506)..(2508): NCBI GI: 159128289 Blast Desc: hybrid PKS/NRPS enzyme EqiS-like, [Aspergillus fumigatus A1163]
  misc_feature (616)..(1876): SWISSPROT Homolog: EC 2.3.1.161 Lovastatin nonaketide synthase
  misc_feature: Useful for fungicidal and/or biocontrol applications
MGGQPIAIVGSSCRFPGGATSPSKLWELLENPRDVLQEIPTSRFSTKAIHHPNSQHHGSMNVRHAYLLDEDPRAFDRDFFSINPKEAESMDPQQRLLLETVYEGIESAGYSMQQLRGSSTAVFVGCMSFDYQFTAIRGIESLPQYHATGTAASILANRLSYFYDWRGPSVTIDTACSSSLVAVHQAVSALRNGETTMAVAAGSNLIIGPEPFVSESKLNMLSPNGRSFMWDSAADGYTRGEGFSAIFLKTLSQAIADGDHIECIIRETGVNSDGKTPGITMPSSESQARLIRDTYARCGLDPTLESDRPQYFEAHGTGTPAGDPIEARAIQSVFFPNGQDGQLMVGSIKTVIGHTEGTAGVAGVLKASLAVQHGKIPANLHFNNLNPKIKPYYTNLRIPTETIEWPSTPEGTTRRVSVNSFGFGGTNAHAIIESWGEQISSSNGRTTNGQKVNGHGLNGHATNEHARNGLATNGHTTNGHTTNGHATNGHTTNGSATNGHATNGHGSNGNAKNDHALNGDGVIDTTETQTAGPFVLSANSSTALAGGAGALAAYLRANPDTDLDRLAYTLFRRADFPFRAAFSATSPDQLADKLEAGKDSLKGSSRTATIPEVLPPRILGVFTGQGAQWPTMGKELYATSELFREAIDKMQDSLDTLPESDRPDWTLVDQINAPAKTSRVGEAAISQPLCTALQVGLVDVLHAAGVELAAVVGHSSGEIGAAYAAGYLTAKDAIRVAYYRGVHSHLAQGPGGKRGKMMAVGMSLSQATALCSDFAGAIVVAASNSLTSCTLAGNAEAIEQAQARLNENGTFARVLQVDTAYHSHHMKPCGNPYLASMKQCGIKVQKGNKKCKWYSSVWGANGRIRSFDQADGFLLEGEYWVDNMTQAVLFNQAVSRALNEDQYFDFALEVGPHPALKGPSSETIKSLTGLSLPYSGVLKRGQNAAKSLADALGLLWKAFPSSRPLITFGGIRRPFSGGTAKKLTVLKGLPGYSWDHPNLIWKESRTARIYRTQSQSRHELLGHSVTHGERAKREVHWKQLIRLNELPWIAGHRIQGEVLFPASGYLSMAYEAAVRLVDNQQSLRLVELHDIDIARAMRLEEDSSGLEVVFTVHVTSQSDDCITAEVSCYSGSVDSVQPLDAPQAGLTFHFTGGVRLWLGEPSKDVLPRRAEPLLPMDDLDIEQLYSSLSKEGFNYADRFQAKGMLRRLNRTVVTVSSPPEGSNLRSSMHPAPVDTAFQGLLAGFSFPGDGRVGSIYLPTRVDSVRVSMMHSGSQASVLTADATVTSTGKTTLTGDVDLFDAADGQTEVQIRGVHLTAVGQRRDPWLYAGTTWTRDARCGLEPGLETKLSEQQQILYEQLTRTAHFYLRQLRRKILPQELMLMGKHRKQMMTWVLEHLLPEIDAGKHPEVKPEWKNDTLQMVQEWRESQPSDNNDMNILHAMGKNLVSIVRGTTPPLKVLTQDGMLDRLYVEGLGAKDGNADLSVLVKQLGHQHPGMKILEVGAGTGGTTRAVLDALGNHYSSYTYTDISTGFFDNARSIFNHHINKFVFKTLNIENGPAEQGFTEGSYDMVVSSNCLHATRSLDETLRHCRQLLRPGGRLVLLEITKDHLPTQLVMSTLPGWFLGVDDGRVWAPTVGLERWDQLLKANGFSGVDVSSTPSFCSVIMSEAVDDTIQLLRVPLAATADTVSLSGDIIIIGEGNLAVQTQTILQTAVPSRSITVVAGLEGIQVPKQATVLCLSDLDTPAFRDMNQKRFRGLQDVMETAESVLWVTKGAKSGKDPEANITLGLSSTIRAERMDLRLQFLDVDDPLSLSPSMLAEMLLRLAIVDPSKIDNMLWTQEPELVLKDGATYIPRVSSLDDINLRSAARIRNVTRPTSLTSKDTAVVLNKLKGELELQVVAPDVTKDDGIHIQVLASSLRTLTFDEHGPVNLCIGRDLASEDKILALIPILSSQVKVSKEQVLHRWQRGNTTVEEATRLYRFLTMALAEHLIDELEVPTWIHGASDSLSAAIEIVARERKIAVFQTTSDMKRTSAVNFVHPYANEGDVQTIRPKGLQSFVNLAQSQHSTLSTLIRTTWPAATILNKDIENLATGLSVAKLRSLAAKLQSDEHILLQVTEVVGIEDVSGAKSKGFGPSAVVDWNTVDIVNALIAPLKHQGLFSPHKTYLLCGMTGDLGVSVCLWMVDNGARHVVLTSRNPNVSPNVLKYMEQKGADVRPMAVDIVNMDSLRAAYAEIKSNMPPIGGVMNAAMVLRDRLFHHLPWEDFNATLAPKVVGSKNLDALFGDEKLDFFICFSSTTSIVGSIGQSAYAAANHYMASLVEQRRQRGLAGSVIHIAILTGFGYIFRRDSDHAETIYKAILPRFDRQSETDLHEMLAEAVVCGRPGSNKTGELITGIRTVFQGEWRDDPRLSCYIGQDQMQDDSDQQKSAGSVSVKAQLAAAEDPAECLLIMENCFKIALGQMLEIDPDSLDSKLPVASLGIDSLVAIRVREWFLKEMSVDVPVLKVMSDSYSMSRMCDDVLVDWRKNNKS

SEQ ID NO: 4785 - DNA, 1368 bp, Muscodor strobelii
  misc_feature: SGI cDNA ID NO. 561298
  misc_feature: Elevated expression when VOC is produced
  misc_feature: Encodes the peptide sequence at SEQ ID NO 4786
atgacgagcacggatagtgtcgagagaaccagtctctcgcaggagctgccaaaggaccatgaaaagtctgcacagccagatctaagtaccagtggtgactcggagcggatcgccgatgcccctgaagtgcctcccgctgaaaagccagcagcagacgctggtcctcctgatggcggactgactgcgtggctagtcgttcttggaggatggtgttgctccttttccagcccaggctgggtaaatagtgttggtagcttccagcagtattacgaacttggaccgttgaaggattactctagtagcgatatttcatggatcgttgccctccagcttttcttcctcttcgccttaggacctgtcgtgggcataatatacgacaattatggacccagaccacttatcattggtggcagtctgattcatgttataggattgatgctggcctcgctggcgaaagaatactaccagttcatcctgacacagggtgtcgtgtcggccatcggggtcgcatgcatttactcgcctgcaattgcctgtgtcggcacttggtttgccaaaaagcgaggaatagctatgggcatcatggtaacgggctcatcagttggtggtgtgatcttcccgatcatgatcagccgtctcatcgacagtactgggtatccttgggcgattagatctgctgggtttctgatcctcgggttgcagatcgttcctatgatcacagtcaagtcacgagtaaagccagtaccgaagaagatgccggttggtcgcctcgcagcacccttcacggaggtaccgtttgctttgctgcttgtgggcatattcgtgcttacctatggcatcttcataccaattgtctatttggctgtgcaaggctatcaagaggcgcatgcgtcagcccagctgtcgcaatatttggtgtccatcttcaacggcacgagtctattcggtcgtctcttcgctggcttcctcgccgataaaattggaatttggaacgtcttcatcattgcttgtggcctgtcaggactaactgagttggccctctggatacctgccacgacgccatcgatcgcaattggcttcgccgtcatgttcgggtttgtgtctggcgcattcattgggcttgttggcgcgcttccaattctcgtgtcgcctccacctgaaatcggctaccgactaggcgttgtcttcctcgcagttgccattcccgccctgaccgtggcgccaattggtggagccattgtacaaagctcggccaacccatggttgagcgtgaagctctttgccggcatcttgtctctggcaggatcggctatcattttcgggtcgagatttctctacaccgataagaagttcattaagaaattctaa

SEQ ID NO: 4786 - protein, 455 aa, Muscodor strobelii
  misc_feature: SGI Peptide ID NO. 561298
  misc_feature (69)..(407): Pfam Id: PF07690 Pfam Desc: Major Facilitator Superfamily
  misc_feature (69)..(251): Pfam Id: PF07690 Pfam Desc: Major Facilitator Superfamily
  misc_feature (269)..(450): Pfam Id: PF07690 Pfam Desc: Major Facilitator Superfamily
  misc_feature (13)..(455): NCBI GI: 256722227 Blast Desc: NECHADRAFT_86810 [Nectria haematococca mpVI 77-13-4]
  misc_feature (3)..(455): NCBI GI: 115402209 Blast Desc: conserved [Aspergillus terreus NIH2624] gi|114189027|gb|EAU30727.1| conserved [Aspergillus terreus NIH2624]
  misc_feature (6)..(443): NCBI GI: 116194932 Blast Desc: CHGG_04064 [Chaetomium globosum CBS 148.51] gi|88179977|gb|EAQ87445.1| CHGG_04064 [Chaetomium globosum CBS 148.51]
  misc_feature (1)..(443): NCBI GI: 256734938 Blast Desc: NECHADRAFT_103279 [Nectria haematococca mpVI 77-13-4]
  misc_feature (19)..(455): NCBI GI: 169772215 Blast Desc: [Aspergillus oryzae RIB40] gi|83768436|dbj|BAE58575.1| protein product [Aspergillus oryzae]
  misc_feature (16)..(455): NCBI GI: 238485156 Blast Desc: MFS transporter, [Aspergillus flavus NRRL3357] gi|220698695|gb|EED55034.1| MFS transporter, [Aspergillus flavus NRRL3357]
  misc_feature (17)..(450): NCBI GI: 238488379 Blast Desc: monocarboxylate transporter, [Aspergillus flavus NRRL3357] gi|220697815|gb|EED54155.1| monocarboxylate transporter, [Aspergillus flavus NRRL3357]
  misc_feature (10)..(455): NCBI GI: 261353948 Blast Desc: conserved [Verticillium albo-atrum VaMs.102]
  misc_feature (9)..(455): NCBI GI: 145252932 Blast Desc: An16g06770 [Aspergillus niger] gi|134083535|emb|CAK42927.1| protein product [Aspergillus niger]
  misc_feature (15)..(455): NCBI GI: 242807373 Blast Desc: monocarboxylate permease, [Talaromyces stipitatus ATCC 10500] gi|218715568|gb|EED14990.1| monocarboxylate permease, [Talaromyces stipitatus ATCC 10500]
  misc_feature: Useful for introducing or modulating the production of volatile compounds
MTSTDSVERTSLSQELPKDHEKSAQPDLSTSGDSERIADAPEVPPAEKPAADAGPPDGGLTAWLVVLGGWCCSFSSPGWVNSVGSFQQYYELGPLKDYSSSDISWIVALQLFFLFALGPVVGIIYDNYGPRPLIIGGSLIHVIGLMLASLAKEYYQFILTQGVVSAIGVACIYSPAIACVGTWFAKKRGIAMGIMVTGSSVGGVIFPIMISRLIDSTGYPWAIRSAGFLILGLQIVPMITVKSRVKPVPKKMPVGRLAAPFTEVPFALLLVGIFVLTYGIFIPIVYLAVQGYQEAHASAQLSQYLVSIFNGTSLFGRLFAGFLADKIGIWNVFIIACGLSGLTELALWIPATTPSIAIGFAVMFGFVSGAFIGLVGALPILVSPPPEIGYRLGVVFLAVAIPALTVAPIGGAIVQSSANPWLSVKLFAGILSLAGSAIIFGSRFLYTDKKFIKKF

SEQ ID NO: 4787 - DNA, 1816 bp, Muscodor strobelii
  misc_feature: SGI EST ID NO. CUFF.12169.0
  misc_feature: Variant of the nucleotide sequence at SEQ ID NO 4785
attacattccaagacttatacaacctcgataataaagacgaagaagtccattgcgccaactcgtcattgaatgtcgccgtcacgataatttcccttggcttttggagactggtacttgatccattcatgtctcacacccattttgacagatacttcattacctcagtgtcaatccgaccttcatagcaattgtgtgtagcagccggcttgacgcattcctatcatgacgagcacggatagtgtcgagagaaccagtctctcgcaggagctgccaaaggaccatgaaaagtctgcacagccagatctaagtaccagtggtgactcggagcggatcgccgatgcccctgaagtgcctcccgctgaaaagccagcagcagacgctggtcctcctgatggcggactgactgcgtggctagtcgttcttggaggatggtgttgctccttttccagcccaggctgggtaaatagtgttggtagcttccagcagtattacgaacttggaccgttgaaggattactctagtagcgatatttcatggatcgttgccctccagcttttcttcctcttcgccttaggacctgtcgtgggcataatatacgacaattatggacccagaccacttatcattggtggcagtctgattcatgttataggattgatgctggcctcgctggcgaaagaatactaccagttcatcctgacacagggtgtcgtgtcggccatcggggtcgcatgcatttactcgcctgcaattgcctgtgtcggcacttggtttgccaaaaagcgaggaatagctatgggcatcatggtaacgggctcatcagttggtggtgtgatcttcccgatcatgatcagccgtctcatcgacagtactgggtatccttgggcgattagatctgctgggtttctgatcctcgggttgcagatcgttcctatgatcacagtcaagtcacgagtaaagccagtaccgaagaagatgccggttggtcgcctcgcagcacccttcacggaggtaccgtttgctttgctgcttgtgggcatattcgtgcttacctatggcatcttcataccaattgtctatttggctgtgcaaggctatcaagaggcgcatgcgtcagcccagctgtcgcaatatttggtgtccatcttcaacggcacgagtctattcggtcgtctcttcgctggcttcctcgccgataaaattggaatttggaacgtcttcatcattgcttgtggcctgtcaggactaactgagttggccctctggatacctgccacgacgccatcgatcgcaattggcttcgccgtcatgttcgggtttgtgtctggcgcattcattgggcttgttggcgcgcttccaattctcgtgtcgcctccacctgaaatcggctaccgactaggcgttgtcttcctcgcagttgccattcccgccctgaccgtggcgccaattggtggagccattgtacaaagctcggccaacccatggttgagcgtgaagctctttgccggcatcttgtctctggcaggatcggctatcattttcgggtcgagatttctctacaccgataagaagttcattaagaaattctaagcgtgatacgaacatatcgttagggttacggaaaacagattgtttagacaggtcacggatcggcttgcatgaaaaataccccagatgcattgtgttcttcaggtttcacgcgtaattatacgcgtaattattagttgcttgtattcgcaaagatgccttagaccatgagttctataatgtcttattccttagctcccaaatgcgtgcaaagagcgtgcgcatccg

SEQ ID NO: 4788 - DNA, 3594 bp, Muscodor strobelii
  misc_feature: SGI cDNA ID NO. 561299
  misc_feature: Reduced expression when VOC is produced
  misc_feature: Encodes the peptide sequence at SEQ ID NO 4789
atgccaaagcctggtagttcctttgcgcctacgcctacgaacacactcgtcaagcgggatctggcttctcaaccagctcgatccaatgcatactattctgactcacactttgctgtcgccccgttggattcaccgccaccaccaccttctcacaaacgccggaaaatagacaaaagcaacggagccgatgccccacggcccgaagcagtcacaatctcatccgactctcataccactgcaaccattcccccaaaaaggtcaagagcaggttcctccatcacggaatcccagatttcgcaaaccacccgatccgcgaaaaccgagtccgctcctagtggtgtcactgagtaccaggctgtagatcacaatgcaaacccgcgctccaataggaagcgacgacgacgtcaaaattctcaatgctcgggctcagaggagcgcaagaagtttgccaagggtagtagcgaccagtcgaaattagctgaagagatcagcgacgatgacaatgatgtgaatcttattacgaccaataatagaacaaccgacaacgcacagcaacagacaaatgaaaagggtgacctgcgcgaagcaacagaaatatccaaatatttcaaaccggggtccaaaaagttcgaggaagtgattgaccacgtggagaagatggcaaggaagaccacgaaagttgtgaatggtgaccagagcccggacgagctagcgcacagcgccgaggactacagggcaaacattcgttccaaaccgcaaaaaatttatgcccctagtgtatcaaggaatggcgacattacaccaacgcagttcagcaagagagcctctgccgcgaagaccaaaacagtccagcgaccggaaaccgacctggatgttgcaaagtccattctcggtcatcctcttcgtgttgtccgcgggttttgtggccaaggcggatacgacaaagaacattcaagccgagaggagatctttttgttccctcgtgagatcagccacacgctgcacgcagtcgaccacaacggagagatcttgaaacgatactcgtatctgacgctcaatgtcgcgactacaaaaaagatcctctataatccgcataaggaaagccacattattgtagtcaaccaaccccagaacctttctatcagtgccgggcctaaacttgttatcgaactcgcatctcaggattgtgtcaaaaaacttatcgcatggatcgactgtctcaaagaagatcaccacttgaccactcaacactgttctgctgcgcaactcgagaagcagcaagccgagatgatggcccgcgaccactacgagatggtgcgcctagacgaagatgatgttgcccaacctgatgatctcagactcatacaacggaatcatgataatcggatgtcagaacgccatcgcaacgctgagatagcttcatcagcacgtacaaagatgaaagacgcaatggaggccgatcaggatatagataccaccttcgacatgccatcatcgacccagttggtggacccatcctctctcagtcgacgatcaacgcgacagaaaacatctcattcttacttcgctattgaggactctccgggaccgcgggaacccgaaccggaacgctggacctcggtgcatcagggatgggagactatgtggcgcaagtctctcgtctatcctgagaatgggaagaatagagctaccgtcgacaaggatgacatccagaggctcgacgaaggtgaatttctgaatgacaatctcatcgtcttctatctccgatacctacagcaaaggcttgaagaggagcagccggcttgggccaagagaatatatttccacaatacttacttctacgataaactcaaacccgagaaagctagccagggaatcaactatgataaagtcaaaggctggacaaccaaagtagatctttttgagaaagactacattattgttccgatcaatgaatatagtcattggtatgttgcaatcatctgccacgcaccaagactgatcccaggatcggacaataccagcaatgcagcggctgtttcgccacaaacgatcacaattcctgacgagccggaaggggtcaaaggcaattctcgtctttcgacagaagacagctcaaaggaagatgtggtcgagcacttgaaacgtatgtctatcggcagccccaaccaaggaaacagtatgactaagaaagcggcagacacgttgggcgatgctgaaggacagactgaagccgtcgaacagtgtgaaggagcacacgtagtaagtgacgtcgcaaagccagaacccgacatcgatcgcagtgctaccaagaaggattccccacgtcgcaagaaggctggaaaaaggcagagtatcgtccgaaaatatgacccaacacagcctcgcatcatcacgctggactcactcggaggtacgcattcgccaacctgtggtaatctgaagcagtatcttgtggcagagctccaagataagaggaatgtcacgatagacacacccggacctttaggtatgacggccaggggtgtaccggagcaacaaaatcactgtgattgcggattgtttcttctgggttacatccggcaatttctccaggcgccagacgattttgttcgaagactgtgtcagcgtgatgattcgatcacctggaacctgaacccatcaacactccggaatgatatcagagacctgatattcgctcttcaagccaaacagcaacaacgtgaagatgcgcaccaggaaggaaaaaggaagaggaaaactccccaaaagacagatattcaatcgccaattcgcccttctattgagaatcctggcaatgtggttggagaagagataatccaacaagctcatgctaataatgataagcatgcacacttgaacagttcgccatctcaatcaactatattcaaagtaaacgatcacactcccagtgctcgcaagtcagcagatagggaacacgagccagagcacctcagaacgcgaagacataacgccgatcttcagccagtcaggccggctgttgttgacttagaccagaatgttacacgcgtagaaaatcctaggaagcgcttagcggagccaacggtcgaagctcgactggaacgcaaagccctgtcgcctaagagaacgacatcggaaatgagtccacaatctgctatgccaggaacctttccagtctcgcctgtccaaatcggtaaactccgttcacagtcccgtgagtctgaggggagagatctttcaaacaatcttgtcatgcctgtgtcgtccttgccgccctcatcgatatcctctcgtaatggcacgcccttggatcctgtgatcgttgacgcactagataatcgtgctcagcaacgagggcaaccaccaagtcatggtaggaaggagatatacgtggaattgcctccgctaaatcaactccgtgatatcgtgggcaaagctaccggaacggccggaaacgaatcatcgctgaccaaaagtcaccatttccctgatcgagcgctcggcgagaagctgacttctgcaaaactaagtcagatgagaccagatagaaagacacccgcagtcattgacctgtcagacgataaagaatag

SEQ ID NO: 4789 - protein, 1197 aa, Muscodor strobelii
  misc_feature: SGI Peptide ID NO. 561299
  misc_feature (577)..(894): Pfam Id: PF02902 Pfam Desc: Ulp1 protease family, C-terminal catalytic domain
  misc_feature (577)..(861): Pfam Id: PF02902 Pfam Desc: Ulp1 protease family, C-terminal catalytic domain
  misc_feature (368)..(908): NCBI GI: 256731391 Blast Desc: NECHADRAFT_84803 [Nectria haematococca mpVI 77-13-4]
  misc_feature (531)..(930): NCBI GI: 46124847 Blast Desc: FG06801.1 [Gibberella zeae PH-1]
  misc_feature (260)..(920): NCBI GI: 261355617 Blast Desc: sentrin-specific protease [Verticillium albo-atrum VaMs.102]
  misc_feature (510)..(910): NCBI GI: 85099099 Blast Desc: NCU01366 [Neurospora crassa OR74A] gi|7635835|emb|CAB88639.1| related to protease ULP2 protein [Neurospora crassa] gi|28922236|gb|EAA31482.1| [Neurospora crassa
  misc_feature (530)..(899): NCBI GI: 116206332 Blast Desc: CHGG_02459 [Chaetomium globosum CBS 148.51] gi|88183056|gb|EAQ90524.1| CHGG_02459 [Chaetomium globosum CBS 148.51]
  misc_feature (333)..(920): NCBI GI: 145612657 Blast Desc: MGG_07283 [Magnaporthe grisea 70-15] gi|145019787|gb|EDK04015.1| MGG_07283 [Magnaporthe grisea 70-15]
  misc_feature (539)..(901): NCBI GI: 240109509 Blast Desc: cysteine peptidase family protein [Coccidioides posadasii C735 delta SOWgp]
  misc_feature (548)..(905): NCBI GI: 238503117 Blast Desc: Ulp1 protease family protein [Aspergillus flavus NRRL3357] gi|220691602|gb|EED47950.1| Ulp1 protease family protein [Aspergillus flavus NRRL3357]
  misc_feature (539)..(911): NCBI GI: 258571149 Blast Desc: [Uncinocarpus reesii 1704] gi|237904648|gb|EEP79049.1| [Uncinocarpus reesii 1704]
  misc_feature (549)..(913): NCBI GI: 119498913 Blast Desc: Ulp1 protease, [Neosartorya fischeri NRRL 181] gi|119414378|gb|EAW24317.1| Ulp1 protease, [Neosartorya fischeri NRRL 181]
  misc_feature: Useful for introducing or modulating the production of volatile compounds
MPKPGSSFAPTPTNTLVKRDLASQPARSNAYYSDSHFAVAPLDSPPPPPSHKRRKIDKSNGADAPRPEAVTISSDSHTTATIPPKRSRAGSSITESQISQTTRSAKTESAPSGVTEYQAVDHNANPRSNRKRRRRQNSQCSGSEERKKFAKGSSDQSKLAEEISDDDNDVNLITTNNRTTDNAQQQTNEKGDLREATEISKYFKPGSKKFEEVIDHVEKMARKTTKVVNGDQSPDELAHSAEDYRANIRSKPQKIYAPSVSRNGDITPTQFSKRASAAKTKTVQRPETDLDVAKSILGHPLRVVRGFCGQGGYDKEHSSREEIFLFPREISHTLHAVDHNGEILKRYSYLTLNVATTKKILYNPHKESHIIVVNQPQNLSISAGPKLVIELASQDCVKKLIAWIDCLKEDHHLTTQHCSAAQLEKQQAEMMARDHYEMVRLDEDDVAQPDDLRLIQRNHDNRMSERHRNAEIASSARTKMKDAMEADQDIDTTFDMPSSTQLVDPSSLSRRSTRQKTSHSYFAIEDSPGPREPEPERWTSVHQGWETMWRKSLVYPENGKNRATVDKDDIQRLDEGEFLNDNLIVFYLRYLQQRLEEEQPAWAKRIYFHNTYFYDKLKPEKASQGINYDKVKGWTTKVDLFEKDYIIVPINEYSHWYVAIICHAPRLIPGSDNTSNAAAVSPQTITIPDEPEGVKGNSRLSTEDSSKEDVVEHLKRMSIGSPNQGNSMTKKAADTLGDAEGQTEAVEQCEGAHVVSDVAKPEPDIDRSATKKDSPRRKKAGKRQSIVRKYDPTQPRIITLDSLGGTHSPTCGNLKQYLVAELQDKRNVTIDTPGPLGMTARGVPEQQNHCDCGLFLLGYIRQFLQAPDDFVRRLCQRDDSITWNLNPSTLRNDIRDLIFALQAKQQQREDAHQEGKRKRKTPQKTDIQSPIRPSIENPGNVVGEEIIQQAHANNDKHAHLNSSPSQSTIFKVNDHTPSARKSADREHEPEHLRTRRHNADLQPVRPAVVDLDQNVTRVENPRKRLAEPTVEARLERKALSPKRTTSEMSPQSAMPGTFPVSPVQIGKLRSQSRESEGRDLSNNLVMPVSSLPPSSISSRNGTPLDPVIVDALDNRAQQRGQPPSHGRKEIYVELPPLNQLRDIVGKATGTAGNESSLTKSHHFPDRALGEKLTSAKLSQMRPDRKTPAVIDLSDDKE

SEQ ID NO: 4790 - DNA, 4615 bp, Muscodor strobelii
  misc_feature: SGI EST ID NO. CUFF.12283.0
  misc_feature: Variant of the nucleotide sequence at SEQ ID NO 4788
cgggaatgcaagcgaacagggtcgctcttgctgggccatcccaggccctggtcgatgacaacctcaggcccacctgcttctggaaaagatccattcttgattcaagctggtcttgtcccgtctttctgcagcgccgattcacgcacgcatcacctctgcattctttttgtttttgcgcctcaacaaacattctaatcaggcagcacagactctcccacttcaaacaagtcactgggcatccaactcattggttgtcacgtatgcgcctaactgttcccatcgccttgagagcacgagcacgacgagtgcaacccgcacataccgacccccgccatagctgcacccgcttcccagcgcaacaaccaccacatccgcaaaccaactcacctctcatgccctccttcaagcgcagctgaaaagacagtcaactcctgcagcagaccagctacaccctcaagcgtcagcatgtctactggttggcttggtctgcctgtaccacgcttgaatatcttcaacatattcactcccggtcccggtacttgacctcagccttccctctcgtctcctcaggccggctctccgagcttgccgtgtagtggcagcgagatgccaaagcctggtagttcctttgcgcctacgcctacgaacacactcgtcaagcgggatctggcttctcaaccagctcgatccaatgcatactattctgactcacactttgctgtcgccccgttggattcaccgccaccaccaccttctcacaaacgccggaaaatagacaaaagcaacggagccgatgccccacggcccgaagcagtcacaatctcatccgactctcataccactgcaaccattcccccaaaaaggtcaagagcaggttcctccatcacggaatcccagatttcgcaaaccacccgatccgcgaaaaccgagtccgctcctagtggtgtcactgagtaccaggctgtagatcacaatgcaaacccgcgctccaataggaagcgacgacgacgtcaaaattctcaatgctcgggctcagaggagcgcaagaagtttgccaagggtagtagcgaccagtcgaaattagctgaagagatcagcgacgatgacaatgatgtgaatcttattacgaccaataatagaacaaccgacaacgcacagcaacagacaaatgaaaagggtgacctgcgcgaagcaacagaaatatccaaatatttcaaaccggggtccaaaaagttcgaggaagtgattgaccacgtggagaagatggcaaggaagaccacgaaagttgtgaatggtgaccagagcccggacgagctagcgcacagcgccgaggactacagggcaaacattcgttccaaaccgcaaaaaatttatgcccctagtgtatcaaggaatggcgacattacaccaacgcagttcagcaagagagcctctgccgcgaagaccaaaacagtccagcgaccggaaaccgacctggatgttgcaaagtccattctcggtcatcctcttcgtgttgtccgcgggttttgtggccaaggcggatacgacaaagaacattcaagccgagaggagatctttttgttccctcgtgagatcagccacacgctgcacgcagtcgaccacaacggagagatcttgaaacgatactcgtatctgacgctcaatgtcgcgactacaaaaaagatcctctataatccgcataaggaaagccacattattgtagtcaaccaaccccagaacctttctatcagtgccgggcctaaacttgttatcgaactcgcatctcaggattgtgtcaaaaaacttatcgcatggatcgactgtctcaaagaagatcaccacttgaccactcaacactgttctgctgcgcaactcgagaagcagcaagccgagatgatggcccgcgaccactacgagatggtgcgcctagacgaagatgatgttgcccaacctgatgatctcagactcatacaacggaatcatgataatcggatgtcagaacgccatcgcaacgctgagatagcttcatcagcacgtacaaagatgaaagacgcaatggaggccgatcaggatatagataccaccttcgacatgccatcatcgacccagttggtggacccatcctctctcagtcgacgatcaacgcgacagaaaacatctcattcttacttcgctattgaggactctccgggaccgcgggaacccgaaccggaacgctggacctcggtgcatcagggatgggagactatgtggcgcaagtctctcgtctatcctgagaatgggaagaatagagctaccgtcgacaaggatgacatccagaggctcgacgaaggtgaatttctgaatgacaatctcatcgtcttctatctccgatacctacagcaaaggcttgaagaggagcagccggcttgggccaagagaatatatttccacaatacttacttctacgataaactcaaacccgagaaagctagccagggaatcaactatgataaagtcaaaggctggacaaccaaagtagatctttttgagaaagactacattattgttccgatcaatgaatatagtcattggtatgttgcaatcatctgccacgcaccaagactgatcccaggatcggacaataccagcaatgcagcggctgtttcgccacaaacgatcacaattcctgacgagccggaaggggtcaaaggcaattctcgtctttcgacagaagacagctcaaaggaagatgtggtcgagcacttgaaacgtatgtctatcggcagccccaaccaaggaaacagtatgactaagaaagcggcagacacgttgggcgatgctgaaggacagactgaagccgtcgaacagtgtgaaggagcacacgtagtaagtgacgtcgcaaagccagaacccgacatcgatcgcagtgctaccaagaaggattccccacgtcgcaagaaggctggaaaaaggcagagtatcgtccgaaaatatgacccaacacagcctcgcatcatcacgctggactcactcggaggtacgcattcgccaacctgtggtaatctgaagcagtatcttgtggcagagctccaagataagaggaatgtcacgatagacacacccggacctttaggtatgacggccaggggtgtaccggagcaacaaaatcactgtgattgcggattgtttcttctgggttacatccggcaatttctccaggcgccagacgattttgttcgaagactgtgtcagcgtgatgattcgatcacctggaacctgaacccatcaacactccggaatgatatcagagacctgatattcgctcttcaagccaaacagcaacaacgtgaagatgcgcaccaggaaggaaaaaggaagaggaaaactccccaaaagacagatattcaatcgccaattcgcccttctattgagaatcctggcaatgtggttggagaagagataatccaacaagctcatgctaataatgataagcatgcacacttgaacagttcgccatctcaatcaactatattcaaagtaaacgatcacactcccagtgctcgcaagtcagcagatagggaacacgagccagagcacctcagaacgcgaagacataacgccgatcttcagccagtcaggccggctgttgttgacttagaccagaatgttacacgcgtagaaaatcctaggaagcgcttagcggagccaacggtcgaagctcgactggaacgcaaagccctgtcgcctaagagaacgacatcggaaatgagtccacaatctgctatgccaggaacctttccagtctcgcctgtccaaatcggtaaactccgttcacagtcccgtgagtctgaggggagagatctttcaaacaatcttgtcatgcctgtgtcgtccttgccgccctcatcgatatcctctcgtaatggcacgcccttggatcctgtgatcgttgacgcactagataatcgtgctcagcaacgagggcaaccaccaagtcatggtaggaaggagatatacgtggaattgcctccgctaaatcaactccgtgatatcgtgggcaaagctaccggaacggccggaaacgaatcatcgctgaccaaaagtcaccatttccctgatcgagcgctcggcgagaagctgacttctgcaaaactaagtcagatgagaccagatagaaagacacccgcagtcattgacctgtcagacgataaagaatagttcgagattattacgaatcgtatgttttcaattgttatttgcattgtaccaggcgtctgcatggaacggagtctacgattcggacaattcgcctgtccgttgcttttttgcttcagctgtatacccctggtaggaaaagacacagcagaagacttgctaagactcgtatgtctaataaatgtgcaattactgggttgtcggtcttggagggtaggttgactggcgctcgctcagggcatgcctagtctagaatgtgagggtgggcctaaccaatctgaacgctgtacatatctgcgattagagagatgtgggaagaagagatggcactttgaactttagtagtaaatgaaagtggatgacagcacgtgattttggggagacttgctccatcatgattgaagggactgttgcgccg

SEQ ID NO: 4791 - DNA, 2949 bp, Muscodor strobelii
  misc_feature: SGI cDNA ID NO. 561300
  misc_feature: Reduced expression when VOC is produced
  misc_feature: Encodes the peptide sequence at SEQ ID NO 4792
atgcgctacgcgcgtttctttccggtgttgctctcattgagcacgctggcgggagcagatccgacatggccgtcctcgatcgacgaaatagaagagatcatgtaccaagtatcgggataccgcgcgaggcagtttggaggaactgtcataccttgctcaaacgaagcctccgggaaggggcgccacaatgccgctgaatgggtgcgaacggcttttcacgatatggcaactacatatatatcagatgggcctcgaaaaggtggcttagatggatctatacaatatgaactcttgagttcagacaatattggtcccggattcaacacaacgctccaattcatggccgattattatacaagtcgatcgagcgtagccgatctaatcgccctgggcttatactacgccgtgcgatcttgcggtggtccagttgttcccatcgctgctggtagagtcgatgccaaagccgctgggccgattggtgttccattaccccagaactcagctttcactttcacacagcaattcgtgcgtatgggcttcaccacggaagaaatgattcaagtaacagcttgcggccacagcctcggcggtgttcacgaaaccgaattcccggaaatagtgcccgtcggcagcacggacgatggcgaagctggaatggattcgaccgaagcgattttcgacaataaggttgtgaccgagtacatcgccggcaacacgacgaaccccttagtcgtgggaccttcgatcaaggcgacgagaaattccgatttcaaagtcttcaacatcgatcagaacgcgacaatcaaggcgatggctcctgctgtgaccttcaacaatgtctgtgctactgtgttgcgcaagatgatcgaagttgtgcccgacggtgttgttttgacggatcctgttcagccttacgaagtcaagccagttgatatgcagctcactttaaacaatggagcgagaaccatgcagctttcgggtttgattcgtgttcgctctactgattttgctggagacactgcttcgactgtcacatttacttataagaaccgaaatggtggcgatgattgcggttccgggggttgcaattttgaagctgatctcctaggcgccactcagggcttcgatgacactttcgtttggtttccgatccaattcaacattccaacagctaccggcatttcatccttcaccttgaaggtcaatatggctagcgcaacgtcaaaaacttacaataacaatgggaactcatacccgatgcaagatggtatcctcttgcaaaagccacagagctgtttgatcggaggcaagatgactgtcaccgcagctgtccgcaacgatctgaattctgagtccgtcagtctatatgtgtctaaaaagacacccaccggaaacgccaacatgccgattccagtgttaagcgatgatactgttgaaatggaacagggagactgtgttggggcctataccttctatactgcaagctacgatggtcttggtgatctcgactacgctactaaattcgatgtaattagcgggaatggtactacggcctcgcgagatgacttcaacgctgctagtagcttaggaggaacctgcatggaattcactccgcctgtggcgtctgcttgcacaaccggtgctgtgtcttctatcaccccggctcccacgtcgacgacgcctcctgctggaacaacgacggacagcgtccctactgcagccgctacgccctttcatcgcgagactcttggcaattacacccttgtaggttgccagacggagtcagctccgcgggctttgtctggtgcctctttcgtctacgatggcatgactcttgagagttgtatgaagaactgcactggttattactactggggaacggagtatggacgagagtgctactgtggcaattccattggctccgctagcaagaacgtgacgcttgatgactgtactatgacttgctcgggcgatgatagcgagtactgtggtgcaggaaacagaatcgagatgtatgtcacaactggaacgattcctacgcctaccggtactctcgctatcaagcccactgtcggagcgtatgtgtatgccggttgttacgaagaacttcctacgcgtgctctgaagggtggtcctcatccggatgataagatgaccctggaattgtgcgctgaaagctgcggcggctttaactactggggaaccgagtacggtcgcgaatgctattgcggcaactctattgatccgcagagtaacaaaaccgaggaggcagactgcggcatggtctgcgccggtgacgcaactgagtactgcggtggcagcaacagaatcgagatgtacaaactccccgtgatcgccacacccacaaccacgccaacacctaccatcacgcctacgaatgcgcccacggtctcaagctacgcattccaaggctgctggacagaaggcgacggtgtacgcgccctcggcgcttctagcaaagcctcagacgatatgacattggaggcttgtgcggatttctgctcagatttccactacttcggtacagagttcggtcgggaatgctactgtggcgatgtaccctcttcgtcatctaaccagacggagcttagcgactgctccatgccctgttccggcgacacgacggaatactgcggagccagcaacagacttaatatttactactcgaataccaccaatggtccctctcaaccgctcacggtgggcgattatacatggtacggctgtcagactgagggggctggtactattagggcgttgtctggcgctatttacgtgaataataccttgacattggaaagttgcgctgagttttgcgagggctatacttactttggtgctgagtatgctgatgagtgttattgtggaaataagtttggaaatggatcggtggaggctgctttgactgagttaccagtcgaggagtag

SEQ ID NO: 4792 - protein, 982 aa, Muscodor strobelii
  misc_feature: SGI Peptide ID NO. 561300
  misc_feature (809)..(887): Pfam Id: PF01822 Pfam Desc: WSC domain
  misc_feature (696)..(773): Pfam Id: PF01822 Pfam Desc: WSC domain
  misc_feature (588)..(665): Pfam Id: PF01822 Pfam Desc: WSC domain
  misc_feature (913)..(982): Pfam Id: PF01822 Pfam Desc: WSC domain
  misc_feature (913)..(973): Pfam Id: PF01822 Pfam Desc: WSC domain
  misc_feature (19)..(977): NCBI GI: 171693641 Blast Desc: protein product [Podospora anserina] gi|170946769|emb|CAP73573.1| protein product [Podospora anserina]
  misc_feature (4)..(977): NCBI GI: 116206450 Blast Desc: CHGG_02518 [Chaetomium globosum CBS 148.51] gi|88183115|gb|EAQ90583.1| CHGG_02518 [Chaetomium globosum CBS 148.51]
  misc_feature (20)..(781): NCBI GI: 39946160 Blast Desc: MGG_08200 [Magnaporthe grisea 70-15] gi|145019459|gb|EDK03687.1| MGG_08200 [Magnaporthe grisea 70-15]
  misc_feature (19)..(741): NCBI GI: 261355684 Blast Desc: L-ascorbate peroxidase [Verticillium albo-atrum VaMs.102]
  misc_feature (1)..(546): NCBI GI: 164426791 Blast Desc: NCU03646 [Neurospora crassa OR74A] gi|16944470|emb|CAC18170.2| related to beta-1, 3 exoglucanase precursor [Neurospora crassa] gi|157071479|gb|EAA32137.2| crassa
  misc_feature (19)..(780): NCBI GI: 238846204 Blast Desc: MCYG_08685 [Microsporum canis CBS 113480]
  misc_feature (1)..(784): NCBI GI: 240107544 Blast Desc: WSC domain containing protein [Coccidioides posadasii C735 delta SOWgp]
  misc_feature (1)..(784): NCBI GI: 119177896 Blast Desc: CIMG_07842 [Coccidioides immitis RS]
  misc_feature (19)..(780): NCBI GI: 258576935 Blast Desc: [Uncinocarpus reesii 1704] gi|237902915|gb|EEP77316.1| [Uncinocarpus reesii 1704]
  misc_feature (21)..(806): NCBI GI: 242773234 Blast Desc: conserved [Talaromyces stipitatus ATCC 10500] gi|218721818|gb|EED21236.1| conserved [Talaromyces stipitatus ATCC 10500]
  misc_feature: Useful for introducing or modulating the production of volatile compounds
MRYARFFPVLLSLSTLAGADPTWPSSIDEIEEIMYQVSGYRARQFGGTVIPCSNEASGKGRHNAAEWVRTAFHDMATTYISDGPRKGGLDGSIQYELLSSDNIGPGFNTTLQFMADYYTSRSSVADLIALGLYYAVRSCGGPVVPIAAGRVDAKAAGPIGVPLPQNSAFTFTQQFVRMGFTTEEMIQVTACGHSLGGVHETEFPEIVPVGSTDDGEAGMDSTEAIFDNKVVTEYIAGNTTNPLVVGPSIKATRNSDFKVFNIDQNATIKAMAPAVTFNNVCATVLRKMIEVVPDGVVLTDPVQPYEVKPVDMQLTLNNGARTMQLSGLIRVRSTDFAGDTASTVTFTYKNRNGGDDCGSGGCNFEADLLGATQGFDDTFVWFPIQFNIPTATGISSFTLKVNMASATSKTYNNNGNSYPMQDGILLQKPQSCLIGGKMTVTAAVRNDLNSESVSLYVSKKTPTGNANMPIPVLSDDTVEMEQGDCVGAYTFYTASYDGLGDLDYATKFDVISGNGTTASRDDFNAASSLGGTCMEFTPPVASACTTGAVSSITPAPTSTTPPAGTTTDSVPTAAATPFHRETLGNYTLVGCQTESAPRALSGASFVYDGMTLESCMKNCTGYYYWGTEYGRECYCGNSIGSASKNVTLDDCTMTCSGDDSEYCGAGNRIEMYVTTGTIPTPTGTLAIKPTVGAYVYAGCYEELPTRALKGGPHPDDKMTLELCAESCGGFNYWGTEYGRECYCGNSIDPQSNKTEEADCGMVCAGDATEYCGGSNRIEMYKLPVIATPTTTPTPTITPTNAPTVSSYAFQGCWTEGDGVRALGASSKASDDMTLEACADFCSDFHYFGTEFGRECYCGDVPSSSSNQTELSDCSMPCSGDTTEYCGASNRLNIYYSNTTNGPSQPLTVGDYTWYGCQTEGAGTIRALSGAIYVNNTLTLESCAEFCEGYTYFGAEYADECYCGNKFGNGSVEAALTELPVEE

SEQ ID NO: 4793 - DNA, 3375 bp, Muscodor strobelii
  misc_feature: SGI EST ID NO. CUFF.12188.0
  misc_feature: Variant of the nucleotide sequence at SEQ ID NO 4791
cttgctttttgccatctcgctagatagacttgtcaaatgacacagacggcaatagagtctagtcgtcttaattctttcagttaatatatactaatagctaatactgacaagacttgccccaacctgggtaatccttcgccatgcgctacgcgcgtttctttccggtgttgctctcattgagcacgctggcgggagcagatccgacatggccgtcctcgatcgacgaaatagaagagatcatgtaccaagtatcgggataccgcgcgaggcagtttggaggaactgtcataccttgctcaaacgaagcctccgggaaggggcgccacaatgccgctgaatgggtgcgaacggcttttcacgatatggcaactacatatatatcagatgggcctcgaaaaggtggcttagatggatctatacaatatgaactcttgagttcagacaatattggtcccggattcaacacaacgctccaattcatggccgattattatacaagtcgatcgagcgtagccgatctaatcgccctgggcttatactacgccgtgcgatcttgcggtggtccagttgttcccatcgctgctggtagagtcgatgccaaagccgctgggccgattggtgttccattaccccagaactcagctttcactttcacacagcaattcgtgcgtatgggcttcaccacggaagaaatgattcaagtaacagcttgcggccacagcctcggcggtgttcacgaaaccgaattcccggaaatagtgcccgtcggcagcacggacgatggcgaagctggaatggattcgaccgaagcgattttcgacaataaggttgtgaccgagtacatcgccggcaacacgacgaaccccttagtcgtgggaccttcgatcaaggcgacgagaaattccgatttcaaagtcttcaacatcgatcagaacgcgacaatcaaggcgatggctcctgctgtgaccttcaacaatgtctgtgctactgtgttgcgcaagatgatcgaagttgtgcccgacggtgttgttttgacggatcctgttcagccttacgaagtcaagccagttgatatgcagctcactttaaacaatggagcgagaaccatgcagctttcgggtttgattcgtgttcgctctactgattttgctggagacactgcttcgactgtcacatttacttataagaaccgaaatggtggcgatgattgcggttccgggggttgcaattttgaagctgatctcctaggcgccactcagggcttcgatgacactttcgtttggtttccgatccaattcaacattccaacagctaccggcatttcatccttcaccttgaaggtcaatatggctagcgcaacgtcaaaaacttacaataacaatgggaactcatacccgatgcaagatggtatcctcttgcaaaagccacagagctgtttgatcggaggcaagatgactgtcaccgcagctgtccgcaacgatctgaattctgagtccgtcagtctatatgtgtctaaaaagacacccaccggaaacgccaacatgccgattccagtgttaagcgatgatactgttgaaatggaacagggagactgtgttggggcctataccttctatactgcaagctacgatggtcttggtgatctcgactacgctactaaattcgatgtaattagcgggaatggtactacggcctcgcgagatgacttcaacgctgctagtagcttaggaggaacctgcatggaattcactccgcctgtggcgtctgcttgcacaaccggtgctgtgtcttctatcaccccggctcccacgtcgacgacgcctcctgctggaacaacgacggacagcgtccctactgcagccgctacgccctttcatcgcgagactcttggcaattacacccttgtaggttgccagacggagtcagctccgcgggctttgtctggtgcctctttcgtctacgatggcatgactcttgagagttgtatgaagaactgcactggttattactactggggaacggagtatggacgagagtgctactgtggcaattccattggctccgctagcaagaacgtgacgcttgatgactgtactatgacttgctcgggcgatgatagcgagtactgtggtgcaggaaacagaatcgagatgtatgtcacaactggaacgattcctacgcctaccggtactctcgctatcaagcccactgtcggagcgtatgtgtatgccggttgttacgaagaacttcctacgcgtgctctgaagggtggtcctcatccggatgataagatgaccctggaattgtgcgctgaaagctgcggcggctttaactactggggaaccgagtacggtcgcgaatgctattgcggcaactctattgatccgcagagtaacaaaaccgaggaggcagactgcggcatggtctgcgccggtgacgcaactgagtactgcggtggcagcaacagaatcgagatgtacaaactccccgtgatcgccacacccacaaccacgccaacacctaccatcacgcctacgaatgcgcccacggtctcaagctacgcattccaaggctgctggacagaaggcgacggtgtacgcgccctcggcgcttctagcaaagcctcagacgatatgacattggaggcttgtgcggatttctgctcagatttccactacttcggtacagagttcggtcgggaatgctactgtggcgatgtaccctcttcgtcatctaaccagacggagcttagcgactgctccatgccctgttccggcgacacgacggaatactgcggagccagcaacagacttaatatttactactcgaataccaccaatggtccctctcaaccgctcacggtgggcgattatacatggtacggctgtcagactgagggggctggtactattagggcgttgtctggcgctatttacgtgaataataccttgacattggaaagttgcgctgagttttgcgagggctatacttactttggtgctgagtatgctgatgagtgttattgtggaaataagtttggaaatggatcggtggaggctgctgtaagtggttgcaggatgacttgtgctgggaataataaggagttttgtggtgggaatgatagacttagtgtttatcagttgactgagttaccagtcgaggagtagaggaagagtggacggtgaggacatcagggaagagaatcgcttggggtttaatgtgttatgagaatggttatgagacaggcgttattgcaccttgggaatggtattgggttatctgcatgttgtcttctgggtatctgtcgtttgcactgggttacctagacacacatagattttatgcacctgaagaatgatgatgctctggtcaaag

SEQ ID NO: 4794 - DNA, 351 bp, Muscodor strobelii
  misc_feature: SGI cDNA ID NO. 561301
  misc_feature: Encodes the peptide sequence at SEQ ID NO 4795
atgtccatcgagaacctgaaagccttcgatcctttcgccgatgctgaagccggcgaggacacccagcaggttaagagcaagcaagaggattatgtccatatccgtattcaacaacgcaatggccgcaagaccttgactacggtgcagggcttgccctctaagttcgaccgcaagaagattctcaccgtcatcaagaagaagtttgcttgcaatggcactgtcgtgatggacaccaacatgggcgaagttattcagctccagggcgaccagcgcaaagtcatgcaggaatttctcgtcgccaaagacggacttgagcttgacgcgaagaagatcaaagtgcatggattttaa

SEQ ID NO: 4795 - protein, 116 aa, Muscodor strobelii
  misc_feature: SGI Peptide ID NO. 561301
  misc_feature (26)..(107): Pfam Id: PF01253 Pfam Desc: Translation initiation factor SUI1
  misc_feature (1)..(116): NCBI GI: 145615898 Blast Desc: translation initiation factor SUI1 [Magnaporthe grisea 70-15] gi|145009684|gb|EDJ94340.1| translation initiation factor SUI1 [Magnaporthe grisea 70-15]
  misc_feature (1)..(116): NCBI GI: 240275161 Blast Desc: anaphase-promoting complex subunit Apc5 [Ajellomyces capsulatus H143]
  misc_feature (1)..(116): NCBI GI: 189202654 Blast Desc: protein translation factor SUI1 [Pyrenophora tritici-repentis Pt-1C-BFP] gi|187984762|gb|EDU50250.1| protein translation factor SUI1 [Pyrenophora tritici-repentis Pt-1C-BFP]
  misc_feature (3)..(116): NCBI GI: 171676077 Blast Desc: protein product [Podospora anserina] gi|170936104|emb|CAP60764.1| protein product [Podospora anserina]
  misc_feature (1)..(116): NCBI GI: 238845600 Blast Desc: translation factor SUI1 [Microsporum canis CBS 113480]
  misc_feature (1)..(116): NCBI GI: 212544780 Blast Desc: translation initiation factor SUI1, [Penicillium marneffei ATCC 18224] gi|242813457|ref|XP_002486171.1| translation initiation factor SUI1, [Talaromyces stipitatus ATCC
  misc_feature (1)..(116): NCBI GI: 121704762 Blast Desc: translation initiation factor SUI1, [Aspergillus clavatus NRRL 1] gi|145245399|ref|XP_001394967.1| An11g10090 [Aspergillus niger] gi|119398790|gb|EAW09218.1| translation SUI1,
  misc_feature (1)..(116): NCBI GI: 164429603 Blast Desc: protein translation factor sui1 [Neurospora crassa OR74A] gi|38567073|emb|CAE76370.1| translation initiation factor SUI1 [Neurospora crassa] gi|157073546|gb|EAA35109.2| protein sui1
  misc_feature (1)..(116): NCBI GI: 115402627 Blast Desc: ATEG_08804 [Aspergillus terreus NIH2624] gi|169780044|ref|XP_001824486.1| [Aspergillus oryzae RIB40] gi|238505914|ref|XP_002384159.1| translation initiation factor
  misc_feature (1)..(116): NCBI GI: 154286674 Blast Desc: conserved [Ajellomyces capsulatus NAm1] gi|261193621|ref|XP_002623216.1| translation initiation factor SUI1 [Ajellomyces dermatitidis SLH14081] conserved [Ajellomyces 3
MSIENLKAFDPFADAEAGEDTQQVKSKQEDYVHIRIQQRNGRKTLTTVQGLPSKFDRKKILTVIKKKFACNGTVVMDTNMGEVIQLQGDQRKVMQEFLVAKDGLELDAKKIKVHGF

SEQ ID NO: 4796 - DNA, 673 bp, Muscodor strobelii
  misc_feature: SGI EST ID NO. CUFF.12246.1
  misc_feature: Variant of the nucleotide sequence at SEQ ID NO 4794
cctccctccattctctggatcatcaacagcaacataacacacgctatcattcatcggaattgacaagtactcacactaccaagtctatttcaacactcataaaaaactcttttggccccaaacctttcgaatgtccatcgagaacctgaaagccttcgatcctttcgccgatgctgaagccggcgaggacacccagcaggttaagagcaagcaagaggattatgtccatatccgtattcaacaacgcaatggccgcaagaccttgactacggtgcagggcttgccctctaagttcgaccgcaagaagattctcaccgtcatcaagaagaagtttgcttgcaatggcactgtcgtgatggacaccaacatgggcgaagttattcagctccagggcgaccagcgcaaagtcatgcaggaatttctcgtcgccaaagacggacttgagcttgacgcgaagaagatcaaagtgcatggattttaaatgcactgctatctaacctgtccgctcccatatcgagagtgaaagttcaaagcatgagcacatcagctttgctccccagggaacttttatggtatcattagtgacgcacatcagtcatgtgccggaagtcgatgaccaaggcagataatatcgctgcccaaaaatatataaattgcattctgcaagccagtt

SEQ ID NO: 4797 - DNA, 1080 bp, Muscodor strobelii
  misc_feature: SGI cDNA ID NO. 561302
  misc_feature: Reduced expression when VOC is produced
  misc_feature: Encodes the peptide sequence at SEQ ID NO 4798
atggcactccctcgggagccacccacccccatccccgccgtcttcgcgtcgcccatccgccccgacatcgtccagcaagtccacaccggcatggccaagaacaagcgccagccctacgccgtgagcgagaaggccggccatcagacctctgccgaatcctggggaactggtcgcgctgtcgcccgtatccctcgtgtctctggtggcggtactcaccgcgccggtcaggctgccttcggtaacatgtgtcgttccggtcgcatgttcgccccaaccaagatctggcgcaagtggcacatcaagatcaaccagggccagaagcgattcgctaccgcctccgccttggctgcttccgctgttgcccctctcctcctcgcccgtggccaccagatctccaacgtctccgaggttcctctcgtcatcgactccgccgtcttcgagggtgccgctgccgccaagacctcggccgctttcgccatcctgaaggctgccggtgcctccgctgacatcgccaaggctaaggcttctaagaagctccgtgccggtaagggtaagatgcgtggccgtcgtcaccgccagcgtcgtggccctctggtcatctacgaccccgaggtcgatggtaaggagctcgtcaagggtacccgcaaccttcccggtgtcgagacctgcgacgtctacgccctcaaccttctccagctcgcccctggtggtcaccttggccgcttcattgtctggacctccgccgccttcaaggccctcgacaatatctacggcagcaccaccaagccctccgaccttaagaaggacttcctccttccctccaacttggtcgcccagtccgatctaagccgtttgatcaacagctccgaaatccagagcgttctccgtgcccctaagggcacctccctgaccaagcgctccggtatccagaagaacccgctgcgcaacaagcaggtcatgctgcgcttcaacccctaccactccactttcgtgaagaactcggttggctcgcagaagaaggagtctggcaagcccgccaagacctccgaggccttcctcaacatcattgctgaggactaa

SEQ ID NO: 4798 - protein, 359 aa, Muscodor strobelii
  misc_feature: SGI Peptide ID NO. 561302
  misc_feature (7)..(256): Pfam Id: PF00573 Pfam Desc: Ribosomal protein L4/L1 family
  misc_feature (12)..(256): Pfam Id: PF00573 Pfam Desc: Ribosomal protein L4/L1 family
  misc_feature (10)..(359): NCBI GI: 189188410 Blast Desc: 60S ribosomal protein L4-A [Pyrenophora tritici-repentis Pt-1C-BFP] gi|187972150|gb|EDU39649.1| 60S ribosomal protein L4-A [Pyrenophora tritici-repentis Pt-1C-BFP]
  misc_feature (10)..(359): NCBI GI: 156062570 Blast Desc: 60S ribosomal protein L4 [Sclerotinia sclerotiorum 1980] gi|154696737|gb|EDN96475.1| 60S ribosomal protein L4 [Sclerotinia sclerotiorum 1980]
  misc_feature (10)..(359): NCBI GI: 121718897 Blast Desc: 60S ribosomal protein L4, [Aspergillus clavatus NRRL 1] gi|119404426|gb|EAW14802.1| 60S ribosomal protein L4, [Aspergillus clavatus NRRL 1]
  misc_feature (10)..(359): NCBI GI: 39946140 Blast Desc: 60s ribosomal protein L2 [Magnaporthe grisea 70-15] gi|145019448|gb|EDK03676.1| 60s ribosomal protein L2 [Magnaporthe grisea 70-15]
  misc_feature (10)..(358): NCBI GI: 145242512 Blast Desc: An09g05180 [Aspergillus niger] gi|134078379|emb|CAK40370.1| protein product [Aspergillus niger]
  misc_feature (19)..(359): NCBI GI: 169617367 Blast Desc: SNOG_11861 [Phaeosphaeria nodorum SN15] gi|160703390|gb|EAT80905.2| SNOG_11861 [Phaeosphaeria nodorum SN15]
  misc_feature (10)..(359): NCBI GI: 70985070 Blast Desc: 60S ribosomal protein L4 [Aspergillus fumigatus Af293] gi|66845669|gb|EAL86003.1| 60S ribosomal protein L4, [Aspergillus fumigatus Af293] gi|159126035|gb|EDP51151.1| 60S ribosomal L4,
  misc_feature (10)..(359): NCBI GI: 261202602 Blast Desc: 60S ribosomal protein L4 [Ajellomyces dermatitidis SLH14081] gi|239590612|gb|EEQ73193.1| 60S ribosomal protein L4 [Ajellomyces dermatitidis SLH14081]
  misc_feature (11)..(342): NCBI GI: 256730966 Blast Desc: [Nectria haematococca mpVI 77-13-4]
  misc_feature (10)..(358): NCBI GI: 115437794 Blast Desc: 60S ribosomal protein L4-2 [Aspergillus terreus NIH2624] gi|114188716|gb|EAU30416.1| 60S ribosomal protein L4-2 [Aspergillus terreus NIH2624]
  misc_feature: Useful for introducing or modulating the production of volatile compounds
MALPREPPTPIPAVFASPIRPDIVQQVHTGMAKNKRQPYAVSEKAGHQTSAESWGTGRAVARIPRVSGGGTHRAGQAAFGNMCRSGRMFAPTKIWRKWHIKINQGQKRFATASALAASAVAPLLLARGHQISNVSEVPLVIDSAVFEGAAAAKTSAAFAILKAAGASADIAKAKASKKLRAGKGKMRGRRHRQRRGPLVIYDPEVDGKELVKGTRNLPGVETCDVYALNLLQLAPGGHLGRFIVWTSAAFKALDNIYGSTTKPSDLKKDFLLPSNLVAQSDLSRLINSSEIQSVLRAPKGTSLTKRSGIQKNPLRNKQVMLRFNPYHSTFVKNSVGSQKKESGKPAKTSEAFLNIIAED

SEQ ID NO: 4799 - DNA, 1562 bp, Muscodor strobelii
  misc_feature: SGI EST ID NO. CUFF.12478.1
  misc_feature: Variant of the nucleotide sequence at SEQ ID NO 4797
ggcaatttggcggcacccaaacttttgcggttttgcaacgcccaacgatcctctctcgagtcaactaacccagcagcaagtcgagcccgaccacgacttccacaatggcctcgagaccgaccgtcagcatcatcgggaaggatggcactccctcgggagccacccacccccatccccgccgtcttcgcgtcgcccatccgccccgacatcgtccagcaagtccacaccggcatggccaagaacaagcgccagccctacgccgtgagcgagaaggccggccatcagacctctgccgaatcctggggaactggtcgcgctgtcgcccgtatccctcgtgtctctggtggcggtactcaccgcgccggtcaggctgccttcggtaacatgtgtcgttccggtcgcatgttcgccccaaccaagatctggcgcaagtggcacatcaagatcaaccagggccagaagcgattcgctaccgcctccgccttggctgcttccgctgttgcccctctcctcctcgcccgtggccaccagatctccaacgtctccgaggttcctctcgtcatcgactccgccgtcttcgagggtgccgctgccgccaagacctcggccgctttcgccatcctgaaggctgccggtgcctccgctgacatcgccaaggctaaggcttctaagaagctccgtgccggtaagggtaagatgcgtggccgtcgtcaccgccagcgtcgtggccctctggtcatctacgaccccgaggtcgatggtaaggagctcgtcaagggtacccgcaaccttcccggtgtcgagacctgcgacgtctacgccctcaaccttctccagctcgcccctggtggtcaccttggccgcttcattgtctggacctccgccgccttcaaggccctcgacaatatctacggcagcaccaccaagccctccgaccttaagaaggacttcctccttccctccaacttggtcgcccagtccgatctaagccgtttgatcaacagctccgaaatccagagcgttctccgtgcccctaagggcacctccctgaccaagcgctccggtatccagaagaacccgctgcgcaacaagcaggtcatgctgcgcttcaacccctaccactccactttcgtgaagaactcggttggctcgcagaagaaggagtctggcaagcccgccaagacctccgaggccttcctcaacatcattgctgaggactaaatttttcgacacgcttggtgagcagcttgtcaatggaaaaagggaattcgagcatcggttgtgataaagtcatgggcgttatgggttcatagggtctcatgaaatgaatcaatgaagtgtcattctgagcatgggcttttgatgatgattataataattcttgttgctgaatatgtgcatctgcttagttccaaatccctgttacaaaacgagtgaatgattcggagtggtctgtcagattccgtagtctcggaaaggtaatttcagactatgattaagaacacattcatggcactaatcgcactatgaagctccaatacacgatataaactactctgact

SEQ ID NO: 4800 - DNA, 1854 bp, Muscodor strobelii
  misc_feature: SGI cDNA ID NO. 561303
  misc_feature: Encodes the peptide sequence at SEQ ID NO 4801
atgaacagtgacgcacccgagagggccagtatggcgccgaaggacatgagtcatcactattccgacctgtccaaggctcgcaagccgagcaagatgaagacattctacaagtatttccaaattccaggcattggtcaacttgcgggcggtcttcccaacgctcagttcttcccttttgacacactcgaggcccagacagcacatccacaccgatggacaccaactccgaaccgcccaggcgccgacagcctgtcgacagacctccaatcaaccaagatctccaacagcggcgacctcaagactgcctctcatttgattgttcctcatgacgtcgatgctgtaaacccaatccaaaagatcgatctcgcatcggccctgcagtatggccaagcagtcggatatccaccactagtctcatacatccgccaatttacacgcgaatgtttacaccccaacgtgccgtacgagggtgggccagatgtcgtcttcacgaccggttccacggatggcatgtccaagacacttgaattattcaccaatatctgggtcgaggggaaaaacgatatccgcgagcgaccaggtttgttagtagatgtcttcatgtatccgaatattctgggtcaggcccagccccgaggtgttcaggtcgcgcccgtagagttggatgatcaggggatggcgccttatggaccaggcggcttggaggatgtcctgagcaattgggacgaaagcaagggaaagcgacctcatctgctctacaccgtctcgatgggccacaacccaacttctggcgttctaacccttgagcgccgacgagagctctacgagatctgcagtaagtacgacgtaatcatcgtcgaagacgacccatactggtatctccagttcccatccgcagaaatcgaagaggcgaaagcccgcaacaagccgatcccggaattcaaagccgccaacacactaccgaagaaatcaggctatgacttcctagactcattagccccatcattcctaaatatcgacgtagacggacgcgtcgtccggctagacacattctccaagaccgtagcgccaggctgccgtctaggctggataacatccacaaaggagatttgcgagcgaatcctccgcatcagcgaatcaggcacacagcaaccatcaggtttcgtccaagtcgtaatcgcggagtccatcatgggtcctcagcccgaagccatggcagccttcacctcccgatcgcgaaaggacaagacggcattcacaggctggaagacagacggtttcgtccgctggctgtccggcctaagaggtgaatacgaacgccgcatgaacgaaatgtgcaccatcctcgaggaacacgcctaccaactcaaacaatcgacccccgtccgtgacgcagacgcagactggggcgtcatcacgaagacgaagttgtatgacttcgactggccacgcggcggcatgttcctctggctccgcgtgtacttcgagtctcacccgttgtacggcaagcccgggtccgccggtaacaagattaacggaactgcgctttctaccgctctcatggtttatctgacgtataagccgcatcttgtcctcgtaagtcctggcatgatgtttagtgctacgcctgagatcgcggcgagtagggggtgggcgcatttccggctttgcttcgcggcggagagcgatgagcagattacggggagctcgaagaggttgggaaatggcattcagaagttttggcagattaagaaggctaaagagctggaggatatactgaaggatgctgagggtgacttcgaggctgatgcgcttgaggagggcgcgtggaatatgggttggatgggttgttga

SEQ ID NO: 4801 - protein, 617 aa, Muscodor strobelii
  misc_feature: SGI Peptide ID NO. 561303
  misc_feature (90)..(573): Pfam Id: PF00155 Pfam Desc: Aminotransferase class I and II
  misc_feature (13)..(617): NCBI GI: 39946138 Blast Desc: MGG_08189 [Magnaporthe grisea 70-15] gi|145019447|gb|EDK03675.1| MGG_08189 [Magnaporthe grisea 70-15]
  misc_feature (13)..(617): NCBI GI: 154294432 Blast Desc: BC1G_13736 [Botryotinia fuckeliana B05.10] gi|150844745|gb|EDN19938.1| BC1G_13736 [Botryotinia fuckeliana B05.10]
  misc_feature (1)..(604): NCBI GI: 156063228 Blast Desc: SS1G_01730 [Sclerotinia sclerotiorum 1980] gi|154697066|gb|EDN96804.1| SS1G_01730 [Sclerotinia sclerotiorum 1980]
  misc_feature (13)..(595): NCBI GI: 256731344 Blast Desc: NECHADRAFT_49493 [Nectria haematococca mpVI 77-13-4]
  misc_feature (4)..(617): NCBI GI: 85101196 Blast Desc: NCU03756 [Neurospora crassa OR74A] gi|12718317|emb|CAC28668.1| related to aromatic amino acid aminotransferase I [Neurospora crassa] gi|28922642|gb|EAA31867.1|
  misc_feature (8)..(617): NCBI GI: 116197995 Blast Desc: CHGG_07153 [Chaetomium globosum CBS 148.51] gi|88178432|gb|EAQ85900.1| CHGG_07153 [Chaetomium globosum CBS 148.51]
  misc_feature (1)..(598): NCBI GI: 261355576 Blast Desc: aromatic amino acid aminotransferase [Verticillium albo-atrum VaMs.102]
  misc_feature (13)..(603): NCBI GI: 169624433 Blast Desc: SNOG_15475 [Phaeosphaeria nodorum SN15] gi|111056020|gb|EAT77140.1| SNOG_15475 [Phaeosphaeria nodorum SN15]
  misc_feature (12)..(551): NCBI GI: 46125621 Blast Desc: FG07188.1 [Gibberella zeae PH-1]
  misc_feature (13)..(597): NCBI GI: 189209804 Blast Desc: aromatic amino acid aminotransferase 1 [Pyrenophora tritici-repentis Pt-1C-BFP] gi|187977327|gb|EDU43953.1| aromatic amino acid aminotransferase 1 [Pyrenophora tritici-repentis
  misc_feature (14)..(585): SWISSPROT Homolog: EC 2.6.1.57 Aromatic-amino-acid transaminase
  misc_feature: Useful for introducing or modulating the production of volatile compounds
  misc_feature: Useful for fungicidal and/or biocontrol applications
  misc_feature: Useful for production of fusel alcohols
MNSDAPERASMAPKDMSHHYSDLSKARKPSKMKTFYKYFQIPGIGQLAGGLPNAQFFPFDTLEAQTAHPHRWTPTPNRPGADSLSTDLQSTKISNSGDLKTASHLIVPHDVDAVNPIQKIDLASALQYGQAVGYPPLVSYIRQFTRECLHPNVPYEGGPDVVFTTGSTDGMSKTLELFTNIWVEGKNDIRERPGLLVDVFMYPNILGQAQPRGVQVAPVELDDQGMAPYGPGGLEDVLSNWDESKGKRPHLLYTVSMGHNPTSGVLTLERRRELYEICSKYDVIIVEDDPYWYLQFPSAEIEEAKARNKPIPEFKAANTLPKKSGYDFLDSLAPSFLNIDVDGRVVRLDTFSKTVAPGCRLGWITSTKEICERILRISESGTQQPSGFVQVVIAESIMGPQPEAMAAFTSRSRKDKTAFTGWKTDGFVRWLSGLRGEYERRMNEMCTILEEHAYQLKQSTPVRDADADWGVITKTKLYDFDWPRGGMFLWLRVYFESHPLYGKPGSAGNKINGTALSTALMVYLTYKPHLVLVSPGMMFSATPEIAASRGWAHFRLCFAAESDEQITGSSKRLGNGIQKFWQIKKAKELEDILKDAEGDFEADALEEGAWNMGWMGC

SEQ ID NO: 4802 - DNA, 2577 bp, Muscodor strobelii
  misc_feature: SGI EST ID NO. CUFF.12310.1
  misc_feature: Variant of the nucleotide sequence at SEQ ID NO 4800
agctaatggaaatccgtgctgacacctcgacttcggctcgatgctgttcgctcatccccctcggcttgcctgagaccctggttcaacgtgggcttcattccgacactaacaaagtctccgagttgtctttccagatttgtaatctgatcagtgatctcaatagtcaacaggcaactgtatccgtcattatgtttcgtcttttaccatctagatagcccatacagaggttatgtttgcaagaaggcaaataatagactatactacataccatttctctaactattccatccctgtgtcagcatcttctcttgtagcgtgttacattaacactaaaccaccaagatgaacagtgacgcacccgagagggccagtatggcgccgaaggacatgagtcatcactattccgacctgtccaaggctcgcaagccgagcaagatgaagacattctacaagtatttccaaattccaggcattggtcaacttgcgggcggttcgtgaacccaacccgtcattccgatctcgccactgtcgtctctaatattcacccaggtcttcccaacgctcagttcttcccttttgacacactcgaggcccagacagcacatccacaccgatggacaccaactccgaaccgcccaggcgccgacagcctgtcgacagacctccaatcaaccaagatctccaacagcggcgacctcaagactgcctctcatttgattgttcctcatgacgtcgatgctgtaaacccaatccaaaagatcgatctcgcatcggccctgcagtatggccaagcagtcggatatccaccactagtctcatacatccgccaatttacacgcgaatgtttacaccccaacgtgccgtacgagggtgggccagatgtcgtcttcacgaccggttccacggatggcatgtccaagacacttgaattattcaccaatatctgggtcgaggggaaaaacgatatccgcgagcgaccaggtttgttagtagatgtcttcatgtatccgaatattctgggtcaggcccagccccgaggtgttcaggtcgcgcccgtagagttggatgatcaggggatggcgccttatggaccaggcggcttggaggatgtcctgagcaattgggacgaaagcaagggaaagcgacctcatctgctctacaccgtctcgatgggccacaacccaacttctggcgttctaacccttgagcgccgacgagagctctacgagatctgcagtaagtacgacgtaatcatcgtcgaagacgacccatactggtatctccagttcccatccgcagaaatcgaagaggcgaaagcccgcaacaagccgatcccggaattcaaagccgccaacacactaccgaagaaatcaggctatgacttcctagactcattagccccatcattcctaaatatcgacgtagacggacgcgtcgtccggctagacacattctccaagaccgtagcgccaggctgccgtctaggctggataacatccacaaaggagatttgcgagcgaatcctccgcatcagcgaatcaggcacacagcaaccatcaggtttcgtccaagtcgtaatcgcggagtccatcatgggtcctcagcccgaagccatggcagccttcacctcccgatcgcgaaaggacaagacggcattcacaggctggaagacagacggtttcgtccgctggctgtccggcctaagaggtgaatacgaacgccgcatgaacgaaatgtgcaccatcctcgaggaacacgcctaccaactcaaacaatcgacccccgtccgtgacgcagacgcagactggggcgtcatcacgaagacgaagttgtatgacttcgactggccacgcggcggcatgttcctctggctccgcgtgtacttcgagtctcacccgttgtacggcaagcccgggtccgccggtaacaagattaacggaactgcgctttctaccgctctcatggtttatctgacgtataagccgcatcttgtcctcgtaagtcctggcatgatgtttagtgctacgcctgagatcgcggcgagtagggggtgggcgcatttccggctttgcttcgcggcggagagcgatgagcagattacggggagctcgaagaggttgggaaatggcattcagaagttttggcagattaagaaggctaaagagctggaggatatactgaaggatgctgagggtgacttcgaggctgatgcgcttgaggagggcgcgtggaatatgggttggatgggttgttgattggtgagctggttataccgcacataaagtgaataacgtacatgatgagcagatatgtccggtgaaaaaacaagaaagaagtgatgtggtatgcttcgtgcgatgtccaagagtggaggaaagaggaaagatgtataagccgcgggcgatatgtaagcaaacttaaagttaagtgattatgccatagcacgccattgcccatgctatgcatgttagaactcagcgaggaagtggatagaggaaatatgttcagatgtaagggatatgtagctaggtaaactcaacatgcagcatcacaactcagctggcctcaatccgattg

SEQ ID NO: 4803 - DNA, 2028 bp, Muscodor strobelii
  misc_feature: SGI cDNA ID NO. 561304
  misc_feature: Encodes the peptide sequence at SEQ ID NO 4804
atggagaagatcacagacaagattgccgccctgccgaccgattccaattacttctctctcgaattcttcccgcctaagacggcaatgggcttctctaacttgcgcgaccgacttgatcgaatggcacgtgccttgcgacccttatttgtgaatatcacttggggggcgggtggatcgactgcgacgaagtctctggagctcgccgaaatttgccagagggagttgaatctcacaacatgcctccacctcacatgtacgaatatgagccgcaagacgatagaccgcgccctagaagatgcaaaggtccttggaattcgaaatattctagcccttagaggggatcctcccagagctgccgagtataaggaccccaacgagaagcccgaggatgcaattgacgagggctttgtctgggcaatcgatcttgtcagatacatccggcaaaagtacgatgactatttctgcattggcgttgctgcttatcctgaaggtcatgccgatgagagccacccccgagggcagagcttagaacacgatctaccctacctcgttgaaaagaccaaagcaggagcagacttcctcatgacacagttgttcttcgataccgatgcttacgacagcttcgaaaagacccttagagaacaccccagtggaattttcaagagcattcccatcctcccaggcttgatgcccatccagagttatcagatgatcaagcgtacgactaaactaagtcatgccacgatccccgatcccatcatggccagactggatgccgtcaagaaggacgacgagaaagtgaagaatgtcggtgttgatattctatgcgaaatcattgataaggtgaaagaaatcaagagccggacaccaggcccaaggggctttcatttctataccctgaatctcgagaaagccgtctcgttcattgtcgagagatcaaacctaatggtagacacctctgaagaggaagctataatagatgacggcccacttcccgatatacctaatctcacaatcaacggccaaccatcttcagagcatatgtcgcacgtccaaggccgatctagtagaagacagtctactgctagctctgacgtacgtaaccgtgtgattgtgtctaccggtcgcgcattatctcaccccgaatacgaattatcgcaagcagacgctgccatccccgccgagatcatcaactctcgggctaacacgcttgctatatctgaaggcgaaggcggattaggccgtgaggctacctgggacgatttccccaatggccgctggggagatgcacgctctcccgcctatggtgaaattgatggctacggtcctagtctgcacatgacaaacgcacaagctatatcgctatggggccaccccaagactctcgaagatatcagcacgctcttcgtgcgtcatctcaagggcgagctaacagctatcccgtggagtgaagaagaatttaacgaagagacgaatacgatcacagaccagctattgcgcttgaatcagcaggcgatgtggacggtagcctcgcaaccagcagtaaatggtctgcgttcagatgatgcaactttcggctggggccctcgccacggattcgtcttccaaaaggcctttgttgagttttttgtctcctccgagcgatggaaggatttgcatgacaaattgcagagcaaggaagtatgcggtcacataacctattacgcatcgaacgcagccggcgaattcgtatcatcagacctgactggtggtacagcgaagccaaatggtgaaggcagcactaacgcggtaacctggggcgtattccccgctaaggagatccttacgccgactatcatcgaagaggtcagtttccgtgcttgggccgaggaagcatttggcatatttggggagtgggcacaggtttacgggaaaggatctgagagcgagaagctcctagagtctgcgcgcacagattgctggctggtgaatattgttcaccatgattacttagagaaagatgccctttggaacctacttcttcagtga

SEQ ID NO: 4804 - protein, 675 aa, Muscodor strobelii
  misc_feature: SGI Peptide ID NO. 561304
  misc_feature (7)..(314): Pfam Id: PF02219 Pfam Desc: Methylenetetrahydrofolate reductase
  misc_feature (1)..(675): NCBI GI: 171693591 Blast Desc: protein product [Podospora anserina] gi|170946744|emb|CAP73548.1| protein product [Podospora anserina]
  misc_feature (1)..(673): NCBI GI: 261351588 Blast Desc: methylenetetrahydrofolate reductase [Verticillium albo-atrum VaMs.102]
  misc_feature (1)..(675): NCBI GI: 85091156 Blast Desc: NCU09545 [Neurospora crassa OR74A] gi|28920148|gb|EAA29528.1| NCU09545 [Neurospora crassa OR74A] gi|38566859|emb|CAE76165.1| methylenetetrahydrofolate reductase
  misc_feature (1)..(673): NCBI GI: 256731313 Blast Desc: [Nectria haematococca mpVI 77-13-4]
  misc_feature (29)..(675): NCBI GI: 145612229 Blast Desc: MGG_08171 [Magnaporthe grisea 70-15] gi|145019428|gb|EDK03656.1| MGG_08171 [Magnaporthe grisea 70-15]
  misc_feature (1)..(674): NCBI GI: 154318662 Blast Desc: BC1G_02720 [Botryotinia fuckeliana B05.10] gi|150857850|gb|EDN33042.1| BC1G_02720 [Botryotinia fuckeliana B05.10]
  misc_feature (1)..(673): NCBI GI: 46125499 Blast Desc: FG07127.1 [Gibberella zeae PH-1]
  misc_feature (1)..(675): NCBI GI: 156063782 Blast Desc: SS1G_02009 [Sclerotinia sclerotiorum 1980] gi|154697343|gb|EDN97081.1| SS1G_02009 [Sclerotinia sclerotiorum 1980]
  misc_feature (1)..(669): NCBI GI: 116206412 Blast Desc: CHGG_02499 [Chaetomium globosum CBS 148.51] gi|88183096|gb|EAQ90564.1| CHGG_02499 [Chaetomium globosum CBS 148.51]
  misc_feature (1)..(675): NCBI GI: 189207044 Blast Desc: methylenetetrahydrofolate reductase 2 [Pyrenophora tritici-repentis Pt-1C-BFP] gi|187975949|gb|EDU42575.1| methylenetetrahydrofolate reductase 2 [Pyrenophora Pt-1C-BFP]
  misc_feature (3)..(673): SWISSPROT Homolog: EC 1.5.1.20 Methylenetetrahydrofolate reductase (NAD(P)H)
MEKITDKIAALPTDSNYFSLEFFPPKTAMGFSNLRDRLDRMARALRPLFVNITWGAGGSTATKSLELAEICQRELNLTTCLHLTCTNMSRKTIDRALEDAKVLGIRNILALRGDPPRAAEYKDPNEKPEDAIDEGFVWAIDLVRYIRQKYDDYFCIGVAAYPEGHADESHPRGQSLEHDLPYLVEKTKAGADFLMTQLFFDTDAYDSFEKTLREHPSGIFKSIPILPGLMPIQSYQMIKRTTKLSHATIPDPIMARLDAVKKDDEKVKNVGVDILCEIIDKVKEIKSRTPGPRGFHFYTLNLEKAVSFIVERSNLMVDTSEEEAIIDDGPLPDIPNLTINGQPSSEHMSHVQGRSSRRQSTASSDVRNRVIVSTGRALSHPEYELSQADAAIPAEIINSRANTLAISEGEGGLGREATWDDFPNGRWGDARSPAYGEIDGYGPSLHMTNAQAISLWGHPKTLEDISTLFVRHLKGELTAIPWSEEEFNEETNTITDQLLRLNQQAMWTVASQPAVNGLRSDDATFGWGPRHGFVFQKAFVEFFVSSERWKDLHDKLQSKEVCGHITYYASNAAGEFVSSDLTGGTAKPNGEGSTNAVTWGVFPAKEILTPTIIEEVSFRAWAEEAFGIFGEWAQVYGKGSESEKLLESARTDCWLVNIVHHDYLEKDALWNLLLQ

SEQ ID NO: 4805 - DNA, 1362 bp, Muscodor strobelii
  misc_feature: SGI cDNA ID NO. 561305
  misc_feature: Encodes the peptide sequence at SEQ ID NO 4806
atgagtgggctacctgaagaaaaccatggctctgcatcgcatccagccgaaagctccggctccggtagtcttgagcgcgacatggaaagcgccatctccgactttgtctcgtcgagtagtaactcgacttttacctgcggcggcaccatctctgcggccgaacttgtagctcaactaaacggccacgccgcagcaatccaagtctcgaagcaagctcaaagatttggtctcgacggcaaggatgtctttgatgagacggtgcggaaggcgggagcaatggataactccaaattctcgtgtaacttgtgtccatacgtcttaggaatcataaaccgggttacgcagctgctgctaccgaatgtattcaacgtgggaaagggtggagaggcaaatggagggtttgtcaaggccgagctctataagctaaacatgtaccaagggccttcaggcatgttcaaggcccatgttgacacacctcgccgggagacgcaatttgggtcgctggtcatgtgcctaccgaacccgcacaagggcggccggctcattgtaagtcatgctgacgagaatgtatcttacgactgggacaagcatgacgcggcagaggcattgcagtgggctgcattttacagcgactgcaaacacgagatcaaagaggtcaccgagggccaccgtataacactgacgtacaacctctactacgacacatgcgttctcgacagtcccatctctgggctgtccagccagccggcgccagtcaacatcaccaacctggcgccatacgcaaagatacaagagcttctgcgtaaaccgaagtggatgacagacggcggtgtactaggcatctattgtgcacacgcgtacccgaccacgacctcagacgtgaaggaccttgacggagacgtttttggccaacgcaaacgcaaacgcagaccgctgccaaccgataagatcaccatgctcaagggcaccgacatgtcgctctatgccaccttccgcgaattgggccttgaagtccgcctggcgccgatcatacgacacgccgaaagtttcaggttcaataatgaaaaacacgagaaacgcgcgtggccacgggaagggcacagagtcggacctggcatggtagggcttaccgaggttggtggcaacgaggactatgagaatgttccggaggcctttggtacgctactagaccaagtcaagtggattggcaagcccaagtggaagaacttggctttgatacacggagctaacctcggcaatgagcctggaccacctggcatctgctacgcatataccaccctgctcgtcacgatccccgacgcaatcagccgcgggtgcaaggctggtgaagaacgcagctag

SEQ ID NO: 4806 - protein, 453 aa, Muscodor strobelii
  misc_feature: SGI Peptide ID NO. 561305
  misc_feature (64)..(444): NCBI GI: 169619988 Blast Desc: SNOG_13194 [Phaeosphaeria nodorum SN15] gi|111058401|gb|EAT79521.1| SNOG_13194 [Phaeosphaeria nodorum SN15]
  misc_feature (66)..(444): NCBI GI: 255943929 Blast Desc: Pc20g01730 [Penicillium chrysogenum Wisconsin 54-1255] gi|211587467|emb|CAP85502.1| Pc20g01730 [Penicillium chrysogenum Wisconsin 54-1255]
  misc_feature (75)..(367): NCBI GI: 240111245 Blast Desc: oxidoreductase, 2OG-Fe(II) oxygenase family protein [Coccidioides posadasii C735 delta SOWgp]
  misc_feature (26)..(366): NCBI GI: 115433398 Blast Desc: [Aspergillus terreus NIH2624] gi|114189688|gb|EAU31388.1| [Aspergillus terreus NIH2624]
  misc_feature (64)..(451): NCBI GI: 189201385 Blast Desc: conserved [Pyrenophora tritici-repentis Pt-1C-BFP] gi|187984128|gb|EDU49616.1| conserved [Pyrenophora tritici-repentis Pt-1C-BFP]
  misc_feature (75)..(367): NCBI GI: 119189411 Blast Desc: CIMG_04753 [Coccidioides immitis RS]
  misc_feature (71)..(346): NCBI GI: 145259284 Blast Desc: An04g09660 [Aspergillus niger] gi|134074944|emb|CAK47973.1| protein product [Aspergillus niger]
  misc_feature (75)..(445): NCBI GI: 256725317 Blast Desc: NECHADRAFT_101141 [Nectria haematococca mpVI 77-13-4]
  misc_feature (71)..(360): NCBI GI: 256735609 Blast Desc: NECHADRAFT_75636 [Nectria haematococca mpVI 77-13-4]
  misc_feature (75)..(332): NCBI GI: 239614946 Blast Desc: conserved [Ajellomyces dermatitidis ER-3]
MSGLPEENHGSASHPAESSGSGSLERDMESAISDFVSSSSNSTFTCGGTISAAELVAQLNGHAAAIQVSKQAQRFGLDGKDVFDETVRKAGAMDNSKFSCNLCPYVLGIINRVTQLLLPNVFNVGKGGEANGGFVKAELYKLNMYQGPSGMFKAHVDTPRRETQFGSLVMCLPNPHKGGRLIVSHADENVSYDWDKHDAAEALQWAAFYSDCKHEIKEVTEGHRITLTYNLYYDTCVLDSPISGLSSQPAPVNITNLAPYAKIQELLRKPKWMTDGGVLGIYCAHAYPTTTSDVKDLDGDVFGQRKRKRRPLPTDKITMLKGTDMSLYATFRELGLEVRLAPIIRHAESFRFNNEKHEKRAWPREGHRVGPGMVGLTEVGGNEDYENVPEAFGTLLDQVKWIGKPKWKNLALIHGANLGNEPGPPGICYAYTTLLVTIPDAISRGCKAGEERS

SEQ ID NO: 4807 - DNA, 257 bp, Muscodor strobelii
  misc_feature: SGI EST ID NO. CUFF.12218.0
  misc_feature: Variant of the nucleotide sequence at SEQ ID NO 4805
ggataactccaaattctcgtgtaacttgtgtccatacgtcttaggaatcataaaccgggttacgcagctgctgctaccgaatgtattcaacgtgggaaagggtggagaggcaaatggagggtttgtcaaggccgagctctataagctaaacatgtaccaagggccttcaggcatgttcaaggcccatgttgacacacctcgccgggagacgcaatttgggtcgctggtcatgtgcctaccgaacccgcacaagggcg

SEQ ID NO: 4808 - DNA, 681 bp, Muscodor strobelii
  misc_feature: SGI cDNA ID NO. 561306
  misc_feature: Encodes the peptide sequence at SEQ ID NO 4809
atgtacaactcacttacacgcgtccaaaacgtcttcggcttcttcaccaccgtcgccttcgccgtcgccgccataatcgccatctccgacttcacctcccctcgcacgccttccgccaccataaagcctaccaacgtccaagtagtcaagggccgaccccattactacagcaccaagaaggaagaatatgccataataaagttctccctcgatgccgatctctcctcgctcttcacatggaacaccaagcagctctttgtctacatcaccgccgagtggcctgccccgcccgtcggcgacaacatgaaccagaccaacaaggccgtcatctgggacaccatcatcacgagcccctcgtctgaccaccttgccaacatcgggcctgctacgttgaagaagttgcgcaagagcgctgctgggaagagcatagatccgagccgaggcaaactatccctcaagaaccaaaagccaaaataccaaatcacccaccccacgggcaaagtcgcacacaccgacgacgtcacgcttcacgtgcactacaacatccagccctgggtcggtatgttgacctggaaccaggacgtcgacttcgggctgtggaagaagatggccaagggagtgagcaaggtgttcgagttgccggctatcaagcagaaagatgccaagagtaagaagaactga

SEQ ID NO: 4809 - protein, 226 aa, Muscodor strobelii
  misc_feature: SGI Peptide ID NO. 561306
  misc_feature (1)..(204): Pfam Id: PF04573 Pfam Desc: Signal peptidase subunit
  misc_feature (59)..(118): Pfam Id: PF04573 Pfam Desc: Signal peptidase subunit
  misc_feature (1)..(216): NCBI GI: 256731002 Blast Desc: NECHADRAFT_71880 [Nectria haematococca mpVI 77-13-4]
  misc_feature (1)..(219): NCBI GI: 85100215 Blast Desc: NCU06677 [Neurospora crassa OR74A] gi|28922456|gb|EAA31688.1| conserved [Neurospora crassa OR74A]
  misc_feature (1)..(225): NCBI GI: 171694063 Blast Desc: protein product [Podospora anserina] gi|170946980|emb|CAP73784.1| protein product [Podospora anserina]
  misc_feature (1)..(219): NCBI GI: 156063324 Blast Desc: SS1G_01778 [Sclerotinia sclerotiorum 1980] gi|154697114|gb|EDN96852.1| SS1G_01778 [Sclerotinia sclerotiorum 1980]
  misc_feature (1)..(216): NCBI GI: 46124845 Blast Desc: FG06800.1 [Gibberella zeae PH-1]
  misc_feature (1)..(214): NCBI GI: 154319341 Blast Desc: BC1G_02622 [Botryotinia fuckeliana B05.10] gi|150857053|gb|EDN32245.1| BC1G_02622 [Botryotinia fuckeliana B05.10]
  misc_feature (1)..(225): NCBI GI: 39972017 Blast Desc: conserved [Magnaporthe grisea 70-15] gi|59802937|gb|AAX07673.1| microsomal signal peptidase-like protein [Magnaporthe grisea] gi|145019835|gb|EDK04063.1| grisea
  misc_feature (49)..(216): NCBI GI: 116199171 Blast Desc: CHGG_07741 [Chaetomium globosum CBS 148.51] gi|88179020|gb|EAQ86488.1| CHGG_07741 [Chaetomium globosum CBS 148.51]
  misc_feature (1)..(226): NCBI GI: 169615621 Blast Desc: SNOG_10970 [Phaeosphaeria nodorum SN15] gi|160703003|gb|EAT81469.2| SNOG_10970 [Phaeosphaeria nodorum SN15]
  misc_feature (1)..(145): NCBI GI: 261355624 Blast Desc: conserved [Verticillium albo-atrum VaMs.102]
MYNSLTRVQNVFGFFTTVAFAVAAIIAISDFTSPRTPSATIKPTNVQVVKGRPHYYSTKKEEYAIIKFSLDADLSSLFTWNTKQLFVYITAEWPAPPVGDNMNQTNKAVIWDTIITSPSSDHLANIGPATLKKLRKSAAGKSIDPSRGKLSLKNQKPKYQITHPTGKVAHTDDVTLHVHYNIQPWVGMLTWNQDVDFGLWKKMAKGVSKVFELPAIKQKDAKSKKN

SEQ ID NO: 4810 - DNA, 1555 bp, Muscodor strobelii
  misc_feature: SGI EST ID NO. CUFF.12298.0
  misc_feature: Variant of the nucleotide sequence at SEQ ID NO 4808
ctaaacgtggcctcagactgaagcataaaagtgaacaacagcgagcgacgacctcgccgccgctgctcatagacccattgcaccctttgcgctgtagcgaaagctcatgatcatcttgattatttgcacatcttcgaatctgcgaatctgcgccatctaacctccccaccgcccgttacctgaccttcaaggtcgaccgacggccaccatgtacaactcacttacacgcgtccaaaacgtcttcggcttcttcaccaccgtcgccttcgccgtcgccgccataatcgccatctccgacttcacctcccctcgcacgccttccgccaccataaagcctaccaacgtccaagtagtcaagggccgaccccattactacagcaccaagaaggaagaatatgccataataaagttctccctcgatgccgatctctcctcgctcttcacatggaacaccaagcagctctttgtctacatcaccgccgagtggcctgccccgcccgtcggcgacaacatgaaccagaccaacaaggccgtcatctgggacaccatcatcacgagcccctcgtctgaccaccttgccaacatcgggcctgctacgttgaagaagttgcgcaagagcgctgctgggaagagcatagatccgagccggtatgttgacagatcattctccggagagaacatgactaattcacgcatgggcatagaggcaaactatccctcaagaaccaaaagccaaaataccaaatcacccaccccacgggcaaagtcgcacacaccgacgacgtcacgcttcacgtgcactacaacatccagccctgggtcggtatgttgacctggaaccaggacgtcgacttcgggctgtggaagaagatggccaagggagtgagcaaggtgttcgagttgccggctatcaagcagaaagatgccaagagtaagaagaactgaagactggattatgatacctcatgttgttttgcactgccaggtagcgagcgaatcaacttattttcaaacagcaacttaggaatcacgctttcgtttgggctttatgatatttgcttgcttgctactactaatattatgacactgaaaatacttagacgaagccaactgctgcaacagattatacaagccaaaaatggaagacaaaggaaggaaaaaaagagatcaaaattattgccaccgccaggaatcgagcctggtactcggaatccgggaggtcaaagccaagtaaactcagtcttcagttacccatcctccaaggcgcctacgaaagcaccggtggtgaaatatgggtgcatcattgggatatatataagcctgattgccagcgaaagtaggacggtgggtgacgaccgatgttcaaccgtgccggatagcgatatagcaactccccttaataatcaccatagtatctgcatctgcccttttccgccgtctacagcacacagcctcggagtagcattcatcacctcgcctggatcgaatatataaattgttattacagcttactcttagttcaaaagttcatttatagatgggaactacagctcgt

SEQ ID NO: 4811 - DNA, 747 bp, Muscodor strobelii
  misc_feature: SGI cDNA ID NO. 561307
  misc_feature: Reduced expression when VOC is produced
  misc_feature: Encodes the peptide sequence at SEQ ID NO 4812
atgatgatatctttcagacacctcgtaattaatgtcgcacttgcggctatggcatgcggtgcttcctttgaacgccgaggtaatgaagaacacttcctcgacgatcgcgccccgttcccacgcgatgcatccggcagaagacaggtcgttctcgacgaatctctcgaaacagacgcttgggcccatcgcgatgtcctcaaacaaagcatcagcgatgatgctatacaccctagagtattcgatgataagggctgggctcagttctgcgacgacgacaggtgcgaagtaggttgcggcagatcagttgccattggcaaccccggctgcctcgatcaaactcatcgctatcggaaatccatcaagctgcacaccgaccacctgggggccaaacttccggcacatgactggcggtatcgcctcattgttcatggcccagacgagggacgttgtggttgctcaatggattgtgcttcaactccgccgtggcgtgacgtcagtcatgatgggacgtgttggaacatcacagatcatatgggcgagacatttcattggcaatatgatctcaaagaatgtcccatgatggaatgtcccgagaagaagaagcatccgccacttgatgatccgccggaggacccaaaagatccggagaaagagccgcctagacctactccgacgaaaccgaactactgtgttactcgtgagaatcgtcccgccagcgcgtttttcagcgcggccaccagcacatag

SEQ ID NO: 4812 - protein, 248 aa, Muscodor strobelii
  misc_feature: SGI Peptide ID NO. 561307
  misc_feature: Useful for introducing or modulating the production of volatile compounds
MMISFRHLVINVALAAMACGASFERRGNEEHFLDDRAPFPRDASGRRQVVLDESLETDAWAHRDVLKQSISDDAIHPRVFDDKGWAQFCDDDRCEVGCGRSVAIGNPGCLDQTHRYRKSIKLHTDHLGAKLPAHDWRYRLIVHGPDEGRCGCSMDCASTPPWRDVSHDGTCWNITDHMGETFHWQYDLKECPMMECPEKKKHPPLDDPPEDPKDPEKEPPRPTPTKPNYCVTRENRPASAFFSAATST

SEQ ID NO: 4813 - DNA, 1243 bp, Muscodor strobelii
  misc_feature: SGI EST ID NO. CUFF.12231.0
  misc_feature: Variant of the nucleotide sequence at SEQ ID NO 4811
tgatctcccactctatcgacttcacatttcttcctcacgataatctaacattgttctcgtattgttcactaaaatgtttttgcgtgttcaaaaatccagttttcatttggcagtcgccgcataaataatgtgctccgaatggatcttaagtttaaacggggtgacgcgacagaactctctcgtcttattaggtagtcgctcgcccatcagcctaaaaaatggaatggacattgcaccaacaaatgatactcgcgactacttacacttgatttcaataaatcattggaaatgagctcaataataatagtacttaaagaggaagatattgccctcacccagacctatcgccagatagtgtaatttgaagttttccattctccctttcattttcacttcaagaagctgctttaccgttgatagttctaaagcaatagccatcatgatgatatctttcagacacctcgtaattaatgtcgcacttgcggctatggcatgcggtgcttcctttgaacgccgaggtaatgaagaacacttcctcgacgatcgcgccccgttcccacgcgatgcatccggcagaagacaggtcgttctcgacgaatctctcgaaacagacgcttgggcccatcgcgatgtcctcaaacaaagcatcagcgatgatgctatacaccctagagtattcgatgataagggctgggctcagttctgcgacgacgacaggtgcgaagtaggttgcggcagatcagttgccattggcaaccccggctgcctcgatcaaactcatcgctatcggaaatccatcaagctgcacaccgaccacctgggggccaaacttccggcacatgactggcggtatcgcctcattgttcatggcccagacgagggacgttgtggttgctcaatggattgtgcttcaactccgccgtggcgtgacgtcagtcatgatgggacgtgttggaacatcacagatcatatgggcgagacatttcattggcaatatgatctcaaagaatgtcccatgatggaatgtcccgagaagaagaagcatccgccacttgatgatccgccggaggacccaaaagatccggagaaagagccgcctagacctactccgacgaaaccgaactactgtgttactcgtgagaatcgtcccgccagcgcgtttttcagcgcggccaccagcacatagtaggcaaagcaataataggatgacgttctacccatcttccgaatgaaacggcgaata

SEQ ID NO: 4814 - DNA, 921 bp, Muscodor strobelii
  misc_feature: SGI cDNA ID NO. 561308
  misc_feature: Encodes the peptide sequence at SEQ ID NO 4815
atggcctctcagatcaagaacgtcgccattctcggtgccactggcaacgtaggagcaaatgtcctcaaagccatcctagcaagcggcgcattcaccgtaacagcaatcacccgcccgggctcaacgcatgagtttccaagcggcgtagcaaccaaagaggcagatctctcctctcttgactcgctcgcagccgccttcaaaggtcaagatgccgtggtaaacacaaccaacatcccagacccagcaaccaacattcgcgtcgcggacgccgcaagaagagcaggcgtttaccgcttcattcccgcggactttggccagaatccagagacatgccacacgccagagttctcagtctttgctttcaagaccgcaacccttaagcatctcaaggagacaacgaagtccggtgcaggagaaatgacatggtcagcacttatcaatggaccgttcttggactggaatatggctatcggcttcctgggtattgacctgcctaagaagcaagcccagatcatcaacggaggcgacacagcgacgtactacaccaccctcgagatggttggtcaaggcgtagccggtatcctgctccatcctgctgagaccgtcaatcgacctgtctttgtgaactctgtcgttaagtcacagaatgaactccttgcgcttgctaagcaagctctcggatccgagggctggacggtcaccgaggaagataataaggagaagttcgcttgggctgttgcagaggctgagaagggaaatttcaccttcgatgttgctatgcatcagatccgtaagtgtattgcggatcctgttgttgctaaggggccggcgaatgggtacgataacgagttgttgggtcttaagacgatgtcggatgagcaggtcaaggagatgatgaagagggtcgcagccgggcagtga

SEQ ID NO: 4815 - protein, 306 aa, Muscodor strobelii
  misc_feature: SGI Peptide ID NO. 561308
  misc_feature (6)..(104): Pfam Id: PF01113 Pfam Desc: Dihydrodipicolinate reductase, N-terminus
  misc_feature (8)..(237): Pfam Id: PF05368 Pfam Desc: NmrA-like family
  misc_feature (8)..(74): Pfam Id: PF01370 Pfam Desc: NAD dependent epimerase/dehydratase family
  misc_feature (8)..(122): Pfam Id: PF05368 Pfam Desc: NmrA-like family
  misc_feature (7)..(23): Pfam Id: PF01118 Pfam Desc: Semialdehyde dehydrogenase, NAD binding domain
  misc_feature (1)..(304): NCBI GI: 261358218 Blast Desc: conserved [Verticillium albo-atrum VaMs.102]
  misc_feature (1)..(302): NCBI GI: 119495468 Blast Desc: NmrA-like family protein [Neosartorya fischeri NRRL 181] gi|119412680|gb|EAW22621.1| NmrA-like family protein [Neosartorya fischeri NRRL 181]
  misc_feature (1)..(303): NCBI GI: 70995716 Blast Desc: isoflavone reductase family protein CipA [Aspergillus fumigatus Af293] gi|41581321|emb|CAE47970.1| CipA protein, [Aspergillus fumigatus] gi|66850248|gb|EAL90575.1| isoflavone
  misc_feature (4)..(304): NCBI GI: 238502191 Blast Desc: isoflavone reductase family protein CipA, [Aspergillus flavus NRRL3357] gi|220691139|gb|EED47487.1| isoflavone reductase family protein CipA, [Aspergillus flavus NRRL3357]
  misc_feature (1)..(302): NCBI GI: 256727898 Blast Desc: NECHADRAFT_83486 [Nectria haematococca mpVI 77-13-4]
  misc_feature (1)..(304): NCBI GI: 212538983 Blast Desc: isoflavone reductase family protein CipA, [Penicillium marneffei ATCC 18224] gi|210069389|gb|EEA23480.1| isoflavone reductase family protein CipA, [Penicillium marneffei ATCC 18224]
  misc_feature (1)..(303): NCBI GI: 115397369 Blast Desc: [Aspergillus terreus NIH2624] gi|114192467|gb|EAU34167.1| [Aspergillus terreus NIH2624]
  misc_feature (1)..(303): NCBI GI: 256733742 Blast Desc: NECHADRAFT_67679 [Nectria haematococca mpVI 77-13-4]
  misc_feature (5)..(304): NCBI GI: 242819972 Blast Desc: isoflavone reductase family protein CipA, [Talaromyces stipitatus ATCC 10500] gi|218713887|gb|EED13311.1| isoflavone reductase family protein CipA, [Talaromyces stipitatus ATCC
  misc_feature (1)..(302): NCBI GI: 145246310 Blast Desc: An12g03270 [Aspergillus niger] gi|134080119|emb|CAK46100.1| protein product [Aspergillus niger]
MASQIKNVAILGATGNVGANVLKAILASGAFTVTAITRPGSTHEFPSGVATKEADLSSLDSLAAAFKGQDAVVNTTNIPDPATNIRVADAARRAGVYRFIPADFGQNPETCHTPEFSVFAFKTATLKHLKETTKSGAGEMTWSALINGPFLDWNMAIGFLGIDLPKKQAQIINGGDTATYYTTLEMVGQGVAGILLHPAETVNRPVFVNSVVKSQNELLALAKQALGSEGWTVTEEDNKEKFAWAVAEAEKGNFTFDVAMHQIRKCIADPVVAKGPANGYDNELLGLKTMSDEQVKEMMKRVAAGQ

SEQ ID NO: 4816 - DNA, 456 bp, Muscodor strobelii
  misc_feature: SGI EST ID NO. CUFF.12234.0
  misc_feature: Variant of the nucleotide sequence at SEQ ID NO 4814
actcatgcctggtccgtgatacttgggtaacttaccacatcccagaaacaccacctggttatccaagcatcaacgtcgttgcactcaccgatctcataaacgccacgatggatagactgagttcgaaattagtcctctataatgatttttcagcatcttccggcggaagtaaaagaggaaatggctataaaacatgagagactgcaagcttcaatctcagtctcaatctcaaggacacatcgtgaacagtgaatcgtccattatataattattatcaggtactcatacaaagctcaatacccaacatttcaacagaacaaatggcctctcagatcaagaacgtcgccattctcggtgccactggcaacgtaggagcaaatgtcctcaaagccatcctagcaagcggcgcattcaccgtaacagcaatcacccgcccgggctcaacgcatgagtttc

SEQ ID NO: 4817 - DNA, 699 bp, Muscodor strobelii
  misc_feature: SGI cDNA ID NO. 561309
  misc_feature: Encodes the peptide sequence at SEQ ID NO 4818
atggtctcgaaacttctactcgccgcccttctgttggcgcccaatgccttggctctagtcgctgtgcctaatgaggaacgcgctgccgatgtctacgagcgtcaagaggcaacgccaactcttcctccacttccaactggcactccaggcggaggtaagggcaagggcaagggaagccacagcttcactggaactcctactttctctggcccgccaccctcgggttctcctggcggcgggaaaggcaagggcaagagccattcctggacaccgactgggtcgtggtcgccaccttctggtacgcctagcggcaagggcaaaggaaagcctcctggagctacttcgatccctagcggtcctgagttgcctccgctccctacgccaacgcttagccttcgtaccgaagtagttcccgatccagagcccagtggtgaagtcgagggtaagggaaagggcaaaggcaaaggaaagggtaaaggcaagggcaagggtaaggggaagcccccaaagcctgaggaccctgagacacccgaggatcccgagcctgcccttgacgctcgtgatgaagtagaccccgaccctactgatgtcgagggtaagggcaaaggaaaggggaaaggtaaaggtaaaggcaagggtaaaggcaagggcaaggggaagggaaagccaccggctgatgacactgaggattccgcataa

SEQ ID NO: 4818 - protein, 232 aa, Muscodor strobelii
  misc_feature: SGI Peptide ID NO. 561309
MVSKLLLAALLLAPNALALVAVPNEERAADVYERQEATPTLPPLPTGTPGGGKGKGKGSHSFTGTPTFSGPPPSGSPGGGKGKGKSHSWTPTGSWSPPSGTPSGKGKGKPPGATSIPSGPELPPLPTPTLSLRTEVVPDPEPSGEVEGKGKGKGKGKGKGKGKGKGKPPKPEDPETPEDPEPALDARDEVDPDPTDVEGKGKGKGKGKGKGKGKGKGKGKGKPPADDTEDSA

SEQ ID NO: 4819 - DNA, 1071 bp, Muscodor strobelii
  misc_feature: SGI cDNA ID NO. 561310
  misc_feature: Reduced expression when VOC is produced
  misc_feature: Encodes the peptide sequence at SEQ ID NO 4820
atggactcgaccttcgacgccaaaccttcatcgccgctcggcttcctcgcaactaatcccctcacctccgccgtatccaatgcctacaatgccttctcagacagacgggccaagcttggcctgtccaacccgggcactgtagagacgatcagcaaggaggtcacacgcgatgtctctctcaccaacttcatgcactcgggcctccgtgccgagctgaccaaggctgtcagcctcgcgcctctcttccaagtatcccatcagtttgccatgggcgagcacatgaagccatacacattctctgctctctacggtagcaacagtgtttttctccaaggcagccaggatagcgacggcatcctgtctacgaggttcaactaccgatggtccgataagctcatcaccaagacgtcattccaaattggatccccccaggatatggcctctatcgaccacgagtacacgggcaatgatttcacaacatccgtcaagatgctaaacccatcttatctcgagggtggcttgacgggtatttacattcttagccacctgcagtccgtcaccaagaggctcgccctcggtatcgagtcggtctggcaacgtgctgctctcaaccagccgcctgagtccgccacctcatactgcgttcgatacaaatccgatgactggatcgctgccgcccaactgcatgccgcgcaaggtgctttgaatgccacatattggcgtcggctttccgagaaggttcaggctggtgtcgacatgacgctacaggttgcccccagcccggctatgatgggtggtggcttgcaaaaggagggtgtcaccactgtatccgtcaagtatgacttccggctgtctaccttcagggctcaggtcgactctaagggcaagctcggagttatgctagagaagcgcgttgttcctcctgtcatgatgtccttctgtgccgacgttgaccatatgactcaaaacgccaaggttgggtttggcattaccattgaggccggaggcgaggagctgcaggagcaacaggaggctatgggcgcccaggcctcccctaacattcccttctaa

SEQ ID NO: 4820 - protein, 356 aa, Muscodor strobelii
  misc_feature: SGI Peptide ID NO. 561310
  misc_feature (43)..(327): Pfam Id: PF01459 Pfam Desc: Eukaryotic porin
  misc_feature (1)..(356): NCBI GI: 261351618 Blast Desc: mitochondrial import receptor subunit tom-40 [Verticillium albo-atrum VaMs.102]
  misc_feature (16)..(356): NCBI GI: 46125907 Blast Desc: FG07331.1 [Gibberella zeae PH-1]
  misc_feature (16)..(356): NCBI GI: 256730982 Blast Desc: [Nectria haematococca mpVI 77-13-4]
  misc_feature (11)..(356): NCBI GI: 85103565 Blast Desc: NCU01179 [Neurospora crassa OR74A] gi|127218|sp|P24391.1|TOM40_NEUCR RecName: Full=Mitochondrial import receptor subunit tom-40; AltName: Full=Translocase of 40
  misc_feature (10)..(356): NCBI GI: 39947862 Blast Desc: MGG_08637 [Magnaporthe grisea 70-15] gi|145010260|gb|EDJ94916.1| MGG_08637 [Magnaporthe grisea 70-15]
  misc_feature (3)..(356): NCBI GI: 156048712 Blast Desc: SS1G_09088 [Sclerotinia sclerotiorum 1980] gi|154693484|gb|EDN93222.1| SS1G_09088 [Sclerotinia sclerotiorum 1980]
  misc_feature (10)..(356): NCBI GI: 171693889 Blast Desc: protein product [Podospora anserina] gi|170946893|emb|CAP73697.1| protein product [Podospora anserina]
  misc_feature (3)..(356): NCBI GI: 154297527 Blast Desc: mitochondrial import receptor subunit TOM40 [Botryotinia fuckeliana B05.10] gi|150858556|gb|EDN33748.1| mitochondrial import receptor subunit TOM40 [Botryotinia B05.10]
  misc_feature (1)..(356): NCBI GI: 116199149 Blast Desc: CHGG_07730 [Chaetomium globosum CBS 148.51] gi|88179009|gb|EAQ86477.1| CHGG_07730 [Chaetomium globosum CBS 148.51]
  misc_feature (10)..(356): NCBI GI: 258569635 Blast Desc: mitochondrial import receptor subunit tom-40 [Uncinocarpus reesii 1704] gi|237903891|gb|EEP78292.1| mitochondrial import receptor subunit tom-40 [Uncinocarpus reesii
  misc_feature: Useful for introducing or modulating the production of volatile compounds
MDSTFDAKPSSPLGFLATNPLTSAVSNAYNAFSDRRAKLGLSNPGTVETISKEVTRDVSLTNFMHSGLRAELTKAVSLAPLFQVSHQFAMGEHMKPYTFSALYGSNSVFLQGSQDSDGILSTRFNYRWSDKLITKTSFQIGSPQDMASIDHEYTGNDFTTSVKMLNPSYLEGGLTGIYILSHLQSVTKRLALGIESVWQRAALNQPPESATSYCVRYKSDDWIAAAQLHAAQGALNATYWRRLSEKVQAGVDMTLQVAPSPAMMGGGLQKEGVTTVSVKYDFRLSTFRAQVDSKGKLGVMLEKRVVPPVMMSFCADVDHMTQNAKVGFGITIEAGGEELQEQQEAMGAQASPNIPF

SEQ ID NO: 4821 - DNA, 1967 bp, Muscodor strobelii
  misc_feature: SGI EST ID NO. CUFF.12280.0
  misc_feature: Variant of the nucleotide sequence at SEQ ID NO 4819
cggcaaggtctactagctgggctccagtgaaggcagagagagcatgggtgtgttatttcactgcgcaatactctgtactcgaactgatttttttcggcgggtgctcgtcgtcgactggcttccatttcgtagcacaccacatcccatcgtactcggagccataggccgttcttcttcactgctccgcatcgtgcctgcctcgctcatcgcctgcatgaacgggctgcccttgcagtacatacttaattctttaatttgactcctcacccgcctcctctgtctacagctgcctccccgtcgtctcctctgcatctgcgcctgcgcatccatcccccatcatggactcgaccttcgacgccaaaccttcatcgccgctcggcttcctcgcaactaatcccctcacctccgccgtatccaatgcctacaatgccttctcagacagacgggccaagcttggcctgtccaacccgggcactgtagagacgatcagcaaggaggtcacacgcgatgtctctctcaccaacttcatgcactcgggcctccgtgccgagctgaccaaggctgtcagcctcgcgcctctcttccaagtatcccatcagtttgccatgggcgagcacatgaagccatacacattctctgctctctacggtagcaacagtgtttttctccaaggcagccaggatagcgacggcatcctgtctacgaggttcaactaccgatggtccgataagctcatcaccaagacgtcattccaaattggatccccccaggatatggcctctatcgaccacgagtacacgggcaatgatttcacaacatccgtcaagatgctaaacccatcttatctcgagggtggcttgacgggtatttacattcttagccacctgcagtccgtcaccaagaggctcgccctcggtatcgagtcggtctggcaacgtgctgctctcaaccagccgcctgagtccgccacctcatactgcgttcgatacaaatccgatgactggatcgctgccgcccaactgcatgccgcgcaaggtgctttgaatgccacatattggcgtcggctttccgagaaggttcaggctggtgtcgacatgacgctacaggttgcccccagcccggctatgatgggtggtggcttgcaaaaggagggtgtcaccactgtatccgtcaagtatgacttccggctgtctaccttcagggctcaggtcgactctaagggcaagctcggagttatgctagagaagcgcgttgttcctcctgtcatgatgtccttctgtgccgacgttgaccatatgactcaaaacgccaaggttgggtttggcattaccattgaggccggaggcgaggagctgcaggagcaacaggaggctatgggcgcccaggcctcccctaacattcccttctaagctcgtgtgacgagccacaagctctcctctcccatcgatattgacgacagccgtattgccttggaccttagtgaggcatggtctcgttgatttactcaccccctcttgttttattatccacgcgccgatattcacacccatcggccatgcatcgcatcaatgttcatgataatagacctcttcgcacctggggtctacgtttggatccagcgaggcttctatcctgtagcctcgggattagagggggcttgcggagacaccaggtggaagcgacggtttttgtgtataataggaatctggcgactctagaaaggggaaaattcggcctccacgcatatgatcaccacggacgggcgaactttgaaaggccatcttgtggaatggattgatttgtctacgcgagtaatggagatgaggctgctccaaaaggcacatttgtaaccaactgacctgattgggtactgtacatagtaattccgcgtgtataacatatcatctataactcaagtccgctggtgacattggtgggctgtaacctatcaatttgcggaaccgtga

SEQ ID NO: 4822 - DNA, 1683 bp, Muscodor strobelii
  misc_feature: SGI cDNA ID NO. 561311
  misc_feature: Encodes the peptide sequence at SEQ ID NO 4823
atgccaaaacaacttcatttaggcgatatctgtggcctgggcgatcctcatactgacattgatcttggcggtgatagtacggcagaccttgctgccaatgcgcctaggtacagacgcaaaagcagcacattcatcgatgctatccacgatgttcccgaagacgccaaccgggctccggcccagctttacagcaccatgtcggggagactgttccattccggtcgtattgcaatcgtaatggtcgggcttccagcgagagggaaaacacacatttccgtttccatagcgcgatacttgcaatggttaggggtcaaaacgcgtatcttccacctcggtgactaccgccgtgctacagtcggtgaaggcggcgatgtccctgaggattacttttaccccgacgcgtctcccgcttcggtcgtcctgcgccagaagatcctgaagaaatgtcgtgaggatatatacgcttggcttaatcatgaaaacggtcaagtggctatctatgatgcggtcaatcctacggcgactggtcgttgcgctctcgcaaaagagtttgccaaacacgatgttcagacgcttttcctcgagtcctacgtcgatgatgagaacttgctccgagagaacgcacgaaacgtcaagatcaattctcctgatttcgccgatatggaccctgatgaggcggccaagctatatctacatcgaataaagacaaaaataccttcgttccaaacaatggacgaaatggagctcaactacatcaagatgatcaacgccggccagaagtttttctacaacaatgtctctttcggttatctgtctcaccgcatcgtattcttcctcactaacacgcacataaaatctcgggctacgtatttcgtccgcgccggcgcagctacggttgaagaaaactacaaggcagacgccccgctatccgaggagggattcaggtattccaaggttatggcagacaccttgatacatcacagagagtccgagcacgctgctctcatggcacaaggcgggtctaagatacccctgcgccaactgacagtctggtgttcgacccgcgtgcgcacactccagacatcagacgctttcaaagatcgaggatacaaagtccgccagcgcacgcagatgtcgcagatcaatcccggtgtctgcgagcgcctaagcgagcgcgcgatccgccgtctgtacccagaagaagtcgagaagcatgagatggatccgtatcatcatcggtacccacgtgctgagtcataccacgatctcgcagtgcggctcgagcccatcatcctcgagctggagcgcgagcagaacgatctcgtgattattgctcacgagagcgtcttgcgcgtgctgtactcgtacctcatgcactgcagcactagggatattccgcagttgaagtttccgaggaacgagatcattgagatcaagccagctgcgtaccagaatgaagccaaacgtatacagatccctggtctagacccgaagactgtccctggctcgccggaggatattcggatccctgtgcctgatagtggggttgagacaccggttgtgttacctggcggtggactttcgtcccctgctgagcctgtcgttaacaatgagaaaccgcccgagagggtcgtgaatgctgccgccgaagctgtcatggacaagattacggatgtggactag

SEQ ID NO: 4823 - protein, 560 aa, Muscodor strobelii
  misc_feature: SGI Peptide ID NO. 561311
  misc_feature (63)..(286): Pfam Id: PF01591 Pfam Desc: 6-phosphofructo-2-kinase
  misc_feature (288)..(453): Pfam Id: PF00300 Pfam Desc: Phosphoglycerate mutase family
  misc_feature (27)..(560): NCBI GI: 116199151 Blast Desc: 6-phosphofructo-2-kinase, [Chaetomium globosum CBS 148.51] gi|88179010|gb|EAQ86478.1| 6-phosphofructo-2-kinase, [Chaetomium globosum CBS 148.51]
  misc_feature (27)..(560): NCBI GI: 171693891 Blast Desc: protein product [Podospora anserina] gi|170946894|emb|CAP73698.1| protein product [Podospora anserina]
  misc_feature (27)..(560): NCBI GI: 18376290 Blast Desc: related to 6-phosphofructo-2-kinase/fructose-2, 6-bisphosphate 2-phosphatase [Neurospora crassa]
  misc_feature (1)..(560): NCBI GI: 145601747 Blast Desc: MGG_08636 [Magnaporthe grisea 70-15] gi|145010259|gb|EDJ94915.1| MGG_08636 [Magnaporthe grisea 70-15]
  misc_feature (27)..(560): NCBI GI: 85103561 Blast Desc: NCU01178 [Neurospora crassa OR74A] gi|28923091|gb|EAA32308.1| conserved [Neurospora crassa OR74A]
  misc_feature (27)..(531): NCBI GI: 154297525 Blast Desc: 6-phosphofructo-2-kinase/fructose-2,6-bisphosphatase [Botryotinia fuckeliana B05.10] gi|150858555|gb|EDN33747.1| 6-phosphofructo-2-kinase/fructose-2,6-bisphosphatase [Botryotinia
  misc_feature (25)..(560): NCBI GI: 261351619 Blast Desc: 6-phosphofructo-2-kinase/fructose-2,6-biphosphatase [Verticillium albo-atrum VaMs.102]
  misc_feature (27)..(553): NCBI GI: 238493990 Blast Desc: 6-phosphofructo-2-kinase, [Aspergillus flavus NRRL3357] gi|220694881|gb|EED51224.1| 6-phosphofructo-2-kinase, [Aspergillus flavus NRRL3357]
  misc_feature (27)..(553): NCBI GI: 145250091 Blast Desc: An15g00200 [Aspergillus niger] gi|134082072|emb|CAK42189.1| protein product [Aspergillus niger]
  misc_feature (27)..(560): NCBI GI: 46125905 Blast Desc: FG07330.1 [Gibberella zeae PH-1]
  misc_feature (45)..(493): SWISSPROT Homolog: EC 3.1.3.46 Fructose-2,6-bisphosphate 2-phosphatase
  misc_feature (45)..(493): SWISSPROT Homolog: EC 2.7.1.105 6-phosphofructo-2-kinase
MPKQLHLGDICGLGDPHTDIDLGGDSTADLAANAPRYRRKSSTFIDAIHDVPEDANRAPAQLYSTMSGRLFHSGRIAIVMVGLPARGKTHISVSIARYLQWLGVKTRIFHLGDYRRATVGEGGDVPEDYFYPDASPASVVLRQKILKKCREDIYAWLNHENGQVAIYDAVNPTATGRCALAKEFAKHDVQTLFLESYVDDENLLRENARNVKINSPDFADMDPDEAAKLYLHRIKTKIPSFQTMDEMELNYIKMINAGQKFFYNNVSFGYLSHRIVFFLTNTHIKSRATYFVRAGAATVEENYKADAPLSEEGFRYSKVMADTLIHHRESEHAALMAQGGSKIPLRQLTVWCSTRVRTLQTSDAFKDRGYKVRQRTQMSQINPGVCERLSERAIRRLYPEEVEKHEMDPYHHRYPRAESYHDLAVRLEPIILELEREQNDLVIIAHESVLRVLYSYLMHCSTRDIPQLKFPRNEIIEIKPAAYQNEAKRIQIPGLDPKTVPGSPEDIRIPVPDSGVETPVVLPGGGLSSPAEPVVNNEKPPERVVNAAAEAVMDKITDVD

SEQ ID NO: 4824 - DNA, 3204 bp, Muscodor strobelii
  misc_feature: SGI EST ID NO. CUFF.12249.0
  misc_feature: Variant of the nucleotide sequence at SEQ ID NO 4822
agtggacaacatgctgactagcctagatttccaagctcatattcttcattgacaagatgacgtgatacccaaaatatgaagtaggagaacacggagaaaggatggatgcagagattcagtgcggttgacagccctgacaggtgtcgatgtcattcacttaacgccccattgataagacgaaacgtcctaactgattacctaattgaagttcctgtcaatcgggaactctaacgtctgagtgcttgaatggtgacatcccaccattggtgcacgtgaatctattcaccacttatcacttatcgcatctggctcagacataatgaaagatatttgagactcttacaggctcgacgcctaggctcttgattcttcaacaaattataaaattctgagacaaagacgggaatttgctatttgcatcacctcgaaatcctcaccgttagctgcccctcagtgcagtccaaacctacccttcccgatttgtcccgagggtaacccttgccgcatatacacgcacatcacatcgcacttgcttcactctcgctgcatttgcttgagaccgcaggcgctcagattactgtcgtccaattcagatcttccgaagttgcatcttaatcaacaatttactttcaggtccgacctctcattcaatccgaacctacctaacttggcatccctgattttgttgcccgcccttctccagcattctttgttcatgtgtatacacatttacaaagtatcgattatttcgatatacctacagactggattccatagcgcagactcacctattagttacaacggatattcctggtgactctctcacgttgccattgagacacaagtactaggttgttgtcattgcggaactaagtgccggctccaaattttctaagcaatcaggaaggtcttcttcgtcgtcatggataccttactgtaagtccgctgttacttcttcatttcttcgttcctatttctggagagacttcgggggaaaggcaactattacggtcatggggccagggcagtcacgcgctcggaagatgatttttcatttgggagagagcaaccaacattcttggatgcgttcaaaatttcacgaaagtagcatttgtatgctggtttcaatggtggctggactaacaatgatcatacactccgtctcactatatcatattttgtgacacttagattacacttgtttattataaatgcgtctcgcttaggcttgcatccccatcttgttctacctgcatacatactgaacaaacgtatgactcgcaactatgccaaaacaacttcatttaggcgatatctgtggcctgggcgatcctcatactgacattgatcttggcggtgatagtacggcagaccttgctgccaatgcgcctaggtacagacgcaaaagcagcacattcatcgatgctatccacgatgttcccgaagacgccaaccgggctccggcccagctttacagcaccatgtcggggagactgttccattccggtcgtattgcaatcgtaatggtcgggcttccagcgagagggaaaacacacatttccgtttccatagcgcgatacttgcaatggttaggggtcaaaacgcgtatcttccacctcggtgactaccgccgtgctacagtcggtgaaggcggcgatgtccctgaggattacttttaccccgacgcgtctcccgcttcggtcgtcctgcgccagaagatcctgaagaaatgtcgtgaggatatatacgcttggcttaatcatgaaaacggtcaagtggctatctatgatgcggtcaatcctacggcgactggtcgttgcgctctcgcaaaagagtttgccaaacacgatgttcagacgcttttcctcgagtcctacgtcgatgatgagaacttgctccgagagaacgcacgaaacgtcaagatcaattctcctgatttcgccgatatggaccctgatgaggcggccaagctatatctacatcgaataaagacaaaaataccttcgttccaaacaatggacgaaatggagctcaactacatcaagatgatcaacgccggccagaagtttttctacaacaatgtctctttcggttatctgtctcaccgcatcgtattcttcctcactaacacgcacataaaatctcgggctacgtatttcgtccgcgccggcgcagctacggttgaagaaaactacaaggcagacgccccgctatccgaggagggattcaggtattccaaggttatggcagacaccttgatacatcacagagagtccgagcacgctgctctcatggcacaaggcgggtctaagatacccctgcgccaactgacagtctggtgttcgacccgcgtgcgcacactccagacatcagacgctttcaaagatcgaggatacaaagtccgccagcgcacgcagatgtcgcagatcaatcccggtgtctgcgagcgcctaagcgagcgcgcgatccgccgtctgtacccagaagaagtcgagaagcatgagatggatccgtatcatcatcggtacccacgtgctgagtcataccacgatctcgcagtgcggctcgagcccatcatcctcgagctggagcgcgagcagaacgatctcgtgattattgctcacgagagcgtcttgcgcgtgctgtactcgtacctcatgcactgcagcactagggatattccgcagttgaagtttccgaggaacgagatcattgagatcaagccagctgcgtaccagaatgaagccaaacgtatacagatccctggtctagacccgaagactgtccctggctcgccggaggatattcggatccctgtgcctgatagtggggttgagacaccggttgtgttacctggcggtggactttcgtcccctgctgagcctgtcgttaacaatgagaaaccgcccgagagggtcgtgaatgctgccgccgaagctgtcatggacaagattacggatgtggactagacacgtgtggcatacatctcttttgtcgcgtatagacggtcggtctggggctatgggaaggaggagtgttgcatggctgggcgagggttataggtatttataggtactctcgtttggtgtttctctggcataaggatgcaatgcacttgctagtcgtccatacataagtcctaaataggaatactttcaccaatccgaagacgctcagatcaaatatcagagcgtcagagctcgc

SEQ ID NO: 4825 - DNA, 1326 bp, Muscodor strobelii
  misc_feature: SGI cDNA ID NO. 561312
  misc_feature: Encodes the peptide sequence at SEQ ID NO 4826
atggctttcttcgatatttccaacgccggcatcgccactatcccgatatctctctttcttgcgtggtatgttacatcagccatctattgctggcaaagacttcgccatatacctggcccacatctcgcgtggacatatctcttcgtggccaaagccgcctggtatgggacgcaatatgaggactatttcgatctgaagaagaaatacgggccgatcgcgagagttggcccttcggacgtcaatctactcgaagcaggcccccatgacaagaagaaggcgaagttaacacccggatactcgggtcgcgatactgccggactcgaagccgccgtagactctcaacttgcgagcctcgtcgacctaatcaaaaggaagtatgtccatgcactacatggcagtttcgtacccatggacttggcagcagtgatgcccctgttcactttagatgtcatttctctgcttgccctagtgatgtgcctgactacagaagttccttggatacgccgtttgatatattcgtctctcggtctgaagtttatggggccgaaggagacggataagaagggtctcggagcacttatgaagatggcaaatgacaaggttcgggagcgatatggtcctgatgcgaagcacaaggatgatcttctaggctcattcgtacgtaatggacttacgcagtcagaatctgaagtcgagaccctcttcctattcatcgcaggctcagacaccactgcgggtgctctcaagacaacaatgctatatctcttgagcaatcccattgcatacctaaaactaagagaagaaatacattcggcggttcgagatggaattgtgtcatcgcctatcacatttgcagaagccaagacgcttccttacttacaggcagtcatatacgagggtctgcgaatccgtcccataacgacccaccgactcagcaaactcgtccctcccgagggcgacgtactggccgggcaatttatccccggtggaacatcaatcggcattaacttcgcagccttgatgcgagatacgactcttttcggcgatgacgctcacctatttcgacccgaaaggtatctcgaggtggattcggcgactcgcgcagaaatgtaccgtaatgttgagctcgattttggctatggtcgatggatgtgctctgggaaaaatattgcttttatggagttgaataagactatctttgagctgttgcgtgaattcgacttcagtctggtagatcctactagtattacttggtctcgtagtcatggaacctggttggaccgaggttggtacgtccgtgtgacggagagcaatataaagggttga

SEQ ID NO: 4826 - protein, 441 aa, Muscodor strobelii
  misc_feature: SGI Peptide ID NO. 561312
  misc_feature (38)..(434): Pfam Id: PF00067 Pfam Desc: Cytochrome P450
  misc_feature (236)..(416): Pfam Id: PF00067 Pfam Desc: Cytochrome P450
  misc_feature (9)..(435): NCBI GI: 46109770 Blast Desc: FG01767.1 [Gibberella zeae PH-1]
  misc_feature (22)..(438): NCBI GI: 51490962 Blast Desc: cytochrome P450 monooxygenase [Botryotinia fuckeliana]
  misc_feature (19)..(402): NCBI GI: 154309274 Blast Desc: BC1G_07531 [Botryotinia fuckeliana B05.10] gi|150852355|gb|EDN27547.1| BC1G_07531 [Botryotinia fuckeliana B05.10]
  misc_feature (16)..(436): NCBI GI: 39972649 Blast Desc: cytochrome P450 monooxygenase, [Magnaporthe grisea 70-15] gi|145016837|gb|EDK01267.1| cytochrome P450 monooxygenase, [Magnaporthe grisea 70-15]
  misc_feature (5)..(438): NCBI GI: 171680444 Blast Desc: protein product [Podospora anserina] gi|170939849|emb|CAP65074.1| protein product [Podospora anserina]
  misc_feature (2)..(440): NCBI GI: 85111238 Blast Desc: NCU08112 [Neurospora crassa OR74A] gi|28925582|gb|EAA34606.1| [Neurospora crassa OR74A]
  misc_feature (6)..(435): NCBI GI: 169615603 Blast Desc: SNOG_10960 [Phaeosphaeria nodorum SN15] gi|111060339|gb|EAT81459.1| SNOG_10960 [Phaeosphaeria nodorum SN15]
  misc_feature (10)..(441): NCBI GI: 85094228 Blast Desc: NCU05848 [Neurospora crassa OR74A] gi|28921295|gb|EAA30603.1| [Neurospora crassa OR74A]
  misc_feature (2)..(438): NCBI GI: 256723424 Blast Desc: NECHADRAFT_80996 [Nectria haematococca mpVI 77-13-4]
  misc_feature (28)..(435): NCBI GI: 171678209 Blast Desc: protein product [Podospora anserina] gi|170937174|emb|CAP61831.1| protein product [Podospora anserina]
MAFFDISNAGIATIPISLFLAWYVTSAIYCWQRLRHIPGPHLAWTYLFVAKAAWYGTQYEDYFDLKKKYGPIARVGPSDVNLLEAGPHDKKKAKLTPGYSGRDTAGLEAAVDSQLASLVDLIKRKYVHALHGSFVPMDLAAVMPLFTLDVISLLALVMCLTTEVPWIRRLIYSSLGLKFMGPKETDKKGLGALMKMANDKVRERYGPDAKHKDDLLGSFVRNGLTQSESEVETLFLFIAGSDTTAGALKTTMLYLLSNPIAYLKLREEIHSAVRDGIVSSPITFAEAKTLPYLQAVIYEGLRIRPITTHRLSKLVPPEGDVLAGQFIPGGTSIGINFAALMRDTTLFGDDAHLFRPERYLEVDSATRAEMYRNVELDFGYGRWMCSGKNIAFMELNKTIFELLREFDFSLVDPTSITWSRSHGTWLDRGWYVRVTESNIKG

SEQ ID NO: 4827 - DNA, 1097 bp, Muscodor strobelii
  misc_feature: SGI EST ID NO. CUFF.12258.0
  misc_feature: Variant of the nucleotide sequence at SEQ ID NO 4825
ggcttctacaacgcgcttcagcaacactgccagtgatgtgcctgactacagaagttccttggatacgccgtttgatatattcgtctctcggtctgaagtttatggggccgaaggagacggataagaagggtctcggagcacttatgaagatggcaaatgacaaggttcgggagcgatatggtcctgatgcgaagcacaaggatgatcttctaggctcattcgtacgtaatggacttacgcagtcagaatctgaagtcgagaccctcttcctattcatcgcaggctcagacaccactgcgggtgctctcaagacaacaatgctatatctcttgagcaatcccattgcatacctaaaactaagagaagaaatacattcggcggttcgagatggaattgtgtcatcgcctatcacatttgcagaagccaagacgcttccttacttacaggcagtcatatacgagggtctgcgaatccgtcccataacgacccaccgactcagcaaactcgtccctcccgagggcgacgtactggccgggcaatttatccccggtggaacatcaatcggcattaacttcgcagccttgatgcgagatacgactcttttcggcgatgacgctcacctatttcgacccgaaaggtatctcgaggtggattcggcgactcgcgcagaaatgtaccgtaatgttgagctcgattttggctatggtcgatggatgtgctctgggaaaaatattgcttttatggagttgaataagactatctttgagctgttgcgtgaattcgacttcagtctggtagatcctactagtattacttggtctcgtagtcatggaacctggttggaccgaggttggtacgtccgtgtgacggagagcaatataaagggttgaatacaggacgaggtctcggatatctggttcgtcaatggagcaacaagaacgatatcgactgaacatgcatggaaattaataaggataaagaagtagcgacgatcatagcgtgtgcggcaatttggattatgcaataatttcacgggcatgctcagatcaagagtgtaggctaagagttgacacctcgacttaaatctcttacgcgaa

SEQ ID NO: 4828 - DNA, 1212 bp, Muscodor strobelii
  misc_feature: SGI cDNA ID NO. 561313
  misc_feature: Encodes the peptide sequence at SEQ ID NO 4829
atggctttcttcgatatttccaacgccggcatcgccactatcccgatatctctctttcttgcgtggtatgttacatcagccatctattgctggcaaagacttcgccatatacctggcccacatctcgcgtggacatatctcttcgtggccaaagccgcctggtatgggacgcaatatgaggactatttcgatctgaagaagaaatacgggccgatcgcgagagttggcccttcggacgtcaatctactcgaagcaggcccccatgacaagaagaaggcgaagttaacacccggatactcgggtcgcgatactgccggactcgaagccgccgtagactctcaacttgcgagcctcgtcgacctaatcaaaaggaagtatgtccatgcactacatggcagtttcgtacccatggacttggcagcagtgatgcccctgttcactttagatgtcatttctctgcttgccctagaagttccttggatacgccgtttgatatattcgtctctcggtctgaagtttatggggccgaaggagacggataagaagggtctcggagcacttatgaagatggcaaatgacaaggttcgggagcgatatggtcctgatgcgaagcacaaggatgatcttctaggctcattcgtacgtaatggacttacgcagtcagaatctgaagtcgagaccctcttcctattcatcgcaggctcagacaccactgcgggtgctctcaagacaacaatgctatatctcttgagcaatcccattgcatacctaaaactaagagaagaaatacattcggcggttcgagatggaattgtgtcatcgcctatcacatttgcagaagccaagacgcttccttacttacaggcagtcatatacgagggtctgcgaatccgtcccataacgacccaccgactcagcaaactcgtccctcccgagggcgacgtactggccgggcaatttatccccggtggaacatcaatcggcattaacttcgcagccttgatgcgagatacgactcttttcggcgatgacgctcacctatttcgacccgaaaggtatctcgaggtggattcggcgactcgcgcagaaatgtaccgtaatgttgagctcgattttggctatggtcgatggatgtgctctgggaaaaatattgcttttatggagttgaataagactatctttgaggtacgttccctgtatctcattcattaa

SEQ ID NO: 4829 - protein, 403 aa, Muscodor strobelii
  misc_feature: SGI Peptide ID NO. 561313
  misc_feature (38)..(403): Pfam Id: PF00067 Pfam Desc: Cytochrome P450
  misc_feature (230)..(355): Pfam Id: PF00067 Pfam Desc: Cytochrome P450
  misc_feature (9)..(396): NCBI GI: 46109770 Blast Desc: FG01767.1 [Gibberella zeae PH-1]
  misc_feature (19)..(398): NCBI GI: 154309274 Blast Desc: BC1G_07531 [Botryotinia fuckeliana B05.10] gi|150852355|gb|EDN27547.1| BC1G_07531 [Botryotinia fuckeliana B05.10]
  misc_feature (22)..(396): NCBI GI: 51490962 Blast Desc: cytochrome P450 monooxygenase [Botryotinia fuckeliana]
  misc_feature (5)..(396): NCBI GI: 171680444 Blast Desc: protein product [Podospora anserina] gi|170939849|emb|CAP65074.1| protein product [Podospora anserina]
  misc_feature (16)..(396): NCBI GI: 39972649 Blast Desc: cytochrome P450 monooxygenase, [Magnaporthe grisea 70-15] gi|145016837|gb|EDK01267.1| cytochrome P450 monooxygenase, [Magnaporthe grisea 70-15]
  misc_feature (2)..(396): NCBI GI: 85111238 Blast Desc: NCU08112 [Neurospora crassa OR74A] gi|28925582|gb|EAA34606.1| [Neurospora crassa OR74A]
  misc_feature (20)..(395): NCBI GI: 116194093 Blast Desc: CHGG_06764 [Chaetomium globosum CBS 148.51] gi|88182677|gb|EAQ90145.1| CHGG_06764 [Chaetomium globosum CBS 148.51]
  misc_feature (18)..(396): NCBI GI: 170940350 Blast Desc: protein product [Podospora anserina]
  misc_feature (20)..(395): NCBI GI: 85094228 Blast Desc: NCU05848 [Neurospora crassa OR74A] gi|28921295|gb|EAA30603.1| [Neurospora crassa OR74A]
  misc_feature (6)..(396): NCBI GI: 169615603 Blast Desc: SNOG_10960 [Phaeosphaeria nodorum SN15] gi|111060339|gb|EAT81459.1| SNOG_10960 [Phaeosphaeria nodorum SN15]
MAFFDISNAGIATIPISLFLAWYVTSAIYCWQRLRHIPGPHLAWTYLFVAKAAWYGTQYEDYFDLKKKYGPIARVGPSDVNLLEAGPHDKKKAKLTPGYSGRDTAGLEAAVDSQLASLVDLIKRKYVHALHGSFVPMDLAAVMPLFTLDVISLLALEVPWIRRLIYSSLGLKFMGPKETDKKGLGALMKMANDKVRERYGPDAKHKDDLLGSFVRNGLTQSESEVETLFLFIAGSDTTAGALKTTMLYLLSNPIAYLKLREEIHSAVRDGIVSSPITFAEAKTLPYLQAVIYEGLRIRPITTHRLSKLVPPEGDVLAGQFIPGGTSIGINFAALMRDTTLFGDDAHLFRPERYLEVDSATRAEMYRNVELDFGYGRWMCSGKNIAFMELNKTIFEVRSLYLIH

SEQ ID NO: 4830 - DNA, 1097 bp, Muscodor strobelii; identical to SEQ ID NO: 4827
  misc_feature: SGI EST ID NO. CUFF.12258.0
  misc_feature: Variant of the nucleotide sequence at SEQ ID NO 4828

SEQ ID NO: 4831 - DNA, 2439 bp, Muscodor strobelii
  misc_feature: SGI cDNA ID NO. 561314
  misc_feature: Encodes the peptide sequence at SEQ ID NO 4832
atgtcagccaatctgcccaagagatttctctcccggcgggaaaagaacgggcatcgtcgcggcaagtcgtctgatggcactcaaaagcatcgccctatatcctccgaagctttttttgcactattcaaaccgggcggcgcgaaacaccatgcagaggaagaaggagaaagcgagaaggagaaggaagagcaggtagaaatagagcccgccaagatcgcagaggtgcgacaaaagctcgccgatgccaatatagaaattagtaccctccgagatgaccacatccaatacgctctcaacctgaggagctgctacatggatgtcgacaaggcaatcgaaatcatactccttcagcagacatccattgcagggaacataattcgttacaatccggccgttcacatgctgggcgctgaaaacagggagaacgtcacatgctatctcgatgctttgcttttcgccatgtttgccaaaatcgagtcctttgaatgcatgctcaaacaggacaatctcgatgagcctcggagaaaacttgcgatcttattgcggctgtgggtgaacatgctgagaagtggtaaattgatcgaaaccgacataacacatcacttgcaagacgctctggccgattgcggctggtcggaggcaaagctcatagaacagcaagatacgtcagaagcttttgccttcatcaccgagacactgcagctgcccctccttcctttgcaagtcgatttattccatcatgggcaaaaagacgaggcagatcacagagtggtatatgagagattgctgaacattgcagtcccatccgaaaccgaggggaagggcatcaggctggaagactgcctggaagaatatttcaactcacaagtcgatgtgttacgagatagtctagaggagaaggccaaagtggaacatgttgagctattgacacccacagatcctacgagcaacaccttagatatctcgaggtctccaagatctgcgatacgtattgtggaagcagaggttgcgtcgggatcggcttcgccattacccatggacaatgagcagagcataatccaagagcgacattgggcgccggtgcctgatacggatcaggaaccaagcgtctcaagccctgtatctcagtcgactatgcgaccgctccgcagcaggactgaaagcatcattcagagagttgttattgacgacaagaaaccgtcgagcattgatgacatcaacttatttccgagaactgaaaagacagcttctgttgtgaaagcggtcacaatccctgcttggcagttcttccggttaataccctggcactcgtctggcaatgaccagccacaaagcgacttggaagtcgcgcgccacttcaaccagcgtccggtattaggcatatgtctcaaacgctatatgatggacagtaaaggcgagatgaagcgtcaaaacacatacatcgatattccggagagccttggactgccgcgtttcatcgtggatgacagggtcgaagaagagggaggtttaatgtcagagtataaactcgttttgcaatcagtggtatgccatcgcggcgattccctacacgctgggcattacatatcattctgtcgagttgcacccaaatttctcacagacaaccggcgacacgagagcgatccacctcccgactatgaggaagcccaatgggtcaaattcgacgatctggcaagtgaaaggataacgactattgatgacatcaaacagtcactcaaggaggagatgccttacttactattctatcaaatcgtacccatcgtagacgttgcagctagttcgaccgacgacaacgaaccggaaccgccagcatacgacgacactgcgccacaagttgttacgtcggatgctgatttcgtagctccatcgagtacggccagcagctacttcgaaagcgccgtcattccttcgacgacggctagtattcgcttttcgaacgagttggagcggccaccacgtcgcagcttcgctgatgaggatggataccttagtgtctcaaggcccgatagcactttctttgctgaaccattatctgctggttcggcagtgacttctgccgatccgtcgcccgcagtcagtcctgccgaagagacgacggcccagcgacttagccgcgctgctgcgaagctcagagcaaatagcaagagccggcctggaagccaaggtgccgaaggccgaattagcataacaatgtcgaggctcggcttattaaagggtagccgagagcccttacgagactcgacttctgatgatactgatcttaatcccgatgagatcaatgggcaaagcaaagaggcactcgcgtctaaaaacggcaaggggaaggagaaagaagcgggccacagaagaggcaagtccaagacgcgcgtagacaaggaaaagacgaaagaaccagaccgcgagtgcatcgtgcagtag

SEQ ID NO: 4832 - protein, 812 aa, Muscodor strobelii
  misc_feature: SGI Peptide ID NO. 561314
  misc_feature (142)..(589): Pfam Id: PF00443 Pfam Desc: Ubiquitin carboxyl-terminal hydrolase
  misc_feature (457)..(589): Pfam Id: PF00443 Pfam Desc: Ubiquitin carboxyl-terminal hydrolase
  misc_feature (31)..(788): NCBI GI: 85103568 Blast Desc: NCU01180 [Neurospora crassa OR74A] gi|18376288|emb|CAD21401.1| [Neurospora crassa] gi|28923093|gb|EAA32310.1| conserved [Neurospora crassa OR74A]
  misc_feature (5)..(781): NCBI GI: 46125909 Blast Desc: FG07332.1 [Gibberella zeae PH-1]
  misc_feature (13)..(811): NCBI GI: 261351620 Blast Desc: ubiquitin C-terminal hydrolase family protein [Verticillium albo-atrum VaMs.102]
  misc_feature (1)..(811): NCBI GI: 145601749 Blast Desc: MGG_08638 [Magnaporthe grisea 70-15] gi|145010261|gb|EDJ94917.1| MGG_08638 [Magnaporthe grisea 70-15]
  misc_feature (5)..(801): NCBI GI: 171693877 Blast Desc: protein product [Podospora anserina] gi|170946887|emb|CAP73691.1| protein product [Podospora anserina]
  misc_feature (2)..(792): NCBI GI: 116199147 Blast Desc: CHGG_07729 [Chaetomium globosum CBS 148.51] gi|88179008|gb|EAQ86476.1| CHGG_07729 [Chaetomium globosum CBS 148.51]
  misc_feature (8)..(811): NCBI GI: 169765137 Blast Desc: [Aspergillus oryzae RIB40] gi|83764894|dbj|BAE55038.1| protein product [Aspergillus oryzae]
  misc_feature (8)..(811): NCBI GI: 119498473 Blast Desc: ubiquitin C-terminal hydrolase family protein [Neosartorya fischeri NRRL 181] gi|119414158|gb|EAW24097.1| ubiquitin C-terminal hydrolase family protein [Neosartorya NRRL
  misc_feature (60)..(811): NCBI GI: 115438216 Blast Desc: conserved [Aspergillus terreus NIH2624] gi|114188824|gb|EAU30524.1| conserved [Aspergillus terreus NIH2624]
  misc_feature (8)..(811): NCBI GI: 146324067 Blast Desc: ubiquitin C-terminal hydrolase family protein [Aspergillus fumigatus Af293] gi|129558085|gb|EAL91951.2| ubiquitin C-terminal hydrolase family protein [Aspergillus Af293]
MSANLPKRFLSRREKNGHRRGKSSDGTQKHRPISSEAFFALFKPGGAKHHAEEEGESEKEKEEQVEIEPAKIAEVRQKLADANIEISTLRDDHIQYALNLRSCYMDVDKAIEIILLQQTSIAGNIIRYNPAVHMLGAENRENVTCYLDALLFAMFAKIESFECMLKQDNLDEPRRKLAILLRLWVNMLRSGKLIETDITHHLQDALADCGWSEAKLIEQQDTSEAFAFITETLQLPLLPLQVDLFHHGQKDEADHRVVYERLLNIAVPSETEGKGIRLEDCLEEYFNSQVDVLRDSLEEKAKVEHVELLTPTDPTSNTLDISRSPRSAIRIVEAEVASGSASPLPMDNEQSIIQERHWAPVPDTDQEPSVSSPVSQSTMRPLRSRTESIIQRVVIDDKKPSSIDDINLFPRTEKTASVVKAVTIPAWQFFRLIPWHSSGNDQPQSDLEVARHFNQRPVLGICLKRYMMDSKGEMKRQNTYIDIPESLGLPRFIVDDRVEEEGGLMSEYKLVLQSVVCHRGDSLHAGHYISFCRVAPKFLTDNRRHESDPPPDYEEAQWVKFDDLASERITTIDDIKQSLKEEMPYLLFYQIVPIVDVAASSTDDNEPEPPAYDDTAPQVVTSDADFVAPSSTASSYFESAVIPSTTASIRFSNELERPPRRSFADEDGYLSVSRPDSTFFAEPLSAGSAVTSADPSPAVSPAEETTAQRLSRAAAKLRANSKSRPGSQGAEGRISITMSRLGLLKGSREPLRDSTSDDTDLNPDEINGQSKEALASKNGKGKEKEAGHRRGKSKTRVDKEKTKEPDRECIVQ

SEQ ID NO: 4833 - DNA, 3875 bp, Muscodor strobelii
  misc_feature: SGI EST ID NO. CUFF.12277.0
  misc_feature: Variant of the nucleotide sequence at SEQ ID NO 4831
attatattgaaaaggatttctagacgaattaccacgcctacttgaaacagtgacagccctacttgcttactgaagcttgcatcctgatcatggggactcagaatacccagagtgactagtcatccagctgctatgatgtcaggcacaactccagacagacagagtttgctgagatgggactaaagggaaagacccgaggcaaacggatactaacgttggtatgttgatattgacgttattgggtacatgtagttctgtcaactcattttattttcaacctcttgccgaattgcatcctttttaacttattgctttcgtccacctatattcttcaagcttggattaggattctttcgccaggctcgccatttatatacgctccagagctgtcctggcaatatcgcttgcgagacctacagctacatcttaacccctccactgccccccagccgtaaaataaagcaacacaccgtatccagctcctcggtgcactttgatccgcctcgccgcttgacaaaatattagtgtgttgaatcgagtattccgcagctgaaatgatgtgttgacctacctatctaccaccacaagcaatttcgtctgcctaaatcgctgaattgaattcacccaaattttccgcatcacttgatctcagcttctcatatgaccggccagtgacacgatcgatcgactccaattctctcctcatccagcgtttggttcagatcggtccacatctccatctcgcggacccctagattcagcccggacgcgaaagcaacccccgccacacgaggggaacgcgcagatccaagaatccgagacttacatcacctctccgtctccgtctgtcgtaaacctcgtacgagacgaagtgtcgaaaatattattccgtttcttcaaaacatccttcggccactctctcaaccgccacttagcgcttcaagcgcatttgctatagacgttcaatttcgcgagtcgtcaaacggacccagcagtctttgcggggcatcttctggaccctgtcgactcccgtcgcaccaatcttttaactatgaaaagttgaatctgaaaacttcgcgcatcggttggtcatagccgctggatatcgttgcttccgagtccatcggacaagctcgcaggagggccttcttgccagcccgatcacccagcgcctgtccacggctgcgacgccaccatgtcagccaatctgcccaagagatttctctcccggcgggaaaagaacgggcatcgtcgcggcaagtcgtctgatggcactcaaaagcatcgccctatatcctccgaagctttttttgcactattcaaaccgggcggcgcgaaacaccatgcagaggaagaaggagaaagcgagaaggagaaggaagagcaggtagaaatagagcccgccaagatcgcagaggtgcgacaaaagctcgccgatgccaatatagaaattagtaccctccgagatgaccacatccaatacgctctcaacctgaggagctgctacatggatgtcgacaaggcaatcgaaatcatactccttcagcagacatccattgcagggaacataattcgttacaatccggccgttcacatgctgggcgctgaaaacagggagaacgtcacatgctatctcgatgctttgcttttcgccatgtttgccaaaatcgagtcctttgaatgcatgctcaaacaggacaatctcgatgagcctcggagaaaacttgcgatcttattgcggctgtgggtgaacatgctgagaagtggtaaattgatcgaaaccgacataacacatcacttgcaagacgctctggccgattgcggctggtcggaggcaaagctcatagaacagcaagatacgtcagaagcttttgccttcatcaccgagacactgcagctgcccctccttcctttgcaagtcgatttattccatcatgggcaaaaagacgaggcagatcacagagtggtatatgagagattgctgaacattgcagtcccatccgaaaccgaggggaagggcatcaggctggaagactgcctggaagaatatttcaactcacaagtcgatgtgttacgagatagtctagaggagaaggccaaagtggaacatgttgagctattgacacccacagatcctacgagcaacaccttagatatctcgaggtctccaagatctgcgatacgtattgtggaagcagaggttgcgtcgggatcggcttcgccattacccatggacaatgagcagagcataatccaagagcgacattgggcgccggtgcctgatacggatcaggaaccaagcgtctcaagccctgtatctcagtcgactatgcgaccgctccgcagcaggactgaaagcatcattcagagagttgttattgacgacaagaaaccgtcgagcattgatgacatcaacttatttccgagaactgaaaagacagcttctgttgtgaaagcggtcacaatccctgcttggcagttcttccggttaataccctggcactcgtctggcaatgaccagccacaaagcgacttggaagtcgcgcgccacttcaaccagcgtccggtattaggcatatgtctcaaacgctatatgatggacagtaaaggcgagatgaagcgtcaaaacacatacatcgatattccggagagccttggactgccgcgtttcatcgtggatgacagggtcgaagaagagggaggtttaatgtcagagtataaactcgttttgcaatcagtggtatgccatcgcggcgattccctacacgctgggcattacatatcattctgtcgagttgcacccaaatttctcacagacaaccggcgacacgagagcgatccacctcccgactatgaggaagcccaatgggtcaaattcgacgatctggcaagtgaaaggataacgactattgatgacatcaaacagtcactcaaggaggagatgccttacttactattctatcaaatcgtacccatcgtagacgttgcagctagttcgaccgacgacaacgaaccggaaccgccagcatacgacgacactgcgccacaagttgttacgtcggatgctgatttcgtagctccatcgagtacggccagcagctacttcgaaagcgccgtcattccttcgacgacggctagtattcgcttttcgaacgagttggagcggccaccacgtcgcagcttcgctgatgaggatggataccttagtgtctcaaggcccgatagcactttctttgctgaaccattatctgctggttcggcagtgacttctgccgatccgtcgcccgcagtcagtcctgccgaagagacgacggcccagcgacttagccgcgctgctgcgaagctcagagcaaatagcaagagccggcctggaagccaaggtgccgaaggccgaattagcataacaatgtcgaggctcggcttattaaagggtagccgagagcccttacgagactcgacttctgatgatactgatcttaatcccgatgagatcaatgggcaaagcaaagaggcactcgcgtctaaaaacggcaaggggaaggagaaagaagcgggccacagaagaggcaagtccaagacgcgcgtagacaaggaaaagacgaaagaaccagaccgcgagtgcatcgtgcagtagaacaactctgagcacagggtgctacgaattgtgtcttttctgtttacaggctggtagagaccatatgttagatgatacccaataaagtcaagagccttctggctggatcaactttttatcgagtacctcacccttgtaatagaatttctttgcagtgatgaagaatatgagggacagtctgagatggggccgcaatcgtagtcgcacggtcatgactaaagctctacgaggcagattgaac

SEQ ID NO: 4834 - DNA, 1056 bp, Muscodor strobelii
  misc_feature: SGI cDNA ID NO. 561315
  misc_feature: Reduced expression when VOC is produced
  misc_feature: Encodes the peptide sequence at SEQ ID NO 4835
atggcagcccttcgcgaagtgcctcgcgtcagcagacggctgctaggctctgtaggccggctctgcccggctgccccagctcttcggcgctgtgcttcgaccgaggctgctgccgctgccgctgccgtccccgacatcgagaccgactcaagtctgtcggcacccattgtcaccagagacattgcccagatcaccgatccccgcaagagggcaagcagaagaaatcatgagctgccccacgagagataccgataccatcctcccaagtacgatcgtggacctctgcatccagtccagccaccgccgtcctccgaccccgttgcgagaaacttctcgcctggccccttcaacctgccgagactgaagcagaccttccagaccacactctctgctgatataatgaccttgacgtatcagcatacaccacccggcaccccggacaagcccgagaggatacgacttcgagaatgggacgactcatccccctatatgaagaacagacccaagcgcgggcctcgtggtcacgatgtgctgtttcccctcgagaagcccatcgactggcgcaacatccccgagatccgcgccgtccatatcgcttcctatatgccctacgccaagaagaactttgaccacatcattgttggcaaatctgttctgcagagcattactggtgttcgtcctgcgatgacgagaacgaagacaaatgtttctcaatggggcatcgtcaagggggaccgtactggtgtcaaatgctcgctttacggagatgctgcctacgaatttgtcgacaaatgtgttcaccttgtctttcccaagattaaggagtggaaaggcgtcaaaggttcttcgggtgacagcaccggcaactttggctggggtttcacatcccacgacatgcaacagttcccagaagtcgaggctaactactctctatatccatcaaagatgattcctggatgccgcgtcgttctagaaacaactgccaagtccgacaggcacgctagactcctctgcaaggccctcggaatccccttccacggcaaaatagtcgattaa

SEQ ID NO: 4835 - protein, 351 aa, Muscodor strobelii
  misc_feature: SGI Peptide ID NO. 561315
  misc_feature (246)..(346): Pfam Id: PF00673 Pfam Desc: ribosomal L5P family C-terminus
  misc_feature (246)..(293): Pfam Id: PF00673 Pfam Desc: ribosomal L5P family C-terminus
  misc_feature (1)..(349): NCBI GI: 116198001 Blast Desc: CHGG_07156 [Chaetomium globosum CBS 148.51] gi|88178435|gb|EAQ85903.1| CHGG_07156 [Chaetomium globosum CBS 148.51]
  misc_feature (1)..(348): NCBI GI: 85099166 Blast Desc: NCU04171 [Neurospora crassa OR74A] gi|16944643|emb|CAD11403.1| related to ribosomal protein L5 precursor, mitochondrial [Neurospora crassa] [Neurospora crassa
  misc_feature (2)..(351): NCBI GI: 261351621 Blast Desc: 54S ribosomal protein L7 [Verticillium albo-atrum VaMs.102]
  misc_feature (3)..(351): NCBI GI: 156048722 Blast Desc: SS1G_09093 [Sclerotinia sclerotiorum 1980] gi|154693489|gb|EDN93227.1| SS1G_09093 [Sclerotinia sclerotiorum 1980]
  misc_feature (3)..(351): NCBI GI: 154294675 Blast Desc: BC1G_13464 [Botryotinia fuckeliana B05.10] gi|150844599|gb|EDN19792.1| BC1G_13464 [Botryotinia fuckeliana B05.10]
  misc_feature (1)..(348): NCBI GI: 256730983 Blast Desc: [Nectria haematococca mpVI 77-13-4]
  misc_feature (1)..(348): NCBI GI: 46125911 Blast Desc: FG07333.1 [Gibberella zeae PH-1]
  misc_feature (1)..(316): NCBI GI: 171694011 Blast Desc: protein product [Podospora anserina] gi|170946954|emb|CAP73758.1| protein product [Podospora anserina]
  misc_feature (3)..(351): NCBI GI: 169624120 Blast Desc: SNOG_15312 [Phaeosphaeria nodorum SN15] gi|111056125|gb|EAT77245.1| SNOG_15312 [Phaeosphaeria nodorum SN15]
  misc_feature (1)..(350): NCBI GI: 39943946 Blast Desc: MGG_03984 [Magnaporthe grisea 70-15] gi|145014703|gb|EDJ99271.1| MGG_03984 [Magnaporthe grisea 70-15]
  misc_feature: Useful for introducing or modulating the production of volatile compounds
MAALREVPRVSRRLLGSVGRLCPAAPALRRCASTEAAAAAAAVPDIETDSSLSAPIVTRDIAQITDPRKRASRRNHELPHERYRYHPPKYDRGPLHPVQPPPSSDPVARNFSPGPFNLPRLKQTFQTTLSADIMTLTYQHTPPGTPDKPERIRLREWDDSSPYMKNRPKRGPRGHDVLFPLEKPIDWRNIPEIRAVHIASYMPYAKKNFDHIIVGKSVLQSITGVRPAMTRTKTNVSQWGIVKGDRTGVKCSLYGDAAYEFVDKCVHLVFPKIKEWKGVKGSSGDSTGNFGWGFTSHDMQQFPEVEANYSLYPSKMIPGCRVVLETTAKSDRHARLLCKALGIPFHGKIVD

SEQ ID NO: 4836 - DNA, 2568 bp, Muscodor strobelii
  misc_feature: SGI EST ID NO. CUFF.12443.0
  misc_feature: Variant of the nucleotide sequence at SEQ ID NO 4834
caagcttcaagtcgcgtccatttattggcacccttcaaccaccatcatcggagctcacaatccgatcatggcagcccttcgcgaagtgcctcgcgtcagcagacggctgctaggctctgtaggccggctctgcccggctgccccagctcttcggcgctgtgcttcgaccgaggctgctgccgctgccgctgccgtccccgacatcgagaccgactcaagtctgtcggcacccattgtcaccagagacattgcccagatcaccgatccccgcaagagggcaagcagaagaaatcatgagctgccccacgagagataccgataccatcctcccaagtacgatcgtggacctctgcatccagtccagccaccgccgtcctccgaccccgttgcgagaaacttctcgcctggccccttcaacctgccgagactgaagcagaccttccagaccacactctctgctgatataatgaccttgacgtatcagcatacaccacccggcaccccggacaagcccgagaggatacgacttcgagaatgggacgactcatccccctatatgaagaacagacccaagcgcgggcctcgtggtcacgatgtgctgtttcccctcgagaagcccatcgactggcgcaacatccccgagatccgcgccgtccatatcgcttcctatatgccctacgccaagaagaactttgaccacatcattgttggcaaatctgttctgcagagcattactggtgttcgtcctgcgatgacgagaacgaagacaaatgtttctcaatggggcatcgtcaagggggaccgtactggtgtcaaatgctcgctttacggagatgctgcctacgaatttgtcgacaaatgtgttcaccttgtctttcccaagattaaggagtggaaaggcgtcaaaggttcttcgggtgacagcaccggcaactttggctggggtttcacatcccacgacatgcaacagttcccagaagtcgaggctaactactctctatatccatcaaagatgattcctggatgccgcgtcgttctagaaacaactgccaagtccgacaggcacgctagactcctctgcaaggccctcggaatccccttccacggcaaaatagtcgattaaatactgaatactgtcaccgtctgggcacttgacctgggcgaaaattagtgtacctacgctgtgtactttgtatatgaaccaatgttcgcactttgatagaaaagtgtgtattatataaaaattgtacactatcatcattacctactaaagatatcgagattctttaatcattcactagcatcaagatgtgagctagcatactctgtaacgtgaaaaaaacgaagagttctattccggtcatcgtctgtgatgactgccagtttccactacctgagctttctgtttagctgtaaaaacatcttccaccccaacgccagatatgcaatccatttatggcccatccgtagaggcagcgcccgttgccttttcctgttccccgtctcgttttcccatttcctcgatcccctccagtctaagcattcttagccctctccttaagtccaccaataacgacatcaacggcatccatatccgtagcatcgaacttcttctcttccccaccaactagctcatcgcctctctttctcaactcagagacacagacatccatagcaggctgataatttctaaccgcagaactcaacgcataaaccgccttccgtctaacatctttctgttcctcgccctctttcgtcgtgccatctgccttcgggagtcgttcgccaacagccatcctaacaagtctctccacaccgccaagcgcaacaagacgttcctgacaaggctcattattctgcaccgcagtgccgacgcaccacgcagccatgatcctcaactcgctctcgtcgtgtgccagacactccaataacggggtccacaatcccaatttggagagtagatttgcgttgtcaagtgactcgatgagttgctcgaggttgtcgaaggctgtgagtttggactcgagcgttatttcggggtcggtggatacgatggcttccatggaggatttcatgaggtcggcgtctgagggcccgcccatgagcgcggctatgagttccggtgtgagttgggattgtgggtttgcttcgcgtgtgccgtcgtctgaggggacggagttctctatgctccatttttaggagttcgtttaggtttttgtcgcccatttttggtgttgagggtttgttatggtatgggagagtgttttaggtgatctcaggtgttgcgttcgttgaattgggctgttttgttggtcttgacgtgttgctggatggtgatggttgtttgttcgggttgcgactctggagggcgccgataaggaaaaaatgcgggatgataaggctatgcgctccttggtttcgctgactgaatagatgggcgtgcactctgtagttgctcaggaaaatcccaaggagcttctagtaatcgtagcacattgggttgaagctttgtttttgtgctataatcggaagggcctcttgattcttgactcaaattcgagaagttat

SEQ ID NO: 4837 - DNA, 567 bp, Muscodor strobelii
  misc_feature: SGI cDNA ID NO. 561316
  misc_feature: Reduced expression when VOC is produced
  misc_feature: Encodes the peptide sequence at SEQ ID NO 4838
atgggcgggccctcagacgccgacctcatgaaatcctccatggaagccatcgtatccaccgaccccgaaataacgctcgagtccaaactcacagccttcgacaacctcgagcaactcatcgagtcacttgacaacgcaaatctactctccaaattgggattgtggaccccgttattggagtgtctggcacacgacgagagcgagttgaggatcatggctgcgtggtgcgtcggcactgcggtgcagaataatgagccttgtcaggaacgtcttgttgcgcttggcggtgtggagagacttgttaggatggctgttggcgaacgactcccgaaggcagatggcacgacgaaagagggcgaggaacagaaagatgttagacggaaggcggtttatgcgttgagttctgcggttagaaattatcagcctgctatggatgtctgtgtctctgagttgagaaagagaggcgatgagctagttggtggggaagagaagaagttcgatgctacggatatggatgccgttgatgtcgttattggtggacttaaggagagggctaagaatgcttag

SEQ ID NO: 4838 - protein, 188 aa, Muscodor strobelii
  misc_feature: SGI Peptide ID NO. 561316
  misc_feature (1)..(55): Pfam Id: PF08609 Pfam Desc: Nucleotide exchange factor Fes1
  misc_feature (2)..(55): Pfam Id: PF08609 Pfam Desc: Nucleotide exchange factor Fes1
  misc_feature (1)..(186): NCBI GI: 261351622 Blast Desc: Hsp70 nucleotide exchange factor FES1 [Verticillium albo-atrum VaMs.102]
  misc_feature (1)..(186): NCBI GI: 171694013 Blast Desc: protein product [Podospora anserina] gi|170946955|emb|CAP73759.1| protein product [Podospora anserina]
  misc_feature (1)..(182): NCBI GI: 39943944 Blast Desc: MGG_03983 [Magnaporthe grisea 70-15] gi|145014702|gb|EDJ99270.1| MGG_03983 [Magnaporthe grisea 70-15]
  misc_feature (1)..(188): NCBI GI: 256731373 Blast Desc: [Nectria haematococca mpVI 77-13-4]
  misc_feature (1)..(188): NCBI GI: 85099170 Blast Desc: NCU04172 [Neurospora crassa OR74A] gi|74623829|sp|Q9C239.1|FES1_NEUCR RecName: Full=Hsp70 nucleotide exchange factor fes-1 gi|12718455|emb|CAC28721.1| conserved
  misc_feature (1)..(184): NCBI GI: 46125913 Blast Desc: FG07334.1 [Gibberella zeae PH-1] gi|121928684|sp|Q4I624.1|FES1_GIBZE RecName: Full=Hsp70 nucleotide exchange factor FES1
  misc_feature (1)..(185): NCBI GI: 154305938 Blast Desc: BC1G_08200 [Botryotinia fuckeliana B05.10] gi|150853085|gb|EDN28277.1| BC1G_08200 [Botryotinia fuckeliana B05.10]
  misc_feature (1)..(187): NCBI GI: 156048006 Blast Desc: SS1G_08734 [Sclerotinia sclerotiorum 1980] gi|154693131|gb|EDN92869.1| SS1G_08734 [Sclerotinia sclerotiorum 1980]
  misc_feature (1)..(182): NCBI GI: 169776981 Blast Desc: [Aspergillus oryzae RIB40] gi|238494060|ref|XP_002378266.1| Hsp70 nucleotide exchange factor (Fes1), [Aspergillus flavus NRRL3357] RecName: Full=Hsp70 factor
  misc_feature (1)..(182): NCBI GI: 115386234 Blast Desc: conserved [Aspergillus terreus NIH2624] gi|121736430|sp|Q0CH70.1|FES1_ASPTN RecName: Full=Hsp70 nucleotide exchange factor fes1 gi|114190656|gb|EAU32356.1|
  misc_feature: Useful for introducing or modulating the production of volatile compounds
MGGPSDADLMKSSMEAIVSTDPEITLESKLTAFDNLEQLIESLDNANLLSKLGLWTPLLECLAHDESELRIMAAWCVGTAVQNNEPCQERLVALGGVERLVRMAVGERLPKADGTTKEGEEQKDVRRKAVYALSSAVRNYQPAMDVCVSELRKRGDELVGGEEKKFDATDMDAVDVVIGGLKERAKNA

SEQ ID NO: 4839 - DNA, 1776 bp, Muscodor strobelii
  misc_feature: SGI cDNA ID NO. 561317
  misc_feature: Encodes the peptide sequence at SEQ ID NO 4840
atgaaactcctgaatacgacaacttacgaactcaaggagttcacaaacgacgagtggcggagcccccaccccactaccctcgctcctccgagcctcgattacgccatcttatcacacacctggggtgaagatgaggttctctatgatgatattactaagcccggtcttgagtggcaaagaaagcaaggtgctgccaagataatcaaaagctgcgaggtgtcaaaacgaaaaggtttcgaatggatgtggatcgatacttgttgtattgataagaaaagcagtgccgagttgtctgaggctatcaactctatgtttaggtggtacgcgaattcgactatttgtattgcgtacttagcggatgtgcttaaaggcaacaacgatatgcttatgtcaaagagtcgctggtttacgcgcggctggacgttgcaagagctgatcgcaccgagtgttattgagttctgggataaaggttggaacttgattgggagtagaagtcaactccatggcgacattgcgaagattacgcagattgatagtcttgttcttacctatcgagaggtcgaaaagataaaccattctaaatacgacagaatccaacagttcctccgtgagagatattccgttgctcaaatcatggcttgggcatctggtcgcaaaacgactcgacaagaggatcttgcgtattgcttgctaggcttgttcagcgttagcatgccgctattgtatggggagggaggcgaggaagcattcttacgtctgcaaatatcaattgttgaccggattgacgatcagtcaatactggcatggaacgcaccaaaatggcgtccgaatcatggaatctcaccagccttcgcaccaagcccagaatacttttcggacgctctggagattatcccaagctggttagctggtgacattgacttggaacatcagtctcagagcagctcccgcagatctatttccattatcgaagggcgtgttgcagtcaatttatggctcattcctgcaccaaatgacttgctggagatgatcccgaaaccgtgtttctacggtgtcctcgactgtggatacgccgaacaaccgttggctagacctgccttcactcttgcatatgaatcgaacacacggaggtggagtcgtatggggtcacgattgagatcaataaacgttgaagataatgaccggttcctagatgttgacgaggcacaatggcaacaggtcattgttccattgcgagtacagcccatgtatgaacttatgggtccagtgggtgtgggtcgagctccgcagccctttaggattgcaaagatcatagatcacgacactgaaaagtgtacagtcgagcacgtgacccctttcgaaacagttgacctcccagggagtaattactggggctcatgcattataatcttgacaaaaccccgatatccacgagtacttatcttctggtacaaagaacgacagcctcaagaagccacgtacaacatcaccgttttatccaagcaacgcctactagaggtggggtttggagacttcggagactatggtctcgaagagttagatggtgtctcaatcgagccagagggaccacttcttactatcgtccgtggctttgttggaaactttgatggtgatttgacaactagttccattgtactggaaggaccagaacagcgtaggctcacagcaacaatcaaagacagatcgttcttgggacgtcgtgttccagagctcaccatcaaagttatgccgacacgcaagcgtacgcgacggtga

SEQ ID NO: 4840 - protein, 591 aa, Muscodor strobelii
  misc_feature: SGI Peptide ID NO. 561317
  misc_feature (34)..(144): Pfam Id: PF06985 Pfam Desc: Heterokaryon incompatibility protein (HET)
  misc_feature (34)..(126): Pfam Id: PF06985 Pfam Desc: Heterokaryon incompatibility protein (HET)
  misc_feature (132)..(144): Pfam Id: PF06985 Pfam Desc: Heterokaryon incompatibility protein (HET)
  misc_feature (1)..(383): NCBI GI: 189190380 Blast Desc: HET domain containing protein [Pyrenophora tritici-repentis Pt-1C-BFP] gi|187973135|gb|EDU40634.1| HET domain containing protein [Pyrenophora tritici-repentis
  misc_feature (1)..(299): NCBI GI: 256722255 Blast Desc: NECHADRAFT_52327 [Nectria haematococca mpVI 77-13-4]
  misc_feature (1)..(370): NCBI GI: 46128083 Blast Desc: FG08419.1 [Gibberella zeae PH-1]
  misc_feature (1)..(298): NCBI GI: 169770123 Blast Desc: [Aspergillus oryzae RIB40] gi|83767390|dbj|BAE57529.1| protein product [Aspergillus oryzae]
  misc_feature (1)..(298): NCBI GI: 238493477 Blast Desc: conserved [Aspergillus flavus NRRL3357] gi|220696469|gb|EED52811.1| conserved [Aspergillus flavus NRRL3357]
  misc_feature (1)..(317): NCBI GI: 171680418 Blast Desc: protein product [Podospora anserina] gi|170939836|emb|CAP65061.1| protein product [Podospora anserina]
  misc_feature (1)..(369): NCBI GI: 256733553 Blast Desc: [Nectria haematococca mpVI 77-13-4]
  misc_feature (1)..(300): NCBI GI: 169776259 Blast Desc: [Aspergillus oryzae RIB40] gi|83771331|dbj|BAE61463.1| protein product [Aspergillus oryzae]
  misc_feature (1)..(267): NCBI GI: 256733325 Blast Desc: NECHADRAFT_77285 [Nectria haematococca mpVI 77-13-4]
  misc_feature (9)..(307): NCBI GI: 145235123 Blast Desc: An03g03270 [Aspergillus niger] gi|134057890|emb|CAK38231.1| protein product [Aspergillus niger]
MKLLNTTTYELKEFTNDEWRSPHPTTLAPPSLDYAILSHTWGEDEVLYDDITKPGLEWQRKQGAAKIIKSCEVSKRKGFEWMWIDTCCIDKKSSAELSEAINSMFRWYANSTICIAYLADVLKGNNDMLMSKSRWFTRGWTLQELIAPSVIEFWDKGWNLIGSRSQLHGDIAKITQIDSLVLTYREVEKINHSKYDRIQQFLRERYSVAQIMAWASGRKTTRQEDLAYCLLGLFSVSMPLLYGEGGEEAFLRLQISIVDRIDDQSILAWNAPKWRPNHGISPAFAPSPEYFSDALEIIPSWLAGDIDLEHQSQSSSRRSISIIEGRVAVNLWLIPAPNDLLEMIPKPCFYGVLDCGYAEQPLARPAFTLAYESNTRRWSRMGSRLRSINVEDNDRFLDVDEAQWQQVIVPLRVQPMYELMGPVGVGRAPQPFRIAKIIDHDTEKCTVEHVTPFETVDLPGSNYWGSCIIILTKPRYPRVLIFWYKERQPQEATYNITVLSKQRLLEVGFGDFGDYGLEELDGVSIEPEGPLLTIVRGFVGNFDGDLTTSSIVLEGPEQRRLTATIKDRSFLGRRVPELTIKVMPTRKRTRR

SEQ ID NO: 4841 - DNA, 2484 bp, Muscodor strobelii
  misc_feature: SGI EST ID NO. CUFF.12446.0
  misc_feature: Variant of the nucleotide sequence at SEQ ID NO 4839
ctgaacccaggccatacacgtaattccgcctcgccatattacaactacctcttgtctagctcatcgagtctatagtgtgtcgttaagttattcgagtctggactagctaattcatccaacaacaagcctaggttcataaatgtttatcagattttgctgatatttacctagcctgagttgcttccaatgtagaagaaagcagatctattttctaatgctataggcagagtcgaatcttgtgtttaggcacatgaaagcaatatgattggagagcgacattcgcatcatgcatgcgtcacagcctcatctccccggcccctcttacggcaacctcgatatcagaatgatcacgtatgaataaattttgatgatactctcaacccacaatgaaactcctgaatacgacaacttacgaactcaaggagttcacaaacgacgagtggcggagcccccaccccactaccctcgctcctccgagcctcgattacgccatcttatcacacacctggggtgaagatgaggttctctatgatgatattactaagcccggtcttgagtggcaaagaaagcaaggtgctgccaagataatcaaaagctgcgaggtgtcaaaacgaaaaggtttcgaatggatgtggatcgatacttgttgtattgataagaaaagcagtgccgagttgtctgaggctatcaactctatgtttaggtggtacgcgaattcgactatttgtattgcgtacttagcggatgtgcttaaaggcaacaacgatatgcttatgtcaaagagtcgctggtttacgcgcggctggacgttgcaagagctgatcgcaccgagtgttattgagttctgggataaaggttggaacttgattgggagtagaagtcaactccatggcgacattgcgaagattacgcagattgatagtcttgttcttacctatcgagaggtcgaaaagataaaccattctaaatacgacagaatccaacagttcctccgtgagagatattccgttgctcaaatcatggcttgggcatctggtcgcaaaacgactcgacaagaggatcttgcgtattgcttgctaggcttgttcagcgttagcatgccgctattgtatggggagggaggcgaggaagcattcttacgtctgcaaatatcaattgttgaccggattgacgatcagtcaatactggcatggaacgcaccaaaatggcgtccgaatcatggaatctcaccagccttcgcaccaagcccagaatacttttcggacgctctggagattatcccaagctggttagctggtgacattgacttggaacatcagtctcagagcagctcccgcagatctatttccattatcgaagggcgtgttgcagtcaatttatggctcattcctgcaccaaatgacttgctggagatgatcccgaaaccgtgtttctacggtgtcctcgactgtggatacgccgaacaaccgttggctagacctgccttcactcttgcatatgaatcgaacacacggaggtggagtcgtatggggtcacgattgagatcaataaacgttgaagataatgaccggttcctagatgttgacgaggcacaatggcaacaggtcattgttccattgcgagtacagcccatgtatgaacttatgggtccagtgggtgtgggtcgagctccgcagccctttaggattgcaaagatcatagatcacgacactgaaaagtgtacagtcgagcacgtgacccctttcgaaacagttgacctcccagggagtaattactggggctcatgcattataatcttgacaaaaccccgatatccacgagtacttatcttctggtacaaagaacgacagcctcaagaagccacgtacaacatcaccgttttatccaagcaacgcctactagaggtggggtttggagacttcggagactatggtctcgaagagttagatggtgtctcaatcgagccagagggaccacttcttactatcgtccgtggctttgttggaaactttgatggtgatttgacaactagttccattgtactggaaggaccagaacagcgtaggctcacagcaacaatcaaagacagatcgttcttgggacgtcgtgttccagagctcaccatcaaagttatgccgacacgcaagcgtacgcgacggtgaaagcaagcgaatgagagaatgtgcttgtcccagtggctataaggaagcttattgagactataaatgtgtcccaaccgtgagcggcagaaaggattgcaatttagggcccttattgctagatctccatgacttctactttacctacttacgataaatggaaaggattacagtgtaacacctagactaggagtcagcctgcaagatctgcgtggttcttgatttaaactcgtgtaattagtcccccatgatcatgttctagccatgaggatctacaaaattcacaaaacttcgtgacaaggtggggcggcacttcaacttcaac

SEQ ID NO: 4842 - DNA, 1128 bp, Muscodor strobelii
  misc_feature: SGI cDNA ID NO. 561318
  misc_feature: Encodes the peptide sequence at SEQ ID NO 4843
atggaggaggaagttgctgctctcgttattgacaatggttcgggtatgtgcaaagccggtttcgccggtgatgatgctccccgagctgttttcccgtccattgtcggtcgcccccgtcaccatggcatcatgattggtatgggccagaaggactcgtacgtcggtgatgaggcacagtcgaagcgtggtatccttaccctgcgctaccccatcgagcacggtgttgtcaccaactgggacgacatggagaagatctggcaccacaccttctacaacgagctgcgtgtcgcccctgaggagcatcccgtcctgctcaccgaggcccccatcaaccccaagtccaacagggagaagatgacccagattgtcttcgagaccttcaacgcccccgccttctacgtctccattcaggccgtcctgtccctgtacgcctcaggtcgtaccaccggtatcgtcctcgactccggtgatggtgtcacccacgttgtccccatctacgagggtttcgccctgccccacgccattgcccgtgtcgacatggctggccgtgacttgaccgactacctgatgaagatcttggccgagcgtggctacaccttctccaccaccgccgagcgtgaaatcgtccgtgacatcaaggagaagctctgttacgtcgccctcgacttcgagcaggagatccagactgctgcccagagctccagcttggagaagtcgtacgagcttcccgacggacaagtcatcaccatcggcaacgagcgcttccgtgcccctgaggctctcttccagccttccgtcctcggtctcgagagcggtggtatccacgtcaccactttcaactccatcatgaagtgtgatgtcgatgtccgaaaggatctctacggaaacattgtcatgtctggtggtaccaccatgtaccccggtctctcggaccgtatgcagaaggagatcactgctcttgctccctcttccatgaaggtcaagatcattgcaccccccgagcgcaagtactccgtctggatcggtggttccatcttggcttctctgtctaccttccagcagatgtggatctccaagcaggagtacgacgagagcggtccttctatcgttcaccgcaagtgcttctaa

SEQ ID NO: 4843 - protein, 375 aa, Muscodor strobelii
  misc_feature: SGI Peptide ID NO. 561318
  misc_feature (2)..(375): Pfam Id: PF00022 Pfam Desc: Actin
  misc_feature (1)..(375): NCBI GI: 164426508 Blast Desc: actin [Neurospora crassa OR74A] gi|14194449|sp|Q9UVW9.1|ACTG_CEPAC RecName: Full=Actin, gamma gi|46397789|sp|P78711.2|ACT_NEUCR RecName: Full=Actin RecName:
  misc_feature (1)..(375): NCBI GI: 4249564 Blast Desc: actin [Humicola grisea var. thermoidea]
  misc_feature (1)..(375): NCBI GI: 169596741 Blast Desc: SNOG_01139 [Phaeosphaeria nodorum SN15] gi|238494062|ref|XP_002378267.1| actin Act1 [Aspergillus flavus NRRL3357] gi|238054270|sp|P20359.2|ACTG_EMENI RecName: gamma Act1
  misc_feature (1)..(375): NCBI GI: 154305934 Blast Desc: actin [Botryotinia fuckeliana B05.10] gi|156048004|ref|XP_001589969.1| actin [Sclerotinia sclerotiorum 1980] gi|3182891|sp|O13419.1|ACT_BOTFU RecName: Full=Actin actin
  misc_feature (3)..(375): NCBI GI: 46125915 Blast Desc: ACTG_CEPAC Actin, gamma [Gibberella zeae PH-1]
  misc_feature (1)..(375): NCBI GI: 121703618 Blast Desc: actin [Aspergillus clavatus NRRL 1] gi|119398217|gb|EAW08647.1| actin [Aspergillus clavatus NRRL 1]
  misc_feature (1)..(375): NCBI GI: 2072156 Blast Desc: actin [Neurospora crassa]
  misc_feature (3)..(375): NCBI GI: 171694015 Blast Desc: protein product [Podospora anserina] gi|170946956|emb|CAP73760.1| protein product [Podospora anserina]
  misc_feature (1)..(375): NCBI GI: 283854632 Blast Desc: actin [Paecilomyces lilacinus]
  misc_feature (1)..(375): NCBI GI: 226407485 Blast Desc: gamma-actin [Epichloe festucae]
MEEEVAALVIDNGSGMCKAGFAGDDAPRAVFPSIVGRPRHHGIMIGMGQKDSYVGDEAQSKRGILTLRYPIEHGVVTNWDDMEKIWHHTFYNELRVAPEEHPVLLTEAPINPKSNREKMTQIVFETFNAPAFYVSIQAVLSLYASGRTTGIVLDSGDGVTHVVPIYEGFALPHAIARVDMAGRDLTDYLMKILAERGYTFSTTAEREIVRDIKEKLCYVALDFEQEIQTAAQSSSLEKSYELPDGQVITIGNERFRAPEALFQPSVLGLESGGIHVTTFNSIMKCDVDVRKDLYGNIVMSGGTTMYPGLSDRMQKEITALAPSSMKVKIIAPPERKYSVWIGGSILASLSTFQQMWISKQEYDESGPSIVHRKCF

SEQ ID NO: 4844 - DNA, 5019 bp, Muscodor strobelii
  misc_feature: SGI EST ID NO. CUFF.13824.0
  misc_feature: Variant of the nucleotide sequence at SEQ ID NO 4842
atcatgttggtgttgaaaggaactgtcacgtttcaaatctttgctctaattgcaagttgttcctgcatgcgactctcctgcaatccttagctattactatttgctagtacttgtagagtgtgcgctgtcgttgaagctgcaggttgtgctgtacagtcgcatgctgcatcgtagccaatcgtcctaatcgtctacctccatgatatcgtgccccgccgcttgttattcggcccacaagtccaaacccaatcccgcctacgcagtcaccgcaggctggatcgatactgcactgtagagcgtgcaacagttggaacggctcctcctcactcctggctgctgcactgtctgtggctggcttcgccttcctcccttttctgctcctccacaccagcaccactcgcccacaccaaccacttcttccctctcaacgtcgccgaacccgactcttcctcctgtcaacttcccgacattccaacgtcgccgacaaccatcctcatcaaccctcttccaccgcattgctctctcgatcgcagcatcgtcagagcatcccccgcattctcccgctacatttatctaccctctttttctacctacgtaatccgtcacaatggaggaggaagttgctgctctcgttattgacaatggttcgggtatgtgcaaagccggtttcgccggtgatgatgctccccgagctgttttcccgtccattgtcggtcgcccccgtcaccatggcatcatgattggtatgggccagaaggactcgtacgtcggtgatgaggcacagtcgaagcgtggtatccttaccctgcgctaccccatcgagcacggtgttgtcaccaactgggacgacatggagaagatctggcaccacaccttctacaacgagctgcgtgtcgcccctgaggagcatcccgtcctgctcaccgaggcccccatcaaccccaagtccaacagggagaagatgacccagattgtcttcgagaccttcaacgcccccgccttctacgtctccattcaggccgtcctgtccctgtacgcctcaggtcgtaccaccggtatcgtcctcgactccggtgatggtgtcacccacgttgtccccatctacgagggtttcgccctgccccacgccattgcccgtgtcgacatggctggccgtgacttgaccgactacctgatgaagatcttggccgagcgtggctacaccttctccaccaccgccgagcgtgaaatcgtccgtgacatcaaggagaagctctgttacgtcgccctcgacttcgagcaggagatccagactgctgcccagagctccagcttggagaagtcgtacgagcttcccgacggacaagtcatcaccatcggcaacgagcgcttccgtgcccctgaggctctcttccagccttccgtcctcggtctcgagagcggtggtatccacgtcaccactttcaactccatcatgaagtgtgatgtcgatgtccgaaaggatctctacggaaacattgtcatgtctggtggtaccaccatgtaccccggtctctcggaccgtatgcagaaggagatcactgctcttgctccctcttccatgaaggtcaagatcattgcaccccccgagcgcaagtactccgtctggatcggtggttccatcttggcttctctgtctaccttccagcagatgtggatctccaagcaggagtacgacgagagcggtccttctatcgttcaccgcaagtgcttctaagcgattgcagcaactgcgatacaaggcgtatgattacttgtctacaatccttccgaaccgcaagagggccctgggcgggcaccgacacgcggtggtggttcccgttgccacttagaggggcctcggattcgcatctacgaaaagttctgggcatggtagaatcgtggcggagttgtttgactcgggtggcaaaaagagcaaatttcatgagaacaagacttttttcacggggagcttgtcatgcactgtcgggagcagacacatgcagagggtagggtgtcgaccatatactttcagtgttttcttcgttgtctggtgtgcttaatgtcaagtctctagccgtagagagcttcagttcctgtccccttcactcgtgatgtgatgattgtatgtgattcaatgagtctccaaaattccaacatatactggcatcagaacggtatctccacgcaccagctgcattactttgtagtattatctcgtaattctgatatcggttgaccgtccggcctcagatccgattctctctggtgaagccgttcttcctcacttccttccaaaggctcctcatctatttcatactcgtcctcttcagcggcaccatctttttcctcggccaactttcgatatttccgcctgctcttcttagcagagctcgacttcttcttgcgcttgaaggaatcgacgatggcggcgcgggactcgttcccgttggcgaggtcgtcgagcttgtcggcgaggagctggcgggcgatcttgcggttttgggagcgggagcgggtggcttgggattttaccacgatgcccgttggtttgtggattagctgcacggcggagttggttttgtttatcttttggccgcctggaccggagcctttgaggtaggattcttggatttcggagtctggcggtggtgctgggcgcgaggggagggagtgggatttgtatttttgttgttgttttgggggagatggagatggtgtatcggtgtagagccggcggtgtgtggttgggattcgtgtggatgatgttatatggtatgtaatgggagtcgttcggaggggcagagatacatttcgaaggaggtttcgtatgagcgtcatggtggttgagggtggagggtgtatgtcatggtttggatcgcattattcttttggtgtagtatcctggcagtatctggtatcttcgttcacttccactttggatagagtcgcttaagcaatcaattttcaaatgataccagaattggagtcgtcgtgatagttaattgacgagcccggacgtccttctcgttctagataaaaatggccggcggctcgcggcaacgtgatgatgggacccggtaaagtggtttcgtcgcggtccaaaggacccctgcccggaccctgctccctgccggtaacctccttttctactctcaaaggaaatcattgaaaaatagcaaacaggcaaccgctatcttgtcgaccaatttgaatcagcgatagttcaaattgacgattacacgaatttagaagaaggagaaggcagatatccaccaactcttacctaacgaattggataaggccgcatctcaacctgccaacacatatccaccgcaggcagaaacgaacattccaacctcgaacatcgagcaacacctcaattcccaccaattccaactcctaactctggtcaattcagcacctaggctcttttctcctactcgctgaatagcctctctcgaatcactctccaatctctcagcgacgaaagcaagacacaaagacaagacacggccctccaaccctcaccgacgaaaaacgaacaaaaatggaataccgaaccaaacaacccgagaacctctcccccttccagcgcctcggccgctggctctcgctcaagcaataccagatcgaggtcacattcggcgtatacatgttcacgcccaccgagaagttcatcttctggtccgtagtattcctcctctcagcaatgggatccatcgccacgatcctctacctaccgcagcacatcgtcttcatcatcaaccgcgcctggttctacgtcaacggcggggagaacggcagcgcctccacctccagtatcctcgctgccaaggacgctatctcgctttccctgacgagcgattatactacgcccacggctgccgctgcgaagactttgcgcgagttatgattatgtcgagtctctagatttcaggagtggtttggggttggggttgcatacacggctgaggttgatagaataatatttaatatggctcggtcccggttgttttatcggtggcattgtgataatgggacggggtatgagtcggggtgcggacgagagatgcttgagcatgctggatgagtatagcatttgaggcaggattgcatctgactcttgcagatttgggcgatcgctacgtgtctagaggcatatgtagactaagaggaacacatcattcggcgaatgagtacactcgcaatgaattgtcctctcccgcgatggcaagctcatttgagtcggcttgtggcctccatgccagctggaggactgatttggcgaggcagaggctggaggatatatcagtataatgcaaaatcataagattaattacgcttggttcaggggcaacttactcagggcgcaatgcgacactcgacgataccgccaaagaagtcgcgtcaatatagtgtatcgaaatcttgccagcctcattgccaactgcgaggacgtatctcccgtctttgttggagtagggcttaaagtcgacagctgtgacggggtgagtctcggcaatggtctgaacgcaggtgatctctgattccgatgactccttgcgccatatcttgacctgcttgtcacgaccgcctgtcgcgaagaccaactccgaagtcgacggtgcccaggcggtatcgagaatcatacgactgtgagctttagtgttgcactgcagcagcttataagtagtctgctccgcagtgtctcgctcgaagacagcccactgacggtcacggcctacgctcagaagatatttatcattcggtgaatatcgcaggcgtgtgacggtcagcgagtgcgcggtcaatggcggcttgatctcggtccatcgctctgtctcgaacagtcggatcacggcatggttgacggaacttgctttacacgcgctggctaccagtttgccgtcctggcttactgcaagacaggaaagctcgtatccgtggccgtacaacttctccgtctctggccacagcgtgtggcgtgatagactatcctcgaatggtgggtggtcgacg

SEQ ID NO: 4845 - DNA, 1143 bp, Muscodor strobelii
  misc_feature: SGI cDNA ID NO. 561319
  misc_feature: Encodes the peptide sequence at SEQ ID NO 4846
atggaggtcttgtcttctatagaggaagttgctgctctcgttattgacaatggttcgggtatgtgcaaagccggtttcgccggtgatgatgctccccgagctgttttcccgtccattgtcggtcgcccccgtcaccatggcatcatgattggtatgggccagaaggactcgtacgtcggtgatgaggcacagtcgaagcgtggtatccttaccctgcgctaccccatcgagcacggtgttgtcaccaactgggacgacatggagaagatctggcaccacaccttctacaacgagctgcgtgtcgcccctgaggagcatcccgtcctgctcaccgaggcccccatcaaccccaagtccaacagggagaagatgacccagattgtcttcgagaccttcaacgcccccgccttctacgtctccattcaggccgtcctgtccctgtacgcctcaggtcgtaccaccggtatcgtcctcgactccggtgatggtgtcacccacgttgtccccatctacgagggtttcgccctgccccacgccattgcccgtgtcgacatggctggccgtgacttgaccgactacctgatgaagatcttggccgagcgtggctacaccttctccaccaccgccgagcgtgaaatcgtccgtgacatcaaggagaagctctgttacgtcgccctcgacttcgagcaggagatccagactgctgcccagagctccagcttggagaagtcgtacgagcttcccgacggacaagtcatcaccatcggcaacgagcgcttccgtgcccctgaggctctcttccagccttccgtcctcggtctcgagagcggtggtatccacgtcaccactttcaactccatcatgaagtgtgatgtcgatgtccgaaaggatctctacggaaacattgtcatgtctggtggtaccaccatgtaccccggtctctcggaccgtatgcagaaggagatcactgctcttgctccctcttccatgaaggtcaagatcattgcaccccccgagcgcaagtactccgtctggatcggtggttccatcttggcttctctgtctaccttccagcagatgtggatctccaagcaggagtacgacgagagcggtccttctatcgttcaccgcaagtgcttctaa

SEQ ID NO: 4846 - protein, 380 aa, Muscodor strobelii
  misc_feature: SGI Peptide ID NO. 561319
  misc_feature (7)..(380): Pfam Id: PF00022 Pfam Desc: Actin
  misc_feature (1)..(380): NCBI GI: 46125915 Blast Desc: ACTG_CEPAC Actin, gamma [Gibberella zeae PH-1]
  misc_feature (8)..(380): NCBI GI: 164426508 Blast Desc: actin [Neurospora crassa OR74A] gi|14194449|sp|Q9UVW9.1|ACTG_CEPAC RecName: Full=Actin, gamma gi|46397789|sp|P78711.2|ACT_NEUCR RecName: Full=Actin RecName:
  misc_feature (7)..(380): NCBI GI: 171694015 Blast Desc: protein product [Podospora anserina] gi|170946956|emb|CAP73760.1| protein product [Podospora anserina]
  misc_feature (8)..(380): NCBI GI: 119467750 Blast Desc: actin [Neosartorya fischeri NRRL 181] gi|119405833|gb|EAW15784.1| actin [Neosartorya fischeri NRRL 181]
  misc_feature (8)..(380): NCBI GI: 169596741 Blast Desc: SNOG_01139 [Phaeosphaeria nodorum SN15] gi|238494062|ref|XP_002378267.1| actin Act1 [Aspergillus flavus NRRL3357] gi|238054270|sp|P20359.2|ACTG_EMENI RecName: gamma Act1
  misc_feature (8)..(380): NCBI GI: 154305934 Blast Desc: actin [Botryotinia fuckeliana B05.10] gi|156048004|ref|XP_001589969.1| actin [Sclerotinia sclerotiorum 1980] gi|3182891|sp|O13419.1|ACT_BOTFU RecName: Full=Actin actin
  misc_feature (8)..(380): NCBI GI: 67540744 Blast Desc: ACT_BOTCI Actin [Aspergillus nidulans FGSC A4] gi|40738692|gb|EAA57882.1| ACT_BOTCI Actin [Aspergillus nidulans FGSC A4]
  misc_feature (8)..(380): NCBI GI: 4249564 Blast Desc: actin [Humicola grisea var. thermoidea]
  misc_feature (8)..(380): NCBI GI: 283854632 Blast Desc: actin [Paecilomyces lilacinus]
  misc_feature (8)..(380): NCBI GI: 121703618 Blast Desc: actin [Aspergillus clavatus NRRL 1] gi|119398217|gb|EAW08647.1| actin [Aspergillus clavatus NRRL 1]
MEVLSSIEEVAALVIDNGSGMCKAGFAGDDAPRAVFPSIVGRPRHHGIMIGMGQKDSYVGDEAQSKRGILTLRYPIEHGVVTNWDDMEKIWHHTFYNELRVAPEEHPVLLTEAPINPKSNREKMTQIVFETFNAPAFYVSIQAVLSLYASGRTTGIVLDSGDGVTHVVPIYEGFALPHAIARVDMAGRDLTDYLMKILAERGYTFSTTAEREIVRDIKEKLCYVALDFEQEIQTAAQSSSLEKSYELPDGQVITIGNERFRAPEALFQPSVLGLESGGIHVTTFNSIMKCDVDVRKDLYGNIVMSGGTTMYPGLSDRMQKEITALAPSSMKVKIIAPPERKYSVWIGGSILASLSTFQQMWISKQEYDESGPSIVHRKCF

SEQ ID NO: 4847 - DNA, 5019 bp, Muscodor strobelii; identical to SEQ ID NO: 4844
  misc_feature: SGI EST ID NO. CUFF.13824.0
  misc_feature: Variant of the nucleotide sequence at SEQ ID NO 4845

SEQ ID NO: 4848 - DNA, 642 bp, Muscodor strobelii
  misc_feature: SGI cDNA ID NO. 561320
  misc_feature: Reduced expression when VOC is produced
  misc_feature: Encodes the peptide sequence at SEQ ID NO 4849
atgacgctcatacgaaacctccttcgaaatgtatctctgcccctccgaacgactcccattacataccatataacatcatccacacgaatcccaaccacacaccgccggctctacaccgatacaccatctccatctcccccaaaacaacaacaaaaatacaaatcccactccctcccctcgcgcccagcaccaccgccagactccgaaatccaagaatcctacctcaaaggctccggtccaggcggccaaaagataaacaaaaccaactccgccgtgcagctaatccacaaaccaacgggcatcgtggtaaaatcccaagccacccgctcccgctcccaaaaccgcaagatcgcccgccagctcctcgccgacaagctcgacgacctcgccaacgggaacgagtcccgcgccgccatcgtcgattccttcaagcgcaagaagaagtcgagctctgctaagaagagcaggcggaaatatcgaaagttggccgaggaaaaagatggtgccgctgaagaggacgagtatgaaatagatgaggagcctttggaaggaagtgaggaagaacggcttcaccagagagaatcggatctgaggccggacggtcaaccgatatcagaattacgagataatactacaaagtaa

SEQ ID NO: 4849 - protein, 213 aa, Muscodor strobelii
  misc_feature: SGI Peptide ID NO. 561320
  misc_feature (66)..(169): Pfam Id: PF00472 Pfam Desc: Peptidyl-tRNA hydrolase domain
  misc_feature (66)..(126): Pfam Id: PF00472 Pfam Desc: Peptidyl-tRNA hydrolase domain
  misc_feature (58)..(188): NCBI GI: 39943940 Blast Desc: conserved [Magnaporthe grisea 70-15] gi|58257471|gb|AAW69357.1| peptide chain release factor-like protein [Magnaporthe grisea] gi|145014700|gb|EDJ99268.1| grisea
  misc_feature (58)..(170): NCBI GI: 171694017 Blast Desc: protein product [Podospora anserina] gi|170946957|emb|CAP73761.1| protein product [Podospora anserina]
  misc_feature (35)..(187): NCBI GI: 242781170 Blast Desc: peptidyl-tRNA hydrolase domain protein [Talaromyces stipitatus ATCC 10500] gi|218719894|gb|EED19313.1| peptidyl-tRNA hydrolase domain protein [Talaromyces stipitatus ATCC 10500]
  misc_feature (58)..(186): NCBI GI: 258570383 Blast Desc: [Uncinocarpus reesii 1704] gi|237904265|gb|EEP78666.1| [Uncinocarpus reesii 1704]
  misc_feature (58)..(201): NCBI GI: 239614579 Blast Desc: conserved [Ajellomyces dermatitidis ER-3]
  misc_feature (58)..(202): NCBI GI: 261196175 Blast Desc: conserved [Ajellomyces dermatitidis SLH14081] gi|239587624|gb|EEQ70267.1| conserved [Ajellomyces dermatitidis SLH14081]
  misc_feature (58)..(168): NCBI GI: 212526542 Blast Desc: peptidyl-tRNA hydrolase domain protein [Penicillium marneffei ATCC 18224] gi|210072826|gb|EEA26913.1| peptidyl-tRNA hydrolase domain protein [Penicillium marneffei ATCC 18224]
  misc_feature (58)..(162): NCBI GI: 240111848 Blast Desc: Peptidyl-tRNA hydrolase domain containing protein [Coccidioides posadasii C735 delta SOWgp]
  misc_feature (46)..(180): NCBI GI: 119467602 Blast Desc: peptidyl-tRNA hydrolase domain protein [Neosartorya fischeri NRRL 181] gi|119405759|gb|EAW15710.1| peptidyl-tRNA hydrolase domain protein [Neosartorya fischeri NRRL 181]
  misc_feature (14)..(174): NCBI GI: 145250303 Blast Desc: An15g01250 [Aspergillus niger] gi|134082184|emb|CAL00939.1| protein product [Aspergillus niger]
  misc_feature: Useful for introducing or modulating the production of volatile compounds
MTLIRNLLRNVSLPLRTTPITYHITSSTRIPTTHRRLYTDTPSPSPPKQQQKYKSHSLPSRPAPPPDSEIQESYLKGSGPGGQKINKTNSAVQLIHKPTGIVVKSQATRSRSQNRKIARQLLADKLDDLANGNESRAAIVDSFKRKKKSSSAKKSRRKYRKLAEEKDGAAEEDEYEIDEEPLEGSEEERLHQRESDLRPDGQPISELRDNTTK

SEQ ID NO: 4850 - DNA, 366 bp, Muscodor strobelii
  misc_feature: SGI cDNA ID NO. 561321
  misc_feature: Reduced expression when VOC is produced
  misc_feature: Encodes the peptide sequence at SEQ ID NO 4851
atggaataccgaaccaaacaacccgagaacctctcccccttccagcgcctcggccgctggctctcgctcaagcaataccagatcgaggtcacattcggcgtatacatgttcacgcccaccgagaagttcatcttctggtccgtagtattcctcctctcagcaatgggatccatcgccacgatcctctacctaccgcagcacatcgtcttcatcatcaaccgcgcctggttctacgtcaacggcggggagaacggcagcgcctccacctccagtatcctcgctgccaaggacgctatctcgctttccctgacgagcgattatactacgcccacggctgccgctgcgaagactttgcgcgagttatga

SEQ ID NO: 4851 - protein, 121 aa, Muscodor strobelii
  misc_feature: SGI Peptide ID NO. 561321
  misc_feature (15)..(121): NCBI GI: 39943938 Blast Desc: MGG_03980 [Magnaporthe grisea 70-15] gi|145014699|gb|EDJ99267.1| MGG_03980 [Magnaporthe grisea 70-15]
  misc_feature (10)..(81): NCBI GI: 171694019 Blast Desc: protein product [Podospora anserina] gi|170946958|emb|CAP73762.1| protein product [Podospora anserina]
  misc_feature (11)..(121): NCBI GI: 261351628 Blast Desc: conserved [Verticillium albo-atrum VaMs.102]
  misc_feature (19)..(121): NCBI GI: 256730985 Blast Desc: NECHADRAFT_84771 [Nectria haematococca mpVI 77-13-4]
  misc_feature (11)..(120): NCBI GI: 46125919 Blast Desc: FG07337.1 [Gibberella zeae PH-1]
  misc_feature (12)..(86): NCBI GI: 85101377 Blast Desc: NCU04175 [Neurospora crassa OR74A] gi|16944641|emb|CAD11401.1| [Neurospora crassa] gi|28922675|gb|EAA31899.1| NCU04175 [Neurospora crassa OR74A]
  misc_feature (11)..(99): NCBI GI: 156064007 Blast Desc: SS1G_00011 [Sclerotinia sclerotiorum 1980] gi|154690873|gb|EDN90611.1| SS1G_00011 [Sclerotinia sclerotiorum 1980]
  misc_feature (14)..(103): NCBI GI: 240111846 Blast Desc: CPC735_013090 [Coccidioides posadasii C735 delta SOWgp]
  misc_feature (14)..(103): NCBI GI: 119173500 Blast Desc: CIMG_10210 [Coccidioides immitis RS]
  misc_feature (17)..(88): NCBI GI: 189196082 Blast Desc: PTRG_04046 [Pyrenophora tritici-repentis Pt-1C-BFP] gi|187980258|gb|EDU46884.1| PTRG_04046 [Pyrenophora tritici-repentis Pt-1C-BFP]
  misc_feature: Useful for introducing or modulating the production of volatile compounds
MEYRTKQPENLSPFQRLGRWLSLKQYQIEVTFGVYMFTPTEKFIFWSVVFLLSAMGSIATILYLPQHIVFIINRAWFYVNGGENGSASTSSILAAKDAISLSLTSDYTTPTAAAAKTLREL

SEQ ID NO: 4852 - DNA, 5019 bp, Muscodor strobelii; identical to SEQ ID NO: 4844
  misc_feature: SGI EST ID NO. CUFF.13824.0
  misc_feature: Variant of the nucleotide sequence at SEQ ID NO 4850

SEQ ID NO: 4853 - DNA, 2445 bp, Muscodor strobelii
  misc_feature: SGI cDNA ID NO. 561322
  misc_feature: Encodes the peptide sequence at SEQ ID NO 4854
atgagtcaagggagtacagatattgagtacctatcagtgggtgcgaataggcagaccgccgtggctgactggagcgacgatgggttggtagcatttggagccgattctaatattgccctctggcaaccccatgattcgcagcctaaaggaataagtggcctcctgtcgggacacaaagatatagtgaaggctctcaaatttctgcccaagattgaaggcgacgacaagacttatttactcagtggagccgatgaccactcactcaggttgtggtctttgacatcatctggcgatgctacatgtctccagagcctgagtgagcacactgcagcgataaattgtatcacaacggtatgccgaaggccaggtctttctaaaaggcctataatcgtggccacaggcgctgcagacgcatcggtgaaaatatgggtcttcgacgggaaagaggtacggctagtgcagactatcaacctaaaaccgaagttcttttctttggcgattgctctcagttatctcagcaaggacgatcaatccgaggctttggtgttagctgtagcagggaccagagacaccgttcaaattttcgtatcgcagtctgctgccaacccggactttcagcttcaggctacgctgggaggacacgaaggctggatcagatctcttgacttcacatgggagaacaatgaaggaggttccgacttgatactggcttcagcgagccaagataaatacatccgtctatggcgtctacaccgaggaaaggagttaccagcggccgctgccaatggggcagatccatctttgggcgcatatatgccaggaaagtctctctccaataaagcacatatgcttaaatccggagaacaagactacaccgtcacctttgaggctctattactcggacatgatgactggatctacagtgccaagtggtatacaaacccagactcgaaaaagctacagcttctgtccacatctgcagacaatacactagcaatatgggaagccgatccggattcaggcatttgggtgaccaacgtgcgcctaggcgaaatcagccgcgagaaaggcgccacgacggccacgggaagcacaggcggtttctggactggtttatggtcgccgaacggcaaatcagtgacttgcctgggccggactggaagctggcggatctgggactacaacgaagaacgcgatcaatggacccctcgcataggaatcagcggccacacgagagcagtcactggaatatcgtggagtaagaacggcgagtatctgctttctaccagctctgaccagaccacacggcttcacgcaagctggaagcgagatggtgcagatagaaacacatggcatgagatggcgcgccctcagattcacggctacgatttgaactgtatcgatgctcttggcgattcacagtttgtttccggcgcagacgagaagctgatgcgtgttttcgacgagccgaaagcagtggcaaagctcttgaatcgtctcgctggtatcaaccttaattcaaatgaaggaggcaaaggtatcgagtccatgcctgacgcggcgaacatgcctgttctagggctctccaacaaagcgatcgacgacgcggaacccacgcaaggagaagacggtcagacggtagaaacaccagaggcccgtaaatccgccctcgacgtcgaccacccaccattcgaggatagtctatcacgccacacgctgtggccagagacggagaagttgtacggccacggatacgagctttcctgtcttgcagtaagccaggacggcaaactggtagccagcgcgtgtaaagcaagttccgtcaaccatgccgtgatccgactgttcgagacagagcgatggaccgagatcaagccgccattgaccgcgcactcgctgaccgtcacacgcctgcgatattcaccgaatgataaatatcttctgagcgtaggccgtgaccgtcagtgggctgtcttcgagcgagacactgcggagcagactacttataagctgctgcagtgcaacactaaagctcacagtcgtatgattctcgataccgcctgggcaccgtcgacttcggagttggtcttcgcgacaggcggtcgtgacaagcaggtcaagatatggcgcaaggagtcatcggaatcagagatcacctgcgttcagaccattgccgagactcaccccgtcacagctgtcgactttaagccctactccaacaaagacgggagatacgtcctcgcagttggcaatgaggctggcaagatttcgatacactatattgacgcgacttctttggcggtatcgtcgagtgtcgcattgcgccctgacctctgcctcgccaaatcagtcctccagctggcatggaggccacaagccgactcaaatgagcttgccatcgcgggagaggacaattcattgcgagtgtactcattcgccgaatga

SEQ ID NO: 4854 - protein, 814 aa, Muscodor strobelii
  misc_feature: SGI Peptide ID NO. 561322
  misc_feature (205)..(249): Pfam Id: PF00400 Pfam Desc: WD domain, G-beta repeat
  misc_feature (401)..(439): Pfam Id: PF00400 Pfam Desc: WD domain, G-beta repeat
  misc_feature (49)..(92): Pfam Id: PF00400 Pfam Desc: WD domain, G-beta repeat
  misc_feature (670)..(710): Pfam Id: PF00400 Pfam Desc: WD domain, G-beta repeat
  misc_feature (99)..(144): Pfam Id: PF00400 Pfam Desc: WD domain, G-beta repeat
  misc_feature (293)..(335): Pfam Id: PF00400 Pfam Desc: WD domain, G-beta repeat
  misc_feature (622)..(660): Pfam Id: PF00400 Pfam Desc: WD domain, G-beta repeat
  misc_feature (9)..(810): NCBI GI: 261187614 Blast Desc: RNA polymerase II Elongator subunit [Ajellomyces dermatitidis SLH14081] gi|239594117|gb|EEQ76698.1| RNA polymerase II Elongator subunit [Ajellomyces dermatitidis SLH14081]
  misc_feature (9)..(814): NCBI GI: 240277060 Blast Desc: elongator complex protein [Ajellomyces capsulatus H143]
  misc_feature (9)..(814): NCBI GI: 225554293 Blast Desc: RNA polymerase II 90 kDa subunit [Ajellomyces capsulatus G186AR]
  misc_feature (9)..(809): NCBI GI: 226285790 Blast Desc: elongator complex protein [Paracoccidioides brasiliensis Pb01]
  misc_feature (9)..(809): NCBI GI: 225678595 Blast Desc: elongator complex protein [Paracoccidioides brasiliensis Pb03]
  misc_feature (105)..(812): NCBI GI: 258569633 Blast Desc: conserved [Uncinocarpus reesii 1704] gi|237903890|gb|EEP78291.1| conserved [Uncinocarpus reesii 1704]
  misc_feature (1)..(761): NCBI GI: 256731375 Blast Desc: [Nectria haematococca mpVI 77-13-4]
  misc_feature (8)..(767): NCBI GI: 46125921 Blast Desc: FG07338.1 [Gibberella zeae PH-1]
  misc_feature (9)..(813): NCBI GI: 156048042 Blast Desc: SS1G_08752 [Sclerotinia sclerotiorum 1980] gi|154693149|gb|EDN92887.1| SS1G_08752 [Sclerotinia sclerotiorum 1980]
  misc_feature (9)..(812): NCBI GI: 154305910 Blast Desc: BC1G_08186 [Botryotinia fuckeliana B05.10] gi|150853071|gb|EDN28263.1| BC1G_08186 [Botryotinia fuckeliana B05.10]
MSQGSTDIEYLSVGANRQTAVADWSDDGLVAFGADSNIALWQPHDSQPKGISGLLSGHKDIVKALKFLPKIEGDDKTYLLSGADDHSLRLWSLTSSGDATCLQSLSEHTAAINCITTVCRRPGLSKRPIIVATGAADASVKIWVFDGKEVRLVQTINLKPKFFSLAIALSYLSKDDQSEALVLAVAGTRDTVQIFVSQSAANPDFQLQATLGGHEGWIRSLDFTWENNEGGSDLILASASQDKYIRLWRLHRGKELPAAAANGADPSLGAYMPGKSLSNKAHMLKSGEQDYTVTFEALLLGHDDWIYSAKWYTNPDSKKLQLLSTSADNTLAIWEADPDSGIWVTNVRLGEISREKGATTATGSTGGFWTGLWSPNGKSVTCLGRTGSWRIWDYNEERDQWTPRIGISGHTRAVTGISWSKNGEYLLSTSSDQTTRLHASWKRDGADRNTWHEMARPQIHGYDLNCIDALGDSQFVSGADEKLMRVFDEPKAVAKLLNRLAGINLNSNEGGKGIESMPDAANMPVLGLSNKAIDDAEPTQGEDGQTVETPEARKSALDVDHPPFEDSLSRHTLWPETEKLYGHGYELSCLAVSQDGKLVASACKASSVNHAVIRLFETERWTEIKPPLTAHSLTVTRLRYSPNDKYLLSVGRDRQWAVFERDTAEQTTYKLLQCNTKAHSRMILDTAWAPSTSELVFATGGRDKQVKIWRKESSESEITCVQTIAETHPVTAVDFKPYSNKDGRYVLAVGNEAGKISIHYIDATSLAVSSSVALRPDLCLAKSVLQLAWRPQADSNELAIAGEDNSLRVYSFAE

SEQ ID NO: 4855 - DNA, 1188 bp, Muscodor strobelii
  misc_feature: SGI cDNA ID NO. 561323
  misc_feature: Encodes the peptide sequence at SEQ ID NO 4856
atgtcgcagaaccgccctactgcggcattcaactcgctccgcatgggagaagtcatccgcgaaaaggtccaagacggcgtcaccggcgagacgcgggacctgcagtacacgcaatgcaaaatcgtcggcaatggctcattcggcgtcgtcttccagaccaaattatcgccgtctggtgaagatgctgccatcaaacgtgtcctccaggacaagaggttcaagaaccgagagcttcaaatcatgcgtattgttcggcaccccaacatcgtgcagctcaaggccttttactattctaatggcgagaggaaggatgaagtttatctgaatctcgtgcaagaatttgttcctgaaacggtctaccgagcctcgcggttcttcaacaaaatgaagactaccatgccgatcctcgaagtcaagctgtacatctatcagttattccgagctttggcctacattcactcgcagggaatctgccatcgtgatatcaagcctcagaacctgcttctagaccccaacacgggaatcctcaagctctgcgactttggcagtgccaaaatattggtcgagaacgagccaaacgtgtcgtatatctgctccagatattacagagcaccagaactaattttcggcgctaccaactacacaaccaagatagacgtctggtcaaccggttgtgtgatggcagagttgatgcttggccagccgctattccctggagaatccggaattgatcagctggtcgaaatcatcaaagttctggggactcccacgcgagagcagatccggaccatgaaccctaactacatggagcacaaattcccgcaaatcaagcctcaccctttcagtaaggtattcagaaaggcagacgccaacgctttggacttgatagcaaaactgctagagtatactccaaccgaacgattgagtgccgtggatgcgatggttcacccctttttcgacgagttgcgagaccctaacaccaagcttccggactcgaggcacacgagtggccaattgagggagctaccgaatctctttgatttcactaaacatgaaatgtcaatcgcaccacggctgaatcataagctcgttcctgcacatatcaagtctgtgttggcttctcgggggatcgacatcgataacttcacgccgttaacgaagcaggagatgatggcacggttagattga

SEQ ID NO: 4856 - protein, 395 aa, Muscodor strobelii
  misc_feature: SGI Peptide ID NO. 561323
  misc_feature (36)..(319): Pfam Id: PF00069 Pfam Desc: Protein kinase domain
  misc_feature (36)..(116): Pfam Id: PF07714 Pfam Desc: Protein tyrosine kinase
  misc_feature (1)..(395): NCBI GI: 46125903 Blast Desc: FG07329.1 [Gibberella zeae PH-1]
  misc_feature (1)..(395): NCBI GI: 85101419 Blast Desc: protein kinase gsk3 [Neurospora crassa OR74A] gi|11595722|emb|CAC18200.1| glycogen synthase kinase 3 alpha [Neurospora crassa] gi|28922685|gb|EAA31909.1| protein kinase
  misc_feature (1)..(395): NCBI GI: 116198021 Blast Desc: CHGG_07166 [Chaetomium globosum CBS 148.51] gi|88178445|gb|EAQ85913.1| CHGG_07166 [Chaetomium globosum CBS 148.51]
  misc_feature (1)..(395): NCBI GI: 145607095 Blast Desc: conserved [Magnaporthe grisea 70-15] gi|145014690|gb|EDJ99258.1| conserved [Magnaporthe grisea 70-15]
  misc_feature (1)..(395): NCBI GI: 74274842 Blast Desc: glycogen synthase kinase [Magnaporthe grisea]
  misc_feature (1)..(395): NCBI GI: 171693957 Blast Desc: protein product [Podospora anserina] gi|170946927|emb|CAP73731.1| protein product [Podospora anserina]
  misc_feature (1)..(395): NCBI GI: 119196477 Blast Desc: CIMG_02613 [Coccidioides immitis RS]
  misc_feature (1)..(395): NCBI GI: 239608899 Blast Desc: glycogen synthase kinase [Ajellomyces dermatitidis ER-3]
  misc_feature (1)..(395): NCBI GI: 119467830 Blast Desc: glycogen synthase kinase (Skp1), [Neosartorya fischeri NRRL 181] gi|119405873|gb|EAW15824.1| glycogen synthase kinase (Skp1), [Neosartorya fischeri NRRL 181]
  misc_feature (1)..(395): NCBI GI: 238493984 Blast Desc: glycogen synthase kinase (Skp1), [Aspergillus flavus NRRL3357] gi|220694878|gb|EED51221.1| glycogen synthase kinase (Skp1), [Aspergillus flavus NRRL3357]
  misc_feature (18)..(395): SWISSPROT Homolog: EC 2.7.11.1 Non-specific serine/threonine protein kinase
MSQNRPTAAFNSLRMGEVIREKVQDGVTGETRDLQYTQCKIVGNGSFGVVFQTKLSPSGEDAAIKRVLQDKRFKNRELQIMRIVRHPNIVQLKAFYYSNGERKDEVYLNLVQEFVPETVYRASRFFNKMKTTMPILEVKLYIYQLFRALAYIHSQGICHRDIKPQNLLLDPNTGILKLCDFGSAKILVENEPNVSYICSRYYRAPELIFGATNYTTKIDVWSTGCVMAELMLGQPLFPGESGIDQLVEIIKVLGTPTREQIRTMNPNYMEHKFPQIKPHPFSKVFRKADANALDLIAKLLEYTPTERLSAVDAMVHPFFDELRDPNTKLPDSRHTSGQLRELPNLFDFTKHEMSIAPRLNHKLVPAHIKSVLASRGIDIDNFTPLTKQEMMARLD

SEQ ID NO: 4857 - DNA, 4164 bp, Muscodor strobelii
  misc_feature: SGI EST ID NO. CUFF.12617.1
  misc_feature: Variant of the nucleotide sequence at SEQ ID NO 4855
ttcgtgcaatcgataaggtacctgcactactaacctgcgcgtcaatcatggtcacccctccttcaaattgaagtcagccaacaacacccagcatcaccttctgcttctttctttccctcttctgcccgagttacagttggattctgtatcaatctgccagaaccaagtaaccctcttttctagaaaggaagagaacgagaaaataaccacacaagacacatagacgcatgaaaacgggctgactcgactttgacgtctgactgtctcctatttctgtctcttgtctctcactcagtcactactatcccctcccaccagacccctctccctctcaacccatccatcgcttgaccattcatacgaatagctgcccataccctggcgcagacagcgtcttcctgccaacctacccacctaagatatcgatcttaacaccggcttttgcattcacaactcgtgtttgttaagcttgtcttcctgggcccctctgccgtcatcctaaccacagaacgagcagcacaaaacatcggcatctcatctccgttagccattgcctttttcttttaaaggtgagttcgtatttcgttgccattgctactgccttgccaattcattgtcaattcatcgttgcggttggctaccggtgcggccgttacactcccgggaccaccgatgaagagagggcttgccgccgtcgcacacgcacctcacactcaccatccattctatatctacatgccgtaccttaggcacctacctctcttgaattcctgtacctgttgcaacctctagcgggcctcatcatttctgcgcccgtcaacatcgcattgtcccctcaggcgccttgccagtcaggtatagacgtattcagtgtcatgcctgctctcatgacgcattctcgtccgcatatacattcacactatgcactgcattgtagtcggtcactcgttgaaaataaggacctgcagctgagaggtactccaattcatcatccacttccaaacctgaagtaccgaacctgatatatctcccaacgcattcccgctaccccgtttccctcacacccaccttctccccgtgcccatttcattcctagtccgcctcaagcctgaagcgcatagcctgaggtgatactcgcttgcaaccgcctgcacacagaggtgcctctcccgctactatccagacgtgttttttttacctttgcatagcccgcaccagtttccccagctgttcgccccgaggaatcctattccggactactacagtacgtgtagctcagaatagcttgatcgacctcattacctaacaagcctttttaatgcaaaaaaagtcacgctcgtcatcctatcacctcgcctgcattcaacagccaatccctgctgaagaacccccgccagcatccctaccttacatgctacctgacttgcccttcagtatacattagtacatagactgctctcccccctccacccacctatcctggcctctgcctgccagactcgccctcctcctgtgacaccacaagcgcctgtctcttcgcctcgaaaacacctcgagcttcttgcagactcatcatctaactgactgccaccagtgtatgcacagcatcagcacacgagcaagcgccgcaagatcagatcattttgcctctgtacccacccccactacagaaaccgccttgcagcgccgcccctcttatagttttgctagcagtagtagttcgcactgcgtcgcggttcagctctctactcaagcgcttcactcgactgggccaacttcattacattgagtccgactcgtccaaaagctcatagcaaacctgccctcaatcaatcaccaacatagccaggcggcccgaccgattgacaacatccgaattgttgcccaacacggcgtccataattgtgtctcggacatctcttttttcctgacaactggagacaactcgggctactttgctcctgtgcatccaaggctgatatttgtccaaaatgtcgcagaaccgccctactgcggcattcaactcgctccgcatgggagaagtcatccgcgaaaaggtccaagacggcgtcaccggcgagacgcgggacctgcagtacacgcaatgcaaaatcgtcggcaatggctcattcggcgtcgtcttccagaccaaattatcgccgtctggtgaagatgctgccatcaaacgtgtcctccaggacaagaggttcaagaaccgagagcttcaaatcatgcgtattgttcggcaccccaacatcgtgcagctcaaggccttttactattctaatggcgagaggaaggatgaagtttatctgaatctcgtgcaagaatttgttcctgaaacggtctaccgagcctcgcggttcttcaacaaaatgaagactaccatgccgatcctcgaagtcaagctgtacatctatcagttattccgagctttggcctacattcactcgcagggaatctgccatcgtgatatcaagcctcagaacctgcttctagaccccaacacgggaatcctcaagctctgcgactttggcagtgccaaaatattggtcgagaacgagccaaacgtgtcgtatatctgctccagatattacagagcaccagaactaattttcggcgctaccaactacacaaccaagatagacgtctggtcaaccggttgtgtgatggcagagttgatgcttggccagccgctattccctggagaatccggaattgatcagctggtcgaaatcatcaaagttctggggactcccacgcgagagcagatccggaccatgaaccctaactacatggagcacaaattcccgcaaatcaagcctcaccctttcagtaaggtattcagaaaggcagacgccaacgctttggacttgatagcaaaactgctagagtatactccaaccgaacgattgagtgccgtggatgcgatggttcacccctttttcgacgagttgcgagaccctaacaccaagcttccggactcgaggcacacgagtggccaattgagggagctaccgaatctctttgatttcactaaacatgaaatgtcaatcgcaccacggctgaatcataagctcgttcctgcacatatcaagtctgtgttggcttctcgggggatcgacatcgataacttcacgccgttaacgaagcaggagatgatggcacggttagattgagccaatctcgaacttggcttttgtcttgtcctcgattgagcattatcgactgggtcatcctaacgtaattggtcgctcgccatcttgcaacaccttcatcacctcgaacccagatcttttgtgattggcaaacctgaaacaggtggatctcagcgtatctggacgtgtttccctcggacttgtcatcgacgggttggatgtgagattcggacattggaaaactgggcagggatgctgcttctgtggcgatatctgctcaggtattgctgacactcgccagatcctcagtgtgtgacatggacggagcggcctgatgaaatgcagtggcagggatagcccgcatgtgtacgacatggggaaaacaattgactagaacgcgcgaaatccgatatgcgttctgagctctcttctatgcttgaccgagacggcgtgctttttatctatcttgttcgattattcactttgtccttgtggtggaacagtcacgaggtggctggctccctctttcgtggcctcgctaaggcaatgctcacacatatatggtgagggtggaacgacgacggtgtacgacttgcccgagagggcttggggctcggagttggaccaccggggatttttacgtgccgggaaacggcaccccaaaggaaaccactgggccgggctcgtggtctatggaagtaatcgagcgttcagggcccaaggggggaccatcggatattcccaaaagatttcttttgcatcggacggcgtactcccttcgtctgcacatgacaagtgggagaggacagcatacaaaaatgacaaaacaaaagggtggccggctgcttctgacaggcgggccaaataggcacggtttcactactagacgctcaaccatgtaaagagaagcaattatggccgaacagagaaactcgatatcatcacttaatatgtatgtttcgttttgaataatgtgcttgcacttgaagtgaaataggtacatgaa

SEQ ID NO: 4858 - DNA, 2379 bp, Muscodor strobelii
  misc_feature: SGI cDNA ID NO. 561324
  misc_feature: Reduced expression when VOC is produced
  misc_feature: Encodes the peptide sequence at SEQ ID NO 4859
atggccgactacgatcgcagaccccacggcggcggcttcaaccgcaagcgacgttacagagatgacgatgactttgatcgccgaccccagcgccgccgctacgatccaccggtctcggttaagatacggaaacaactgctgggcctagccgagtcgccccatcgccgctggcacgaggaggtgcagtccattggtcagatcgttgccgacaactacgagcaggaccccgacctccagaccaccctgctcgacctggtccccgacatggtcgtcgagcagccgctcaagatccccttcgtcgctgccgtcgtgctggtcatcaactcgctgaagcccgacatcctcgacgccctgctcgcccgcatcgtctctgccaccgaggccaagatccaggagggcgagtggcgcgatgtcaagctccatctcaagttcctcgcctgcctccagagctgcctcgagggcgacggcttgtttcccgtcctcgacgacctgttcgagcgcgccgtcgtcctgcagacggccagctccgaagacaccattggaaccgagcttgtcaagatcatccttctcactatcccctacatcatcgccgctgcgtccacgcctgaatcgcaccagaaggctgctgcgctcatggacaagaccgacatcatcgcctccgagccacacgccttgcaagtcctgatagacccctaccatgtcgaggcaggcgctgagagccccctggccaatatgagcctcatcagcctgctccagaaacaactccagaccgaagccgctgccgagtggcccctggcctgtctcccgcggccatggaagatgcccctggaggagatcgagcagcaggagaagctcgataatgcagctaagcatgtgctgcctaccatatcggttcccgagaaggtcatcacgggccctcgccccctgttccccgagatatactactccgtctacgtcaaccaggacatcgagtccgttccgcccgtcaccaatctcgccgcctccatcatccgagatgcacttcttgatactatcaacgtcttgcacttcaatcgcaacatcacggctcgctttctcatcgacgccgattgctattttgcgccgggaatcttcgtgaagcgtgcgactcctttcgaccggctccgcgatatcgacggtgataagtctacatggaagcctgaagatgtggctgtggatgccgtcttctcgcagttgttccagcttcccaccgcggagcacaagcttgtctactaccattccgtgttgacagaagcttgcaagatcgcacccgccgccattgctccgagtctcggtcgtgccatccgccactcgtaccagaacctccaccgcctcgatcttgagctctgctaccgcttcctggactggtttactcatcatctcagcaacttcggtttcatgtggaagtggacggagtgggtcgacgacgtcagcttgcccgacatgcacccctgcaaagccttcatcataggcgcgctggacaaggagatccgtctcagtttcgcccagcgcatcaaaggaacattgcctgagccgtatcaggcactcatcggccccgagaaggagcaggacacacccgacttcaaattcaacaatgagcacactccttttgccgcagagggcaaagagctagcttcgcttttgaagcgcaaggctccggatgaggagattcaacccgtcatcgaccgcatccactcagcagctctcgatcaatccatcgaccccctggtctcaagcacagatgtctttatgacggccgtatgctgggttggttccaaatcactctctcacgtgctcgcctgcatagagcgaaccaaagagagactgctcgatgcaggcgctgcatctgaagccgctcgcgcccaaatcatcacagcagttatgagctactggtcttcccacccgggtgtggctatcagtataatcgagaaattactcaattattctatcgtcactccaagcgccgtcattgactgggcgctggttagtgatcgcgccggtccctacggccaggcattgagcaaagcttgggtctttgagctggtgttccagacggttgtcaaagtcacgactcgcctccgccaggtcgttaagtccggcttcacggaggatggtcaacaagagctgacggctatgagggagctattcaaggccatggacgacgcgctcgtttcctgggccagcggcacgaaggaccagatgatggatccacaggttgaggatggcggtgaagacctcgtgaagaggtggggagagagatggttgagggttttcagacggaggagcgccatagaggaagcgtttctcgtggactataaaccagccatggatgtagatcccgtgacagaggagatcatttag

SEQ ID NO: 4859 - protein, 792 aa, Muscodor strobelii
  misc_feature: SGI Peptide ID NO. 561324
  misc_feature (327)..(517): Pfam Id: PF09088 Pfam Desc: MIF4G like
  misc_feature (534)..(778): Pfam Id: PF09090 Pfam Desc: MIF4G like
  misc_feature (1)..(776): NCBI GI: 85101427 Blast Desc: NCU04187 [Neurospora crassa OR74A] gi|11595723|emb|CAC18201.1| related to cap binding protein 80 (Cbp80) [Neurospora crassa] gi|28922687|gb|EAA31911.1| NCU04187
  misc_feature (1)..(777): NCBI GI: 256731369 Blast Desc: [Nectria haematococca mpVI 77-13-4]
  misc_feature (1)..(777): NCBI GI: 46125901 Blast Desc: FG07328.1 [Gibberella zeae PH-1]
  misc_feature (15)..(777): NCBI GI: 116198019 Blast Desc: CHGG_07165 [Chaetomium globosum CBS 148.51] gi|88178444|gb|EAQ85912.1| CHGG_07165 [Chaetomium globosum CBS 148.51]
  misc_feature (21)..(775): NCBI GI: 171693955 Blast Desc: protein product [Podospora anserina] gi|170946926|emb|CAP73730.1| protein product [Podospora anserina]
  misc_feature (1)..(777): NCBI GI: 119467832 Blast Desc: cap binding protein [Neosartorya fischeri NRRL 181] gi|119405874|gb|EAW15825.1| cap binding protein [Neosartorya fischeri NRRL 181]
  misc_feature (15)..(777): NCBI GI: 145607097 Blast Desc: MGG_12123 [Magnaporthe grisea 70-15] gi|145014691|gb|EDJ99259.1| MGG_12123 [Magnaporthe grisea 70-15]
  misc_feature (1)..(775): NCBI GI: 258569641 Blast Desc: conserved [Uncinocarpus reesii 1704] gi|237903894|gb|EEP78295.1| conserved [Uncinocarpus reesii 1704]
  misc_feature (1)..(775): NCBI GI: 238842771 Blast Desc: cap binding protein [Microsporum canis CBS 113480]
  misc_feature (14)..(777): NCBI GI: 121703540 Blast Desc: cap binding protein [Aspergillus clavatus NRRL 1] gi|119398178|gb|EAW08608.1| cap binding protein [Aspergillus clavatus NRRL 1]
  misc_feature: Useful for introducing or modulating the production of volatile compounds
MADYDRRPHGGGFNRKRRYRDDDDFDRRPQRRRYDPPVSVKIRKQLLGLAESPHRRWHEEVQSIGQIVADNYEQDPDLQTTLLDLVPDMVVEQPLKIPFVAAVVLVINSLKPDILDALLARIVSATEAKIQEGEWRDVKLHLKFLACLQSCLEGDGLFPVLDDLFERAVVLQTASSEDTIGTELVKIILLTIPYIIAAASTPESHQKAAALMDKTDIIASEPHALQVLIDPYHVEAGAESPLANMSLISLLQKQLQTEAAAEWPLACLPRPWKMPLEEIEQQEKLDNAAKHVLPTISVPEKVITGPRPLFPEIYYSVYVNQDIESVPPVTNLAASIIRDALLDTINVLHFNRNITARFLIDADCYFAPGIFVKRATPFDRLRDIDGDKSTWKPEDVAVDAVFSQLFQLPTAEHKLVYYHSVLTEACKIAPAAIAPSLGRAIRHSYQNLHRLDLELCYRFLDWFTHHLSNFGFMWKWTEWVDDVSLPDMHPCKAFIIGALDKEIRLSFAQRIKGTLPEPYQALIGPEKEQDTPDFKFNNEHTPFAAEGKELASLLKRKAPDEEIQPVIDRIHSAALDQSIDPLVSSTDVFMTAVCWVGSKSLSHVLACIERTKERLLDAGAASEAARAQIITAVMSYWSSHPGVAISIIEKLLNYSIVTPSAVIDWALVSDRAGPYGQALSKAWVFELVFQTVVKVTTRLRQVVKSGFTEDGQQELTAMRELFKAMDDALVSWASGTKDQMMDPQVEDGGEDLVKRWGERWLRVFRRRSAIEEAFLVDYKPAMDVDPVTEEII

SEQ ID NO: 4860 - DNA, 3416 bp, Muscodor strobelii
  misc_feature: SGI EST ID NO. CUFF.12366.0
  misc_feature: Variant of the nucleotide sequence at SEQ ID NO 4858
tctgcctcgacctagatacctagctagcttcactactgcaggtcgcgcgtcacgtcacctttttttccacccagcagcaagttggatagctggagctttcgattcaagcagccgtagcaatcggtcaattgacattgatcaggcacatgatatttccgcttgttcctgtttctttcgtctgaaaagaggtacgcattccgactctgtggcgcaacgtaagtctctggagagatctgattactggaagctgcgcaagtgccttcttacgtcgcaggctgttacacccttcatcctaccttgacctccgggttgcacctcccgtcttacatcttcgacgagggcctagcctcacttgcgccgactgccaatcgccggcatctttgcaagatcaaccaattgttttattatctccatccggcactcattctactccagcaactagctccagcttgcagtgatcatggccgactacgatcgcagaccccacggcggcggcttcaaccgcaagcgacgttacagagatgacgatgactttgatcgccgaccccagcgccgccgctacgatccaccggtctcggttaagatacggaaacaactgctgggcctagccgagtcgccccatcgccgctggcacgaggaggtgcagtccattggtcagatcgttgccgacaactacgagcaggaccccgacctccagaccaccctgctcgacctggtccccgacatggtcgtcgagcagccgctcaagatccccttcgtcgctgccgtcgtgctggtcatcaactcgctgaagcccgacatcctcgacgccctgctcgcccgcatcgtctctgccaccgaggccaagatccaggagggcgagtggcgcgatgtcaagctccatctcaagttcctcgcctgcctccagagctgcctcgagggcgacggcttgtttcccgtcctcgacgacctgttcgagcgcgccgtcgtcctgcagacggccagctccgaagacaccattggaaccgagcttgtcaagatcatccttctcactatcccctacatcatcgccgctgcgtccacgcctgaatcgcaccagaaggctgctgcgctcatggacaagaccgacatcatcgcctccgagccacacgccttgcaagtcctgatagacccctaccatgtcgaggcaggcgctgagagccccctggccaatatgagcctcatcagcctgctccagaaacaactccagaccgaagccgctgccgagtggcccctggcctgtctcccgcggccatggaagatgcccctggaggagatcgagcagcaggagaagctcgataatgcagctaagcatgtgctgcctaccatatcggttcccgagaaggtcatcacgggccctcgccccctgttccccgagatatactactccgtctacgtcaaccaggacatcgagtccgttccgcccgtcaccaatctcgccgcctccatcatccgagatgcacttcttgatactatcaacgtcttgcacttcaatcgcaacatcacggctcgctttctcatcgacgccgattgctattttgcgccgggaatcttcgtgaagcgtgcgactcctttcgaccggctccgcgatatcgacggtgataagtctacatggaagcctgaagatgtggctgtggatgccgtcttctcgcagttgttccagcttcccaccgcggagcacaagcttgtctactaccattccgtgttgacagaagcttgcaagatcgcacccgccgccattgctccgagtctcggtcgtgccatccgccactcgtaccagaacctccaccgcctcgatcttgagctctgctaccgcttcctggactggtttactcatcatctcagcaacttcggtttcatgtggaagtggacggagtgggtcgacgacgtcagcttgcccgacatgcacccctgcaaagccttcatcataggcgcgctggacaaggagatccgtctcagtttcgcccagcgcatcaaaggaacattgcctgagccgtatcaggcactcatcggccccgagaaggagcaggacacacccgacttcaaattcaacaatgagcacactccttttgccgcagagggcaaagagctagcttcgcttttgaagcgcaaggctccggatgaggagattcaacccgtcatcgaccgcatccactcagcagctctcgatcaatccatcgaccccctggtctcaagcacagatgtctttatgacggccgtatgctgggttggttccaaatcactctctcacgtgctcgcctgcatagagcgaaccaaagagagactgctcgatgcaggcgctgcatctgaagccgctcgcgcccaaatcatcacagcagttatgagctactggtcttcccacccgggtgtggctatcagtataatcgagaaattactcaattattctatcgtcactccaagcgccgtcattgactgggcgctggttagtgatcgcgccggtccctacggccaggcattgagcaaagcttgggtctttgagctggtgttccagacggttgtcaaagtcacgactcgcctccgccaggtcgttaagtccggcttcacggaggatggtcaacaagagctgacggctatgagggagctattcaaggccatggacgacgcgctcgtttcctgggccagcggcacgaaggaccagatgatggatccacaggttgaggatggcggtgaagacctcgtgaagaggtggggagagagatggttgagggttttcagacggaggagcgccatagaggaagcgtttctcgtggactataaaccagccatggatgtagatcccgtgacagaggagatcatttagagacctggaagggggtccgtagtcctctggatcaattcgcggatgtgttctgctagggcaggatagcgaagaaataggaggacgaggatgattaggttggtgtcaggctctagcagagcgctgcaaaggactaggtctcaaaggagagagggatcgcgcacaagggaagtcgttaggaaaacatagagtttgagggtatcggtctatcttctatcgtttgcttcatgaccaggctttctttacctggttagatgggaagattatggcatccaatttcagtcctaccaggggtgcacttgacaatcgggaaaatattgagatctaggtaggattaggccaggacagacctaggaaaaataaattaagttatgtgtattcttcgtcacagtgacatttgtctggtgttgggttagcaatagtgttgaaagtgcttgcttggtcaccaaacctgttctgagatggccaaagaggtttggcgacttaattatgtggccgttcgaatggagggttttcttttggtagggagttgtcgtgggctacgataatcatagagtgcaaaggggaaaaagagagagag

SEQ ID NO: 4861 - DNA, 3120 bp, Muscodor strobelii
  misc_feature: SGI cDNA ID NO. 561325
  misc_feature: Encodes the peptide sequence at SEQ ID NO 4862
atgcgccttctgcgaatgaatgctgatggatctttcaacttgatacactttgccgataacgacgttcctagttacgcggctctatctcacacttggaggaagggcgacatcgagtgtacatatgaacgtattgccaacttggcatcatcgactcctgggaaggaaaatccccaaagtttcgacaaactgtacttttgcagccaacaagctgacaaagataagcttcaatatttctggatcgacacctgttgcattgataagaccagtagtgccgagttgagcgaggccataaattccatgttcacctggtaccagcgttcaactaggtgttatgtactattggcagacgtctcggtccacctagagaataaagatcccgcctacagggacgcccagctacgacaaagtcgctggttcactcgaggctggacattacaagagcttctagcttctccttcagtcgagttcttttcccgagaaggaacaccgctcggctcgaagcgattgttagaaaaacagctttcagagattacgggaattcctgtcgctgcactccgaggcactccgttatcattttttagcacagaagaaaagctgtcttggatgtccgcaaggcaaactacacgtgaagaggattgtgcgtactctctacttggcatcttcgacctccatatgccggcaatgtacggcgagggtagacaacatgcgctccagcgccttcagtccgagatcgagaggcaaatcaagaacccgtcgtccggtcagcaatctagcttccagcgcactgtcaatcgatggatagttccatttgaaaggaatggtcgttttaccgaccgcgaatctgagctcgcccagcttgaagagaaactattcgagaacaatcatttcactagagtttctattcatggccttggaggcgtaggcaaaacgcagctagcactggagctgctatatcgaatcagggacaaagataaggaattcatagcaatatggatacaagctaccagtatcgagagtatcgaccaaggctatcataatgccgcacggcaactagggctcgtaaactctgaagggaaagatattgatgcaaaaggacttgttctagagttcctaaatagggatatttccggtcaatggatactggtttatgacaacgctgacgatattgacgtgtggatcgacggcccagcgtctcagtcggatcggcttatagactacattcctcgaagcaagaccggaagagttattttcacgacgcgaaacaggaaaattggagttaaacttgcgcatcaaaacgtgataagtattccccaaatgcccgaaggcactgcaatgaacatgttacggaaatgtctcatcgaccaaagcctggttgatttgaaacctggcgatgcaaaagccatgctcacctcgcttactcatcttccacttgccatcgcccaggcagcggcatacatcaatgagaatggcatcaccttagcagactacttgacgctcttggattcccagggccaagacaccatagacctcctcacagagcaatttgaagatgatgcgcggtattctgatgcaaagaacccagttgcaactacgtggttgatttctttccaacaaattcagcaacgtgaccctcttgcggctgactacatgtccttcatggcttgcattgaccacaaagatgtcccgcagctacttctcccgccgggctcttcgcgcaaatctgaactggatgcgatcggcacgttaagtgcctattcattcgttactaggcgctcagaggatcgtgcgatcgatatgcacaggctcgtacaccttgtgatccaaaattggcttcggaataaaggggagctggcagattggactcacagatcatccactcggctggagcaggctttccccgaccccgaacacagaaacagactcatgtggaggacatatctcccacacgcacgccatattctcggctccgacttaatcgaaaaggatactctagatacgatcaatctcaaatggaagatagcattatgctattacagtgatggccgttttgcagaggcaatagcctactttcgagaggtattggactttcgaacgcgagtgcttggcgaagatcatccagataccttaaagactctttccaaattggctctcgcttaccatggacagagccaattccaagaggccaaagagcttggactcaaagcaatggaaggccagaggaagatcctcggcgaagaagacccggagaccatgtctaccatgagtcacctggctatgacgtacagcgatctatctcaatggaaagaagcagaagagcttgagctcctgacgatggaacttcgaaagcgcattctcggcgacgatcaccctgaaacccttgtcgggatgagcaatctagtgtatttatacaactgccaaggctggtgggaacgggctgaagagctcggcaaacagacaattcagggacgcaagaagaggctaggagttgagcatcccgaaacgttgctcagtatcggtaatctcgcacatacttataacaaccaaggacgataccaggaggccgaagacttgttagtccaggtaatgaacattcgcatccgagttcttggcgaagaccatccacataccttaagtggcatgagcaacttgggagtgagctaccacaaccaaggacgttgggatgaatccgaggccatacaatccaaagtggtggctattcgtaaggtcaagttggggccggaacatttttccacattgactagcatgtcgcatttatccttgacttaccacaatcaaggccggagggccgaggcggaagctttgggtttcgaggtgatggaatcgcgcaaaaaggtgctcggcccagagcatcatcatactttgacgagcatgagtaatcttgcgacattttatgtcgagagccagccagcgaaggccgaggaactcatgttgaatgttttagcaattcgtcttagactacttggcatggagcatgttcatactctcgccagtatggaacaactggcaactatgtataagaagcagggaaggttggctgagtctgaaaatttggatgcccaaattgaagagattcggcacaaaaagcaagcggacgtctga

SEQ ID NO: 4862 - protein, 1039 aa, Muscodor strobelii
  misc_feature: SGI Peptide ID NO. 561325
  misc_feature (25)..(147): Pfam Id: PF06985 Pfam Desc: Heterokaryon incompatibility protein (HET)
  misc_feature (1)..(1037): NCBI GI: 39971019 Blast Desc: MGG_02976 [Magnaporthe grisea 70-15] gi|149210559|ref|XP_001522654.1| MGCH7_ch7g754 [Magnaporthe grisea 70-15] gi|86196709|gb|EAQ71347.1| MGCH7_ch7g754 grisea
  misc_feature (1)..(852): NCBI GI: 156034877 Blast Desc: SS1G_13374 [Sclerotinia sclerotiorum 1980] gi|154698777|gb|EDN98515.1| SS1G_13374 [Sclerotinia sclerotiorum 1980]
  misc_feature (1)..(1038): NCBI GI: 189210760 Blast Desc: kinesin light chain 3 [Pyrenophora tritici-repentis Pt-1C-BFP] gi|187977804|gb|EDU44430.1| kinesin light chain 3 [Pyrenophora tritici-repentis Pt-1C-BFP]
  misc_feature (1)..(968): NCBI GI: 189204674 Blast Desc: kinesin light chain [Pyrenophora tritici-repentis Pt-1C-BFP] gi|187985771|gb|EDU51259.1| kinesin light chain [Pyrenophora tritici-repentis Pt-1C-BFP]
  misc_feature (1)..(665): NCBI GI: 154310212 Blast Desc: BC1G_07026 [Botryotinia fuckeliana B05.10] gi|150851587|gb|EDN26780.1| BC1G_07026 [Botryotinia fuckeliana B05.10]
  misc_feature (1)..(649): NCBI GI: 156053556 Blast Desc: SS1G_05625 [Sclerotinia sclerotiorum 1980] gi|154703406|gb|EDO03145.1| SS1G_05625 [Sclerotinia sclerotiorum 1980]
  misc_feature (1)..(649): NCBI GI: 156041064 Blast Desc: SS1G_11511 [Sclerotinia sclerotiorum 1980] gi|154695894|gb|EDN95632.1| SS1G_11511 [Sclerotinia sclerotiorum 1980]
  misc_feature (59)..(878): NCBI GI: 156050931 Blast Desc: SS1G_08054 [Sclerotinia sclerotiorum 1980] gi|154692453|gb|EDN92191.1| SS1G_08054 [Sclerotinia sclerotiorum 1980]
  misc_feature (258)..(1034): NCBI GI: 145235101 Blast Desc: An03g03030 [Aspergillus niger] gi|134057878|emb|CAK44602.1| protein product [Aspergillus niger]
  misc_feature (1)..(924): NCBI GI: 189197887 Blast Desc: kinesin light chain 1 [Pyrenophora tritici-repentis Pt-1C-BFP] gi|187981229|gb|EDU47855.1| kinesin light chain 1 [Pyrenophora tritici-repentis Pt-1C-BFP]
MRLLRMNADGSFNLIHFADNDVPSYAALSHTWRKGDIECTYERIANLASSTPGKENPQSFDKLYFCSQQADKDKLQYFWIDTCCIDKTSSAELSEAINSMFTWYQRSTRCYVLLADVSVHLENKDPAYRDAQLRQSRWFTRGWTLQELLASPSVEFFSREGTPLGSKRLLEKQLSEITGIPVAALRGTPLSFFSTEEKLSWMSARQTTREEDCAYSLLGIFDLHMPAMYGEGRQHALQRLQSEIERQIKNPSSGQQSSFQRTVNRWIVPFERNGRFTDRESELAQLEEKLFENNHFTRVSIHGLGGVGKTQLALELLYRIRDKDKEFIAIWIQATSIESIDQGYHNAARQLGLVNSEGKDIDAKGLVLEFLNRDISGQWILVYDNADDIDVWIDGPASQSDRLIDYIPRSKTGRVIFTTRNRKIGVKLAHQNVISIPQMPEGTAMNMLRKCLIDQSLVDLKPGDAKAMLTSLTHLPLAIAQAAAYINENGITLADYLTLLDSQGQDTIDLLTEQFEDDARYSDAKNPVATTWLISFQQIQQRDPLAADYMSFMACIDHKDVPQLLLPPGSSRKSELDAIGTLSAYSFVTRRSEDRAIDMHRLVHLVIQNWLRNKGELADWTHRSSTRLEQAFPDPEHRNRLMWRTYLPHARHILGSDLIEKDTLDTINLKWKIALCYYSDGRFAEAIAYFREVLDFRTRVLGEDHPDTLKTLSKLALAYHGQSQFQEAKELGLKAMEGQRKILGEEDPETMSTMSHLAMTYSDLSQWKEAEELELLTMELRKRILGDDHPETLVGMSNLVYLYNCQGWWERAEELGKQTIQGRKKRLGVEHPETLLSIGNLAHTYNNQGRYQEAEDLLVQVMNIRIRVLGEDHPHTLSGMSNLGVSYHNQGRWDESEAIQSKVVAIRKVKLGPEHFSTLTSMSHLSLTYHNQGRRAEAEALGFEVMESRKKVLGPEHHHTLTSMSNLATFYVESQPAKAEELMLNVLAIRLRLLGMEHVHTLASMEQLATMYKKQGRLAESENLDAQIEEIRHKKQADV

SEQ ID NO: 4863 - DNA, 4549 bp, Muscodor strobelii
  misc_feature: SGI EST ID NO. CUFF.12303.0
  misc_feature: Variant of the nucleotide sequence at SEQ ID NO 4861
ttcaggcaggcaatttacacatctatgtgtagtatcatgttccacagcaggaaggcattcccggcttcccgtcattgcgccttatgttctatttgtccagacctatatagttgctctctgtcttgctcttcaatcccagtctagatcgacaccagtggcaaccagcaatgcgccttctgcgaatgaatgctgatggatctttcaacttgatacactttgccgataacgacgttcctagttacgcggctctatctcacacttggaggaagggcgacatcgagtgtacatatgaacgtattgccaacttggcatcatcgactcctgggaaggaaaatccccaaagtttcgacaaactgtacttttgcagccaacaagctgacaaagataagcttcaatatttctggatcgacacctgttgcattgataagaccagtagtgccgagttgagcgaggccataaattccatgttcacctggtaccagcgttcaactaggtgttatgtactattggcagacgtctcggtccacctagagaataaagatcccgcctacagggacgcccagctacgacaaagtcgctggttcactcgaggctggacattacaagagcttctagcttctccttcagtcgagttcttttcccgagaaggaacaccgctcggctcgaagcgattgttagaaaaacagctttcagagattacgggaattcctgtcgctgcactccgaggcactccgttatcattttttagcacagaagaaaagctgtcttggatgtccgcaaggcaaactacacgtgaagaggattgtgcgtactctctacttggcatcttcgacctccatatgccggcaatgtacggcgagggtagacaacatgcgctccagcgccttcagtccgagatcgagaggcaaatcaagaacccgtcgtccggtcagcaatctagcttccagcgcactgtcaatcgatggatagttccatttgaaaggaatggtcgttttaccgaccgcgaatctgagctcgcccagcttgaagagaaactattcgagaacaatcatttcactagagtttctattcatggccttggaggcgtaggcaaaacgcagctagcactggagctgctatatcgaatcagggacaaagataaggaattcatagcaatatggatacaagctaccagtatcgagagtatcgaccaaggctatcataatgccgcacggcaactagggctcgtaaactctgaagggaaagatattgatgcaaaaggacttgttctagagttcctaaatagggatatttccggtcaatggatactggtttatgacaacgctgacgatattgacgtgtggatcgacggcccagcgtctcagtcggatcggcttatagactacattcctcgaagcaagaccggaagagttattttcacgacgcgaaacaggaaaattggagttaaacttgcgcatcaaaacgtgataagtattccccaaatgcccgaaggcactgcaatgaacatgttacggaaatgtctcatcgaccaaagcctggttgatttgaaacctggcgatgcaaaagccatgctcacctcgcttactcatcttccacttgccatcgcccaggcagcggcatacatcaatgagaatggcatcaccttagcagactacttgacgctcttggattcccagggccaagacaccatagacctcctcacagagcaatttgaagatgatgcgcggtattctgatgcaaagaacccagttgcaactacgtggttgatttctttccaacaaattcagcaacgtgaccctcttgcggctgactacatgtccttcatggcttgcattgaccacaaagatgtcccgcagctacttctcccgccgggctcttcgcgcaaatctgaactggatgcgatcggcacgttaagtgcctattcattcgttactaggcgctcagaggatcgtgcgatcgatatgcacaggctcgtacaccttgtgatccaaaattggcttcggaataaaggggagctggcagattggactcacagatcatccactcggctggagcaggctttccccgaccccgaacacagaaacagactcatgtggaggacatatctcccacacgcacgccatattctcggctccgacttaatcgaaaaggatactctagatacgatcaatctcaaatggaagatagcattatgctattacagtgatggccgttttgcagaggcaatagcctactttcgagaggtattggactttcgaacgcgagtgcttggcgaagatcatccagataccttaaagactctttccaaattggctctcgcttaccatggacagagccaattccaagaggccaaagagcttggactcaaagcaatggaaggccagaggaagatcctcggcgaagaagacccggagaccatgtctaccatgagtcacctggctatgacgtacagcgatctatctcaatggaaagaagcagaagagcttgagctcctgacgatggaacttcgaaagcgcattctcggcgacgatcaccctgaaacccttgtcgggatgagcaatctagtgtatttatacaactgccaaggctggtgggaacgggctgaagagctcggcaaacagacaattcagggacgcaagaagaggctaggagttgagcatcccgaaacgttgctcagtatcggtaatctcgcacatacttataacaaccaaggacgataccaggaggccgaagacttgttagtccaggtaatgaacattcgcatccgagttcttggcgaagaccatccacataccttaagtggcatgagcaacttgggagtgagctaccacaaccaaggacgttgggatgaatccgaggccatacaatccaaagtggtggctattcgtaaggtcaagttggggccggaacatttttccacattgactagcatgtcgcatttatccttgacttaccacaatcaaggccggagggccgaggcggaagctttgggtttcgaggtgatggaatcgcgcaaaaaggtgctcggcccagagcatcatcatactttgacgagcatgagtaatcttgcgacattttatgtcgagagccagccagcgaaggccgaggaactcatgttgaatgttttagcaattcgtcttagactacttggcatggagcatgttcatactctcgccagtatggaacaactggcaactatgtataagaagcagggaaggttggctgagtctgaaaatttggatgcccaaattgaagagattcggcacaaaaagcaagcggacgtctgagggtggtgacctgtcaaggtctgacgggtctaataatacaacgtcacacattatttcgggtgctcttcgaatgctaggcaagctaaaatacgtagattaaataagcttgtaatcaaactgtaaaactcaaaatgtccatgttgagttataatcaccagcgcttgattgtccctctgtcagaagatccggtcttcggcttacggaataaacaacacagaaaacagcaggagacataatgacctagcagctatagagagagaaaagacagatggggatcgagcaatacgccgaataaggcctgttccttctcttctcaggatccgacagctaacctgtagataatacttctgatacctagttccaccacaaggctgtgacctagctggtaccgtacaccttgtcatctaacactatcacgggacgtaaagctctgcggctatacttaagaagtaccccataatctcacaaacaagaagtcgaggcgaatagtcattgactaagttccagtttcttgatgattttctcatcgaggctgtccatatcttctaagaagtcgatgccatatttctggcaaactatctgtacgttacccctctttgcatagccatgaggggcaatagcaataactctgcccggagtacgcgcagaaagtccgaactcgagcaggcttattggggcggcagtagattaatggaaaaagacgatgacgaggtcagctttctcttgtttatcaagctcccaattgacctgctcgcgatacggatcgaacgtgatgtcttcgcgccacgtactgtcccagtccgggcggttaggattgaagattgtaatggggtagttttgaagagcggccgagagtttttcgcgccagtcaaacggcaccccattttcggttgtggctgtggttgtacctgcgaggaatacggatttgacaccacggacgggctcctctgagggcgctttgatgatttggcttttctgagccgaagacatactggtggtgttgcgaaagaagcgattaaaggctaggttctgagacacggtccagaaaagtttagacgcctgcatgggaatgcaagaatggagtgcagtgccctatggaaaccgaccaccgatgtcaaagaagagttgaagagtgattgatctggaagcgcagggcagatgttgttgcctttcagctcgccaggctcgtcattgctgtcagctggctccaggcttatcggggcgtcgggctaccatccttgaacctaccaccaaggatgcta

SEQ ID NO: 4864 - DNA, 378 bp, Muscodor strobelii
  misc_feature: SGI cDNA ID NO. 561326
  misc_feature: Elevated expression when VOC is produced
  misc_feature: Encodes the peptide sequence at SEQ ID NO 4865
atgcaggcgtctaaacttttctggaccgtgtctcagaacctagcctttaatcgcttctttcgcaacaccaccagtatgtcttcggctcagaaaagccaaatcatcaaagcgccctcagaggagcccgtccgtggtgtcaaatccgtattcctcgcaggtacaaccacagccacaaccgaaaatggggtgccgtttgactggcgcgaaaaactctcggccgctcttcaaaactaccccattacaatcttcaatcctaaccgcccggactgggacagtacgtggcgcgaagacatcacgttcgatccgtatcgcgagcaggtcaattgggagcttgataaacaagagaaagctgacctcgtcatcgtctttttccattaa

SEQ ID NO: 4865 - protein, 125 aa, Muscodor strobelii
  misc_feature: SGI Peptide ID NO. 561326
  misc_feature (28)..(125): NCBI GI: 149210557 Blast Desc: MGCH7_ch7g753 [Magnaporthe grisea 70-15] gi|86196708|gb|EAQ71346.1| MGCH7_ch7g753 [Magnaporthe grisea 70-15]
  misc_feature (28)..(125): NCBI GI: 145609804 Blast Desc: MGG_02975 [Magnaporthe grisea 70-15] gi|145017192|gb|EDK01555.1| MGG_02975 [Magnaporthe grisea 70-15]
  misc_feature (31)..(125): NCBI GI: 119470981 Blast Desc: NFIA_055580 [Neosartorya fischeri NRRL 181] gi|119406258|gb|EAW16209.1| conserved [Neosartorya fischeri NRRL 181]
  misc_feature (31)..(125): NCBI GI: 255945721 Blast Desc: Pc20g11420 [Penicillium chrysogenum Wisconsin 54-1255] gi|211588363|emb|CAP86471.1| Pc20g11420 [Penicillium chrysogenum Wisconsin 54-1255]
  misc_feature (31)..(125): NCBI GI: 70992051 Blast Desc: AFUA_6G09860 [Aspergillus fumigatus Af293] gi|66848507|gb|EAL88836.1| AFUA_6G09860 [Aspergillus fumigatus Af293] gi|159124443|gb|EDP49561.1| AFUB_075910 [Aspergillus
  misc_feature (26)..(124): NCBI GI: 171682890 Blast Desc: protein product [Podospora anserina] gi|170941404|emb|CAP67055.1| protein product [Podospora anserina]
  misc_feature (48)..(125): NCBI GI: 115385118 Blast Desc: conserved [Aspergillus terreus NIH2624] gi|114196798|gb|EAU38498.1| conserved [Aspergillus terreus NIH2624]
  misc_feature (13)..(125): NCBI GI: 46110631 Blast Desc: FG02197.1 [Gibberella zeae PH-1]
  misc_feature (48)..(125): NCBI GI: 256724994 Blast Desc: NECHADRAFT_91470 [Nectria haematococca mpVI 77-13-4]
  misc_feature (33)..(124): NCBI GI: 85096121 Blast Desc: NCU05641 [Neurospora crassa OR74A] gi|28921684|gb|EAA30966.1| conserved [Neurospora crassa OR74A]
  misc_feature: Useful for introducing or modulating the production of volatile compounds
MQASKLFWTVSQNLAFNRFFRNTTSMSSAQKSQIIKAPSEEPVRGVKSVFLAGTTTATTENGVPFDWREKLSAALQNYPITIFNPNRPDWDSTWREDITFDPYREQVNWELDKQEKADLVIVFFH

SEQ ID NO: 4866 - DNA, 4549 bp, Muscodor strobelii
  misc_feature: SGI EST ID NO. CUFF.12303.0
  misc_feature: Variant of the nucleotide sequence at SEQ ID NO 4864
tagcatccttggtggtaggttcaaggatggtagcccgacgccccgataagcctggagccagctgacagcaatgacgagcctggcgagctgaaaggcaacaacatctgccctgcgcttccagatcaatcactcttcaactcttctttgacatcggtggtcggtttccatagggcactgcactccattcttgcattcccatgcaggcgtctaaacttttctggaccgtgtctcagaacctagcctttaatcgcttctttcgcaacaccaccagtatgtcttcggctcagaaaagccaaatcatcaaagcgccctcagaggagcccgtccgtggtgtcaaatccgtattcctcgcaggtacaaccacagccacaaccgaaaatggggtgccgtttgactggcgcgaaaaactctcggccgctcttcaaaactaccccattacaatcttcaatcctaaccgcccggactgggacagtacgtggcgcgaagacatcacgttcgatccgtatcgcgagcaggtcaattgggagcttgataaacaagagaaagctgacctcgtcatcgtctttttccattaatctactgccgccccaataagcctgctcgagttcggactttctgcgcgtactccgggcagagttattgctattgcccctcatggctatgcaaagaggggtaacgtacagatagtttgccagaaatatggcatcgacttcttagaagatatggacagcctcgatgagaaaatcatcaagaaactggaacttagtcaatgactattcgcctcgacttcttgtttgtgagattatggggtacttcttaagtatagccgcagagctttacgtcccgtgatagtgttagatgacaaggtgtacggtaccagctaggtcacagccttgtggtggaactaggtatcagaagtattatctacaggttagctgtcggatcctgagaagagaaggaacaggccttattcggcgtattgctcgatccccatctgtcttttctctctctatagctgctaggtcattatgtctcctgctgttttctgtgttgtttattccgtaagccgaagaccggatcttctgacagagggacaatcaagcgctggtgattataactcaacatggacattttgagttttacagtttgattacaagcttatttaatctacgtattttagcttgcctagcattcgaagagcacccgaaataatgtgtgacgttgtattattagacccgtcagaccttgacaggtcaccaccctcagacgtccgcttgctttttgtgccgaatctcttcaatttgggcatccaaattttcagactcagccaaccttccctgcttcttatacatagttgccagttgttccatactggcgagagtatgaacatgctccatgccaagtagtctaagacgaattgctaaaacattcaacatgagttcctcggccttcgctggctggctctcgacataaaatgtcgcaagattactcatgctcgtcaaagtatgatgatgctctgggccgagcacctttttgcgcgattccatcacctcgaaacccaaagcttccgcctcggccctccggccttgattgtggtaagtcaaggataaatgcgacatgctagtcaatgtggaaaaatgttccggccccaacttgaccttacgaatagccaccactttggattgtatggcctcggattcatcccaacgtccttggttgtggtagctcactcccaagttgctcatgccacttaaggtatgtggatggtcttcgccaagaactcggatgcgaatgttcattacctggactaacaagtcttcggcctcctggtatcgtccttggttgttataagtatgtgcgagattaccgatactgagcaacgtttcgggatgctcaactcctagcctcttcttgcgtccctgaattgtctgtttgccgagctcttcagcccgttcccaccagccttggcagttgtataaatacactagattgctcatcccgacaagggtttcagggtgatcgtcgccgagaatgcgctttcgaagttccatcgtcaggagctcaagctcttctgcttctttccattgagatagatcgctgtacgtcatagccaggtgactcatggtagacatggtctccgggtcttcttcgccgaggatcttcctctggccttccattgctttgagtccaagctctttggcctcttggaattggctctgtccatggtaagcgagagccaatttggaaagagtctttaaggtatctggatgatcttcgccaagcactcgcgttcgaaagtccaatacctctcgaaagtaggctattgcctctgcaaaacggccatcactgtaatagcataatgctatcttccatttgagattgatcgtatctagagtatccttttcgattaagtcggagccgagaatatggcgtgcgtgtgggagatatgtcctccacatgagtctgtttctgtgttcggggtcggggaaagcctgctccagccgagtggatgatctgtgagtccaatctgccagctcccctttattccgaagccaattttggatcacaaggtgtacgagcctgtgcatatcgatcgcacgatcctctgagcgcctagtaacgaatgaataggcacttaacgtgccgatcgcatccagttcagatttgcgcgaagagcccggcgggagaagtagctgcgggacatctttgtggtcaatgcaagccatgaaggacatgtagtcagccgcaagagggtcacgttgctgaatttgttggaaagaaatcaaccacgtagttgcaactgggttctttgcatcagaataccgcgcatcatcttcaaattgctctgtgaggaggtctatggtgtcttggccctgggaatccaagagcgtcaagtagtctgctaaggtgatgccattctcattgatgtatgccgctgcctgggcgatggcaagtggaagatgagtaagcgaggtgagcatggcttttgcatcgccaggtttcaaatcaaccaggctttggtcgatgagacatttccgtaacatgttcattgcagtgccttcgggcatttggggaatacttatcacgttttgatgcgcaagtttaactccaattttcctgtttcgcgtcgtgaaaataactcttccggtcttgcttcgaggaatgtagtctataagccgatccgactgagacgctgggccgtcgatccacacgtcaatatcgtcagcgttgtcataaaccagtatccattgaccggaaatatccctatttaggaactctagaacaagtccttttgcatcaatatctttcccttcagagtttacgagccctagttgccgtgcggcattatgatagccttggtcgatactctcgatactggtagcttgtatccatattgctatgaattccttatctttgtccctgattcgatatagcagctccagtgctagctgcgttttgcctacgcctccaaggccatgaatagaaactctagtgaaatgattgttctcgaatagtttctcttcaagctgggcgagctcagattcgcggtcggtaaaacgaccattcctttcaaatggaactatccatcgattgacagtgcgctggaagctagattgctgaccggacgacgggttcttgatttgcctctcgatctcggactgaaggcgctggagcgcatgttgtctaccctcgccgtacattgccggcatatggaggtcgaagatgccaagtagagagtacgcacaatcctcttcacgtgtagtttgccttgcggacatccaagacagcttttcttctgtgctaaaaaatgataacggagtgcctcggagtgcagcgacaggaattcccgtaatctctgaaagctgtttttctaacaatcgcttcgagccgagcggtgttccttctcgggaaaagaactcgactgaaggagaagctagaagctcttgtaatgtccagcctcgagtgaaccagcgactttgtcgtagctgggcgtccctgtaggcgggatctttattctctaggtggaccgagacgtctgccaatagtacataacacctagttgaacgctggtaccaggtgaacatggaatttatggcctcgctcaactcggcactactggtcttatcaatgcaacaggtgtcgatccagaaatattgaagcttatctttgtcagcttgttggctgcaaaagtacagtttgtcgaaactttggggattttccttcccaggagtcgatgatgccaagttggcaatacgttcatatgtacactcgatgtcgcccttcctccaagtgtgagatagagccgcgtaactaggaacgtcgttatcggcaaagtgtatcaagttgaaagatccatcagcattcattcgcagaaggcgcattgctggttgccactggtgtcgatctagactgggattgaagagcaagacagagagcaactatataggtctggacaaatagaacataaggcgcaatgacgggaagccgggaatgccttcctgctgtggaacatgatactacacatagatgtgtaaattgcctgcctgaa

SEQ ID NO: 4867 - DNA, 1071 bp, Muscodor strobelii
  misc_feature: SGI cDNA ID NO. 561327
  misc_feature: Encodes the peptide sequence at SEQ ID NO 4868
atgtccggcgcaaagcactgggagcaggacaaggaagctaccgtctatgtcggcaacatagacgagcgcgccaccgatgcgctgatgtgggagctgatggtccaggccggccctgtcgtcaacgtccatcttcccaaggaccgcgtcacgcagtcccaccagggcttcggcttcgtcgagttcaacggcgagggcgatgccgactacgccgccaagatcatgaacggcatccgtctctacggcaaggctctgcgtgtcaacaaggcctctgctgataagcaaaagccccttgagatcggtgctgagctcttcattggcaacctggatcccatggtcgacgagaaggttctctacgacaccttcgcccgattcggcaccctcatcgcaccccccaaggtcgcccgcgacgacaacggcctcagcaaaggctacggcttcgtctcttacagcagttttgatgcttccgacgacgctatcaacaacatgaaccagcagttcctcatgaacaaggacgtctccgtacaatatgcatacaagaaggacggcaagggagagcgccacggtgacgaggcagagcgtatgctcgccgcccaggccaagaagcacaacgtttccgtcgagcccatgccgatgccaccagccctgctctcgaatccaaatcagactcctgtcggcgctccgcctgttggtgttggggctggtgctcccatcccaccgcctgtcatgcctcaacctggcttcgatcccggcatgggtgctggtggtcctcctccaaggcctatgaacttcccacctccgcctcaaatgggtcgtggtgctcctccaccgcactttggtggcccgccaccaccacatcctggtatgggtcgcccacaacatcctcttccgccagcaccctcgggtttgcccgctcgcccgccgcctgtccaaggaggatatggttctcctgcagattttcacccgggaaatttcaggggaccgcctgggcctccagggcctccgggtttcgtgccgcctgggagcgctgctccgccgccacctccgggatttgcctctgggtataatcgctga

SEQ ID NO: 4868 - protein, 356 aa, Muscodor strobelii
  misc_feature: SGI Peptide ID NO. 561327
  misc_feature (15)..(86): Pfam Id: PF00076 Pfam Desc: RNA recognition motif. (a.k.a. RRM, RBD, or RNP domain)
  misc_feature (103)..(174): Pfam Id: PF00076 Pfam Desc: RNA recognition motif. (a.k.a. RRM, RBD, or RNP domain)
  misc_feature (1)..(326): NCBI GI: 145250071 Blast Desc: An15g00100 [Aspergillus niger] gi|134082060|emb|CAK42179.1| protein product [Aspergillus niger]
  misc_feature (1)..(324): NCBI GI: 119467844 Blast Desc: splicing factor 3b subunit 4 [Neosartorya fischeri NRRL 181] gi|119405880|gb|EAW15831.1| splicing factor 3b subunit 4 [Neosartorya fischeri NRRL 181]
  misc_feature (1)..(324): NCBI GI: 70984076 Blast Desc: splicing factor 3b subunit 4 [Aspergillus fumigatus Af293] gi|66845186|gb|EAL85521.1| splicing factor 3b subunit 4 [Aspergillus fumigatus Af293] gi|159122344|gb|EDP47465.1| factor
  misc_feature (1)..(321): NCBI GI: 121703528 Blast Desc: splicing factor 3b subunit 4 [Aspergillus clavatus NRRL 1] gi|119398172|gb|EAW08602.1| splicing factor 3b subunit 4 [Aspergillus clavatus NRRL 1]
  misc_feature (1)..(332): NCBI GI: 46125929 Blast Desc: FG07342.1 [Gibberella zeae PH-1]
  misc_feature (1)..(316): NCBI GI: 238493972 Blast Desc: splicing factor 3b subunit 4 [Aspergillus flavus NRRL3357] gi|220694872|gb|EED51215.1| splicing factor 3b subunit 4 [Aspergillus flavus NRRL3357]
  misc_feature (1)..(310): NCBI GI: 258569671 Blast Desc: splicing factor 3B subunit 4 [Uncinocarpus reesii 1704] gi|237903909|gb|EEP78310.1| splicing factor 3B subunit 4 [Uncinocarpus reesii 1704]
  misc_feature (1)..(282): NCBI GI: 238842777 Blast Desc: splicing factor 3B subunit 4 [Microsporum canis CBS 113480]
  misc_feature (1)..(317): NCBI GI: 119196451 Blast Desc: CIMG_02600 [Coccidioides immitis RS]
  misc_feature (1)..(324): NCBI GI: 115398490 Blast Desc: spliceosome-associated protein 49 [Aspergillus terreus NIH2624] gi|114191717|gb|EAU33417.1| spliceosome-associated protein 49 [Aspergillus terreus NIH2624]
MSGAKHWEQDKEATVYVGNIDERATDALMWELMVQAGPVVNVHLPKDRVTQSHQGFGFVEFNGEGDADYAAKIMNGIRLYGKALRVNKASADKQKPLEIGAELFIGNLDPMVDEKVLYDTFARFGTLIAPPKVARDDNGLSKGYGFVSYSSFDASDDAINNMNQQFLMNKDVSVQYAYKKDGKGERHGDEAERMLAAQAKKHNVSVEPMPMPPALLSNPNQTPVGAPPVGVGAGAPIPPPVMPQPGFDPGMGAGGPPPRPMNFPPPPQMGRGAPPPHFGGPPPPHPGMGRPQHPLPPAPSGLPARPPPVQGGYGSPADFHPGNFRGPPGPPGPPGFVPPGSAAPPPPPGFASGYNR

SEQ ID NO: 4869 - DNA, 2755 bp, Muscodor strobelii
  misc_feature: SGI EST ID NO. CUFF.12448.0
  misc_feature: Variant of the nucleotide sequence at SEQ ID NO 4867
acacgtcaagaagatatataagatctgctttcatatagtggtctctttcagtcatactaaatgctctgcagttgaagcacgagtcgtaccttgactgacgtgctgtgtgggatatatagaggcattcggcgctacatcgcacaagttgggtcggctaaatgcttttgctttatgctgttgtttgattccgtgttctctgattgcagaggtctattacagatattctacattgccgatctccttcgactcggcccttgccattccgcggtcaactccatgcgtggtagagcgtcttttgctcgagttattatggcatcatacgctaagcagcacatgtgtgtcccgttgtatgcatcgtgtggtttaggggtgatttattgataatgtacagtttcgtggggtcgtatgatgatgattggtgatttaggtgagaggtgagaggagcttgatgatggagggtctggggtcactgcgagtgtaaccgaggtagaggatcaaaggcaggtagccgtagtgcagggcgacgcggctgacatcgatgatcttgccgatgcgctcctatcgcaaatgtgagcttctgtctttgcgacaggtcggttgagtgcaattctatttaccttggactcttccgagagggcgaacattgtggaaagtgcggcgatgaagagatgacggtgtgttgtggtgctggttgaggaatggaccttgttgtcggagaaggcggcaatggagaagcgatggaaattcgtttgctggtagatggttgaagacaagatagatgaagtgatgcaagtcttgagtcggcgccatctcaaaatttcagtggatccctgagctacgtacatgctatacggggaaatcagcaggcgccagttgccccaaagctatgcacagctgtcagaccatggcaggctccgactaccttgcctaaactgtacctgcaaataaataaatgaagcctggaaagctcaagctattataatcatatcttgacgacgaagcttcccggataactcggctgcgcccaccgcgtcgcactgtctctgtcatcaacttaacatgtccggcgcaaagcactgggagcaggacaaggaagctaccgtctatgtcggcaacatagacgagcgcgccaccgatgcgctgatgtgggagctgatggtccaggccggccctgtcgtcaacgtccatcttcccaaggaccgcgtcacgcagtcccaccagggcttcggcttcgtcgagttcaacggcgagggcgatgccgactacgccgccaagatcatgaacggcatccgtctctacggcaaggctctgcgtgtcaacaaggcctctgctgataagcaaaagccccttgagatcggtgctgagctcttcattggcaacctggatcccatggtcgacgagaaggttctctacgacaccttcgcccgattcggcaccctcatcgcaccccccaaggtcgcccgcgacgacaacggcctcagcaaaggctacggcttcgtctcttacagcagttttgatgcttccgacgacgctatcaacaacatgaaccagcagttcctcatgaacaaggacgtctccgtacaatatgcatacaagaaggacggcaagggagagcgccacggtgacgaggcagagcgtatgctcgccgcccaggccaagaagcacaacgtttccgtcgagcccatgccgatgccaccagccctgctctcgaatccaaatcagactcctgtcggcgctccgcctgttggtgttggggctggtgctcccatcccaccgcctgtcatgcctcaacctggcttcgatcccggcatgggtgctggtggtcctcctccaaggcctatgaacttcccacctccgcctcaaatgggtcgtggtgctcctccaccgcactttggtggcccgccaccaccacatcctggtatgggtcgcccacaacatcctcttccgccagcaccctcgggtttgcccgctcgcccgccgcctgtccaaggaggatatggttctcctgcagattttcacccgggaaatttcaggggaccgcctgggcctccagggcctccgggtttcgtgccgcctgggagcgctgctccgccgccacctccgggatttgcctctgggtataatcgctgaagaggagattaagtgattcggagagccaaactccacatttaatacattgatatacgcattatcaaaaccagagattctcgagcgaagaaaagcggttaaacgatcatacggatatggggcaatgcgcatccatcgaagcttagatcggctcaaaagcatcaactaccaagatccatcctacgacgcgcacgacgctccggagtgcgaaatttacaagactaaacatgttacgagataggatacgatgacgaagatagaggaaaagtgttaagaccaaagcgtctctgtagcaatggcataccacatgtggaccagtgagcgggtttctggtgatattcctacgtgttgcagatacactgttaatcagaagaacaaagtgccaacctttcaggaaactcactaccgtgacatattctcgatgaacataactgtgacttgattccccttctacaaaatcagcctaaaaataggactcagatgcttcgagacggacactccattaaagatacccactatacgcacttgaatggatcgtttcataacgatacttgtacgatcaaccgacacctgaatattagcgaatgcgaacatattagattgcttttatcacgcacagaaataaaac

SEQ ID NO: 4870 - DNA, 1407 bp, Muscodor strobelii
  misc_feature: SGI cDNA ID NO. 561328
  misc_feature: Encodes the peptide sequence at SEQ ID NO 4871
atgacatctggtcctgctctaggcccatacgatccaacaccgcagaatatgatcccttcacagcccgttatgacctcttctttcgtgatggacaacaaggcgtacgctatgtcaactatgacagcatcgggacctatggcgaatataccacctactccacagtaccagggccataatatgtacgggttcgaaaactacggaccacaaagctcaacaccatttccacactcgagtaaacaatattcatctgagcggcaacagattgaaatgtgctctatgccgtcacatgggctgctaaccccgcctcgagagacatgccgtttgtatactgggccttcggaccaaacccctgttgtcaagagcgagcctcaactattagagaagccgaagaatctaaagcctcttaagtccaatcccacaagtggcgaggccagcagtgccgagtccaaaacagacgtcgatcgcttgatgaaggttatccaaacgaaacaagagaaagaagcggccacccaacgaatgcagtatcaagcaaaagaacataactgccaggaccactcgaggcccaagaagattccgaatggaagagcagcgaaagacaagccccatgcctgtcgtaggaaaaagtgtgaaaagagattctcacagtcaactcatctccagatccacgaccgaaagcataccggagaaaaacctcatcaatgttcatttccacaatgtggaaagaggttcactcagaagggtaatttaacatcccacgagagacgccacaggggcgaaaagccattcaagtgcagttttgctggatgtaataaagcgttctctcagaaaggaaacctggcatctcatgagggcacccatcttaaaagggccaatttccgttgcattctgaagaattgtggaaagccatttagctcgcggggcaatctcaagacacaccaaaatacctaccacaaagaggatctggctgagcttgtccagaaattctcgcagatggactacgctgatatgtctgccgaagacaaagcgttgtgggaatacttcaaggacgtgcacaagaacagcaataagaacatcaagggtcgcggcaaagactgcagagtcgaacttcttgtccaaccagcggaggaatcatcaagtcaatttaacctacagcctccagccgaactgcagcagactccctaccccatatctcacgggcttccccattcaatgggcttcaatagctttggcctccgtggcaacctcggtcatgacttcctcgtcgcgagggagcatcagagcaactatggaatgtatgaaatggatcagtccagtgcctcagagggtaccatgacaccggtctgctcgccaggtggcatgtacaatgagcagcagcataacatgcagtaccagaaccgcatgtactaa

SEQ ID NO: 4871 - protein, 468 aa, Muscodor strobelii
  misc_feature: SGI Peptide ID NO. 561328
  misc_feature (232)..(256): Pfam Id: PF00096 Pfam Desc: Zinc finger, C2H2 type
  misc_feature (262)..(286): Pfam Id: PF00096 Pfam Desc: Zinc finger, C2H2 type
  misc_feature (292)..(317): Pfam Id: PF00096 Pfam Desc: Zinc finger, C2H2 type
  misc_feature (35)..(467): NCBI GI: 171693967 Blast Desc: protein product [Podospora anserina] gi|170946932|emb|CAP73736.1| protein product [Podospora anserina]
  misc_feature (141)..(385): NCBI GI: 145250075 Blast Desc: An15g00120 [Aspergillus niger] gi|134082062|emb|CAK42181.1| protein product [Aspergillus niger]
  misc_feature (99)..(367): NCBI GI: 67540666 Blast Desc: AN6503.2 [Aspergillus nidulans FGSC A4] gi|40738653|gb|EAA57843.1| AN6503.2 [Aspergillus nidulans FGSC A4] gi|259480071|tpe|CBF70869.1| TPA: C2H2 transcription factor
  misc_feature (131)..(367): NCBI GI: 189190250 Blast Desc: zinc finger protein OZF [Pyrenophora tritici-repentis Pt-1C-BFP] gi|187973070|gb|EDU40569.1| zinc finger protein OZF [Pyrenophora tritici-repentis Pt-1C-BFP]
  misc_feature (117)..(367): NCBI GI: 238493976 Blast Desc: C2H2 transcription factor (Azf1), [Aspergillus flavus NRRL3357] gi|220694874|gb|EED51217.1| C2H2 transcription factor (Azf1), [Aspergillus flavus NRRL3357]
  misc_feature (144)..(367): NCBI GI: 115398494 Blast Desc: conserved [Aspergillus terreus NIH2624] gi|114191719|gb|EAU33419.1| conserved [Aspergillus terreus NIH2624]
  misc_feature (144)..(367): NCBI GI: 119467838 Blast Desc: C2H2 transcription factor (Azf1), [Neosartorya fischeri NRRL 181] gi|119405877|gb|EAW15828.1| C2H2 transcription factor (Azf1), [Neosartorya fischeri NRRL 181]
  misc_feature (1)..(468): NCBI GI: 256731376 Blast Desc: NECHADRAFT_48671 [Nectria haematococca mpVI 77-13-4]
  misc_feature (144)..(367): NCBI GI: 70984080 Blast Desc: C2H2 transcription factor (Azf1) [Aspergillus fumigatus Af293] gi|66845188|gb|EAL85523.1| C2H2 transcription factor (Azf1), [Aspergillus fumigatus Af293]
  misc_feature (144)..(367): NCBI GI: 159122347 Blast Desc: C2H2 transcription factor (Azf1), [Aspergillus fumigatus A1163]
MTSGPALGPYDPTPQNMIPSQPVMTSSFVMDNKAYAMSTMTASGPMANIPPTPQYQGHNMYGFENYGPQSSTPFPHSSKQYSSERQQIEMCSMPSHGLLTPPRETCRLYTGPSDQTPVVKSEPQLLEKPKNLKPLKSNPTSGEASSAESKTDVDRLMKVIQTKQEKEAATQRMQYQAKEHNCQDHSRPKKIPNGRAAKDKPHACRRKKCEKRFSQSTHLQIHDRKHTGEKPHQCSFPQCGKRFTQKGNLTSHERRHRGEKPFKCSFAGCNKAFSQKGNLASHEGTHLKRANFRCILKNCGKPFSSRGNLKTHQNTYHKEDLAELVQKFSQMDYADMSAEDKALWEYFKDVHKNSNKNIKGRGKDCRVELLVQPAEESSSQFNLQPPAELQQTPYPISHGLPHSMGFNSFGLRGNLGHDFLVAREHQSNYGMYEMDQSSASEGTMTPVCSPGGMYNEQQHNMQYQNRMY

SEQ ID NO: 4872 - DNA, 4035 bp, Muscodor strobelii
  misc_feature: SGI EST ID NO. CUFF.12342.0
  misc_feature: Variant of the nucleotide sequence at SEQ ID NO 4870
gtttgaaagagcagtgaatcacccatgtgtgcaaaattaagcactgcgtcgtgttgtgacctgcattgatgcatataccatttgcatatgcctgtgtgtgatactgcactgtatacgacaagcaaagcaatgttgtttgagggtttcgtttccgaattatcgtgaacgagtttatcgcgacgatggtttcgacaagggatgggtatgggcatcggtgctgcagaccaggggaccgccagctgcaggggatgcctgtctttcccggcgccttggagagcaggctcatctcctccttgctctcgcgggaacgggcagctgccggggggctagaaggagtgtgctagcttcttggggaggtcatcgtcgactttgtccgtttgttcaggccaaatcgttgctagcttatcatggctacatccctcagctagcgctaccctcgcccgtcacgcctgacagagggtctgacgtacctcttgcccacaagatgggcgatgtgtacatgggtgctaggatgaggggagggtgttttctgggcattcattcttggcggaggctccccgagcgaactccatctctcgacaagactaaaacctcgtcgggcacagtagtcgttcacttctgcccttaggcgcttcttagctccctcatcccctacgctaagacccttgtccggttttcagagtggattccacaccaactctttgcgatgaatatcgaccagacttcattctcaattttcctcttctttctgcgttgtttacatgagaatcactcactgaatgcttgccatcgcgggtgatctggtgtgctcttctggtctcttcacaccgcatatcacgttccctgtttcgctacttaatatcgacagatccttcgtcccctctctcaaatttactaatatggcaatatctgtggaggcgcgcaggcaggcaagcaagcggccaggcgagagacaagcagaggcgggagagagtataccgttaagtcgcacgcttcgactctcgctgattctgccagccccctccgagcttgatctagtccttacagcaagcttgccacggctggatcttctctgttgtctcgttcaaaaacaagtcaactgtctcaccatcgtcgactcaattcgatctatcactttgctcttgatgctaagcccaagccgcctgcaagtttctgccgactaatacatgcgtacataataatacacctgcatatgtatacaaataattccaggtgtgaatttgcccaggtctgccgggagggggtggacgatctttggatatgagtttggagcaggccccccaagcctcatagactagtcgagctcaaccggtgcgttcgtaactgtacccacatggtaatacctacccaaaaagacccaagatctcttccctgaggggtgagcccagtcgattggctcccagatctaccctggctgcacatcattgacaccagggcttcgaggtatatacgttcactcatgccccagcccgtcgtgaacatctctagggaccgtcttcgtcttgaggtataataatatctttacgtctccacgaataagccggcaaatgctgaatgtcttcataatcaaacaccattttcctattgtcttgttgggtttctgcttttaacattgcgcctcctcctactggccaaacgcctcaacaagttgctcaaccagagaactgccccgaacataatccttccctcattggcctcctacgtcgacaccatataacacagatcttgacacatcaggctcccgagaccatacgtggtttgtttatttatggccgtacaaaacatgactgaacggctagagactaactggcagggctggtcttcaacacagcctggtccagcgtatgtcatgacatctggtcctgctctaggcccatacgatccaacaccgcagaatatgatcccttcacagcccgttatgacctcttctttcgtgatggacaacaaggcgtacgctatgtcaactatgacagcatcgggacctatggcgaatataccacctactccacagtaccagggccataatatgtacgggttcgaaaactacggaccacaaagctcaacaccatttccacactcgagtaaacaatattcatctgagcggcaacagattgaaatgtgctctatgccgtcacatgggctgctaaccccgcctcgagagacatgccgtttgtatactgggccttcggaccaaacccctgttgtcaagagcgagcctcaactattagagaagccgaagaatctaaagcctcttaagtccaatcccacaagtggcgaggccagcagtgccgagtccaaaacagacgtcgatcgcttgatgaaggttatccaaacgaaacaagagaaagaagcggccacccaacgaatgcagtatcaagcaaaagaacataactgccaggaccactcgaggcccaagaagattccgaatggaagagcagcgaaagacaagccccatgcctgtcgtaggaaaaagtgtgaaaagagattctcacagtcaactcatctccagatccacgaccgaaagcataccggagaaaaacctcatcaatgttcatttccacaatgtggaaagaggttcactcagaagggtaatttaacatcccacgagagacgccacaggggcgaaaagccattcaagtgcagttttgctggatgtaataaagcgttctctcagaaaggaaacctggcatctcatgagggcacccatcttaaaagggccaatttccgttgcattctgaagaattgtggaaagccatttagctcgcggggcaatctcaagacacaccaaaatacctaccacaaagaggatctggctgagcttgtccagaaattctcgcagatggactacgctgatatgtctgccgaagacaaagcgttgtgggaatacttcaaggacgtgcacaagaacagcaataagaacatcaagggtcgcggcaaagactgcagagtcgaacttcttgtccaaccagcggaggaatcatcaagtcaatttaacctacagcctccagccgaactgcagcagactccctaccccatatctcacgggcttccccattcaatgggcttcaatagctttggcctccgtggcaacctcggtcatgacttcctcgtcgcgagggagcatcagagcaactatggaatgtatgaaatggatcagtccagtgcctcagagggtaccatgacaccggtctgctcgccaggtggcatgtacaatgagcagcagcataacatgcagtaccagaaccgcatgtactaactcgccagcgtccgatggcatacacactttgtcgcgaactactggacgatccagtaacagataccttccttgtcccataccaagcaacaatgggcaggtgaatcaaaagaaaacttataccattgggtcggcacaacactgattttgaagataccagacattattatatgtcaggggagtttttttgttttcataacccataccgtgaggtcttcgcgttatgttcatgtatctcggactggtgggctgagcgttgtcatccttctatttcagcgggcttggtgaggttgtatgcattttgaaaagcaaaaaaaacatgcatgtgggtggcatggcaagattctggggagtactcgggatggctgtctgaaaacaatgtaaagtgtttgctgttactcatggtcggttctttgattttcacgaggtggtctttacctattcttgttctcataatagcatctggggaaggcatccttcagcgggattggatatgtgtttgtttggttcttagtactataggtctatacactcttagctagatcggtggctgctctgacgggcgagcaacggtagcatttagaggagtagctatttactcgcgctgggcgagagctacataacaagtctgttcatcacaacgtttaacatactcttacatgatttgagtgcgaacattgctgatactgaaaaatctgtttggtatactctacgaaagtcagcaaacatacagctctcgagaaatattctggcaaactcgc

SEQ ID NO: 4873 - DNA, 381 bp, Muscodor strobelii
  misc_feature: SGI cDNA ID NO. 561329
  misc_feature: Encodes the peptide sequence at SEQ ID NO 4874
atggcggcagtggcggcggtaacttcgtgtgcggctgcaaagcctggcacctgcacgcagggcaccccccaagaggtatcgattgtggttgagttcacgggcggtctagagatgctcttctcggatcagcgtcgtcatgcgctgtccattccagccaagactcaagatgataagccgatgactatcgcatttcttatcgacttcctgtgcaacaacctcctgagtgatcctcgcaaggagctgttcgtcttggatgatcatgtgcgaccaggtatccttgttttgataaatgatgcagactgggagttagagggagaagagtcctacgagattcaaaatggtgacaatattctctttgtctcaacattgcatggaggctag

SEQ ID NO: 4874 - protein, 126 aa, Muscodor strobelii
  misc_feature: SGI Peptide ID NO. 561329
  misc_feature (27)..(126): Pfam Id: PF09138 Pfam Desc: Urm1 (Ubiquitin related modifier)
  misc_feature (26)..(126): NCBI GI: 46125923 Blast Desc: FG07339.1 [Gibberella zeae PH-1]
  misc_feature (12)..(126): NCBI GI: 242824002 Blast Desc: TSTA_005560 [Talaromyces stipitatus ATCC 10500] gi|218713094|gb|EED12519.1| TSTA_005560 [Talaromyces stipitatus ATCC 10500]
  misc_feature (26)..(126): NCBI GI: 154305912 Blast Desc: BC1G_08187 [Botryotinia fuckeliana B05.10] gi|226698196|sp|A6S5X1.1|URM1_BOTFB RecName: Full=Ubiquitin-related modifier 1 gi|150853072|gb|EDN28264.1|
  misc_feature (26)..(126): NCBI GI: 212546223 Blast Desc: conserved [Penicillium marneffei ATCC 18224] gi|210064785|gb|EEA18880.1| conserved [Penicillium marneffei ATCC 18224]
  misc_feature (17)..(126): NCBI GI: 240110874 Blast Desc: CPC735_037360 [Coccidioides posadasii C735 delta SOWgp]
  misc_feature (17)..(126): NCBI GI: 119196491 Blast Desc: CIMG_02620 [Coccidioides immitis RS] gi|121769204|sp|Q1E493.1|URM1_COCIM RecName: Full=Ubiquitin-related modifier 1
  misc_feature (22)..(126): NCBI GI: 156048040 Blast Desc: [Sclerotinia sclerotiorum 1980] gi|226698197|sp|A7ETU4.1|URM1_SCLS1 RecName: Full=Ubiquitin-related modifier 1 gi|154693148|gb|EDN92886.1|
  misc_feature (7)..(126): NCBI GI: 169776913 Blast Desc: [Aspergillus oryzae RIB40] gi|121800724|sp|Q2U9H6.1|URM1_ASPOR RecName: Full=Ubiquitin-related modifier 1 gi|83771659|dbj|BAE61789.1|
  misc_feature (5)..(126): NCBI GI: 145607105 Blast Desc: [Magnaporthe grisea 70-15] gi|145014697|gb|EDJ99265.1| [Magnaporthe grisea 70-15]
  misc_feature (26)..(126): NCBI GI: 238842767 Blast Desc: MCYG_05248 [Microsporum canis CBS 113480]
MAAVAAVTSCAAAKPGTCTQGTPQEVSIVVEFTGGLEMLFSDQRRHALSIPAKTQDDKPMTIAFLIDFLCNNLLSDPRKELFVLDDHVRPGILVLINDADWELEGEESYEIQNGDNILFVSTLHGG

SEQ ID NO: 4875 - DNA, 2739 bp, Muscodor strobelii
  misc_feature: SGI EST ID NO. CUFF.12400.1
  misc_feature: Variant of the nucleotide sequence at SEQ ID NO 4873
cgggagttcgaagtgattctttttgtttttattttttatgactcttttttttatacacgcaaagagagttgctgatcagagtgcacactaatgatgtgacgaccaatctcccggtggttattgacagacggaaggcacgaaggtgcccattgggctcgggactactttacaggtttgtacaaggcgcaggtctatctaatggtatcagagccaccagcttcctctgaaagataaaactttgtgttttcgtacacaagaaacgttatccaagtcgccggcatgactctgacaacgcccggtataatgccgcggtagaagcctcgaagcccttccatctgccaagttctcctagcaaccccgcggatacctttcccaaatcgttcttccgcatcatagttttgaagacggctccgaattacttggtacggatatgtgacggcgccggctatcagtttggagacgcccgaaaggagcagcgtggcttcgttgctcatccgtcgatgagacccatcttctgcagggccgtatctcttgagacggcgtttcatgtacatcttcttgagaggatcatagacagcaaattgcacagcgccatgtgatacaccaaatagactgatgcctaagccgcgatagaaacccctccaaccctccgtacgtagaagctgaacagcaccggaccacatactgggatacgctccaacagcacttcgatcagaagacagcatacgagtcttcagtacccataccggattggtgagtacctgggtgaagatacccgccactcccgaagagacaaaataatcctgaggtgtgagcgcagcttcgctgccggatcctggtgttttgacagtaaggatagcttgctcaacacgagccttgaagaagaagaatgaagcccagctactcgcatttccaagcagatttggtgtgagaccccgatagagagcggccagggggtggggtgtcctcgtcaagctgcggatcactgacatagtagtcagattttgtgaagttgctgcattgctgcggtggactgtgaccaaatcagccgatgaaatatacccaacgcagcgtaatgtgaccgaaaacgtactctgcatgcgggttttcacaatatcaagtgggtgaacagtgagcgtggcaacggagcctgctgtcaggcccgcaatggtctcaagcaaggcgggagagaggcccgcatctttacgcgtcatagagacgaaataatgaacgaaggtgcaagtattacattatagaaagagcatagaattccagtgttcattcaaagaacatgttgctgaaaatgatttgaattatcgacgagtatcatgacgagtgaaggccgatgcgatgaacatgaatttttgggcaatcgactcgatagatgcatatatttggtgggtaatattgcatgttagaccattgttatcccactcattgaactcttacatgagcacattccactctttggcttcaactttcgccaaattgatgagattctgtgtcgcaagaccgggaaactgaaaactagcagatcttttcttgctcacattcatttctcagcgacgttcccattatggcggcagtggcggcggtaacttcgtgtgcggctgcaaagcctggcacctgcacgcagggcaccccccaagaggtatcgattgtggttgagttcacgggcggtctagagatgctcttctcggatcagcgtcgtcatgcgctgtccattccagccaagactcaagatgataagccgatgactatcgcatttcttatcgacttcctgtgcaacaacctcctgagtgatcctcgcaaggagctgttcgtcttggatgatcatgtgcgaccaggtatccttgttttgataaatgatgcagactgggagttagagggagaagagtcctacgagattcaaaatggtgacaatattctctttgtctcaacattgcatggaggctagccagccgacacatcagaccaggcccccacgtaaccctgaacgttgcccgtttgtaaaatctctcaatttgccgtcgagtccggtggaatggtcaggataagccttgtatatttgggtcgcgagtaccatccaaatccatcttgatacgacgttgaaaacagctgtcgctgttgtctttcagcctgctcggcagtcgtcttttactttaccccgcgactctgcatctaagacatacctactttttcggcagacaactgaaggaactttcgatacggtgaacgcgcgacgtgcgacgacggtgtctagctattgattacacgcctcccttcacccctctatgctccctcccgtctcgccaagctggtccagccagatgtctcgacaatcttgacaatgacatggcgctgcccattgtgaccctgtcacgcgcggctacgcccgaacctacgcacctacatatgaacggaattgttcatttgcagccgttgctccaccgacatgcatatctccaactcgaaccatgtaataggtcagaactgccagtcgtgacgctacagcgtgtcaatcagatcgcgcggaggtgtgtgaggaagaggctcgttctatgcttaacttaacatgtacttcgtagtttgctccggcgtcaatcgattctggacaaacaacttcccgcgtctgcccaaaacagcaactggcagctagcaacgctcccaaaatcaccaatagaatgcaacgacctcgatgcagtactgtgaacatgggcatcaacacctaatgcaaac

SEQ ID NO: 4876 - DNA, 1023 bp, Muscodor strobelii
  misc_feature: SGI cDNA ID NO. 561330
  misc_feature: Encodes the peptide sequence at SEQ ID NO 4877
atgacgcgtaaagatgcgggcctctctcccgccttgcttgagaccattgcgggcctgacagcaggctccgttgccacgctcactgttcacccacttgatattgtgaaaacccgcatgcagagtacgttttcggtcacattacgctgcgttgggtatatttcatcggctgatttggtcacagtccaccgcagcaatgcagcaacttcacaaaatctgactactatgtcagtgatccgcagcttgacgaggacaccccaccccctggccgctctctatcggggtctcacaccaaatctgcttggaaatgcgagtagctgggcttcattcttcttcttcaaggctcgtgttgagcaagctatccttactgtcaaaacaccaggatccggcagcgaagctgcgctcacacctcaggattattttgtctcttcgggagtggcgggtatcttcacccaggtactcaccaatccggtatgggtactgaagactcgtatgctgtcttctgatcgaagtgctgttggagcgtatcccagtatgtggtccggtgctgttcagcttctacgtacggagggttggaggggtttctatcgcggcttaggcatcagtctatttggtgtatcacatggcgctgtgcaatttgctgtctatgatcctctcaagaagatgtacatgaaacgccgtctcaagagatacggccctgcagaagatgggtctcatcgacggatgagcaacgaagccacgctgctcctttcgggcgtctccaaactgatagccggcgccgtcacatatccgtaccaagtaattcggagccgtcttcaaaactatgatgcggaagaacgatttgggaaaggtatccgcggggttgctaggagaacttggcagatggaagggcttcgaggcttctaccgcggcattataccgggcgttgtcagagtcatgccggcgacttggataacgtttcttgtgtacgaaaacacaaagttttatctttcagaggaagctggtggctctgataccattagatag

SEQ ID NO: 4877 - protein, 340 aa, Muscodor strobelii
  misc_feature: SGI Peptide ID NO. 561330
  misc_feature (135)..(226): Pfam Id: PF00153 Pfam Desc: Mitochondrial carrier protein
  misc_feature (242)..(333): Pfam Id: PF00153 Pfam Desc: Mitochondrial carrier protein
  misc_feature (10)..(124): Pfam Id: PF00153 Pfam Desc: Mitochondrial carrier protein
  misc_feature (4)..(329): NCBI GI: 46125927 Blast Desc: FG07341.1 [Gibberella zeae PH-1]
  misc_feature (7)..(337): NCBI GI: 39943926 Blast Desc: MGG_03974 [Magnaporthe grisea 70-15] gi|145014694|gb|EDJ99262.1| MGG_03974 [Magnaporthe grisea 70-15]
  misc_feature (1)..(335): NCBI GI: 85101398 Blast Desc: NCU04180 [Neurospora crassa OR74A] gi|11595718|emb|CAC18196.1| related to FAD carrier protein FLX1 [Neurospora crassa] gi|28922680|gb|EAA31904.1| conserved crassa
  misc_feature (24)..(329): NCBI GI: 171693949 Blast Desc: protein product [Podospora anserina] gi|170946923|emb|CAP73727.1| protein product [Podospora anserina]
  misc_feature (1)..(335): NCBI GI: 121703532 Blast Desc: mitochondrial folate carrier protein Flx1, [Aspergillus clavatus NRRL 1] gi|119398174|gb|EAW08604.1| mitochondrial folate carrier protein Flx1, [Aspergillus clavatus
  misc_feature (3)..(247): NCBI GI: 261351632 Blast Desc: solute carrier family 25 member 36 [Verticillium albo-atrum VaMs.102]
  misc_feature (1)..(326): NCBI GI: 212546193 Blast Desc: mitochondrial folate carrier protein Flx1, [Penicillium marneffei ATCC 18224] gi|210064770|gb|EEA18865.1| mitochondrial folate carrier protein Flx1, [Penicillium marneffei
  misc_feature (1)..(328): NCBI GI: 119196453 Blast Desc: CIMG_02601 [Coccidioides immitis RS] gi|240110885|gb|EER29041.1| Mitochondrial carrier protein [Coccidioides posadasii C735 delta SOWgp]
  misc_feature (5)..(331): NCBI GI: 259480070 Blast Desc: TPA: mitochondrial folate carrier protein Flx1, (AFU_orthologue; AFUA_6G05170) [Aspergillus nidulans FGSC A4]
  misc_feature (1)..(330): NCBI GI: 146324355 Blast Desc: mitochondrial folate carrier protein Flx1 [Aspergillus fumigatus Af293] gi|129556233|gb|EAL85522.2| mitochondrial folate carrier protein Flx1, [Aspergillus fumigatus Af293] mitochondrial
MTRKDAGLSPALLETIAGLTAGSVATLTVHPLDIVKTRMQSTFSVTLRCVGYISSADLVTVHRSNAATSQNLTTMSVIRSLTRTPHPLAALYRGLTPNLLGNASSWASFFFFKARVEQAILTVKTPGSGSEAALTPQDYFVSSGVAGIFTQVLTNPVWVLKTRMLSSDRSAVGAYPSMWSGAVQLLRTEGWRGFYRGLGISLFGVSHGAVQFAVYDPLKKMYMKRRLKRYGPAEDGSHRRMSNEATLLLSGVSKLIAGAVTYPYQVIRSRLQNYDAEERFGKGIRGVARRTWQMEGLRGFYRGIIPGVVRVMPATWITFLVYENTKFYLSEEAGGSDTIR

SEQ ID NO: 4878 - DNA, 2894 bp, Muscodor strobelii
  misc_feature: SGI EST ID NO. CUFF.12399.0
  misc_feature: Variant of the nucleotide sequence at SEQ ID NO 4876
gtttgcattaggtgttgatgcccatgttcacagtactgcatcgaggtcgttgcattctattggtgattttgggagcgttgctagctgccagttgctgttttgggcagacgcgggaagttgtttgtccagaatcgattgacgccggagcaaactacgaagtacatgttaagttaagcatagaacgagcctcttcctcacacacctccgcgcgatctgattgacacgctgtagcgtcacgactggcagttctgacctattacatggttcgagttggagatatgcatgtcggtggagcaacggctgcaaatgaacaattccgttcatatgtaggtgcgtaggttcgggcgtagccgcgcgtgacagggtcacaatgggcagcgccatgtcattgtcaagattgtcgagacatctggctggaccagcttggcgagacgggagggagcatagaggggtgaagggaggcgtgtaatcaatagctagacaccgtcgtcgcacgtcgcgcgttcaccgtatcgaaagttccttcagttgtctgccgaaaaagtaggtatgtcttagatgcagagtcgcggggtaaagtaaaagacgactgccgagcaggctgaaagacaacagcgacagctgttttcaacgtcgtatcaagatggatttggatggtactcgcgacccaaatatacaaggcttatcctgaccattccaccggactcgacggcaaattgagagattttacaaacgggcaacgttcagggttacgtgggggcctggtctgatgtgtcggctggctagcctccatgcaatgttgagacaaagagaatattgtcaccattttgaatctcgtaggactcttctccctctaactcccagtctgcatcatttatcaaaacaaggatacctggtcgcctgttatgccatgtcagcttgccttctgatgacttgttcgagaggggctctgagatcttgtacatcaaactatcctccggcaaccggcaacggttcgaaaggtcgaaaggtcgaaagagccatccagggaaactgaaaaacaaatcgaaacgcacttacacatgatcatccaagacgaacagctccttgcgaggatcactcaggaggttgttgcacaggaagtcgataagaaatgcgatagtcatcggcttatcatcttgagtcttggctggaatggacagcgcatgacgacgctgatccgagaagagcatctctagaccgccccttaattgtaatggttagtaacgatcgacgatgataattacgtaccggctacatacgtgaactcaaccacaatcgatacctcttggggggtgccctgcgtgcaggtgccaggctttgcagccgcacacgaagttaccgccgccactgccgccataatgggaacgtcgctgagaaatgaatgtgagcaagaaaagatctgctagttttcagtttcccggtcttgcgacacagaatctcatcaatttggcgaaagttgaagccaaagagtggaatgtgctcatgtaagagttcaatgagtgggataacaatggtctaacatgcaatattacccaccaaatatatgcatctatcgagtcgattgcccaaaaattcatgttcatcgcatcggccttcactcgtcatgatactcgtcgataattcaaatcattttcagcaacatgttctttgaatgaacactggaattctatgctctttctataatgtaatacttgcaccttcgttcattatttcgtctctatgacgcgtaaagatgcgggcctctctcccgccttgcttgagaccattgcgggcctgacagcaggctccgttgccacgctcactgttcacccacttgatattgtgaaaacccgcatgcagatccaccgcagcaatgcagcaacttcacaaaatctgactactatgtcagtgatccgcagcttgacgaggacaccccaccccctggccgctctctatcggggtctcacaccaaatctgcttggaaatgcgagtagctgggcttcattcttcttcttcaaggctcgtgttgagcaagctatccttactgtcaaaacaccaggatccggcagcgaagctgcgctcacacctcaggattattttgtctcttcgggagtggcgggtatcttcacccaggtactcaccaatccggtatgggtactgaagactcgtatgctgtcttctgatcgaagtgctgttggagcgtatcccagtatgtggtccggtgctgttcagcttctacgtacggagggttggaggggtttctatcgcggcttaggcatcagtctatttggtgtatcacatggcgctgtgcaatttgctgtctatgatcctctcaagaagatgtacatgaaacgccgtctcaagagatacggccctgcagaagatgggtctcatcgacggatgagcaacgaagccacgctgctcctttcgggcgtctccaaactgatagccggcgccgtcacatatccgtaccaagtaattcggagccgtcttcaaaactatgatgcggaagaacgatttgggaaaggtatccgcggggttgctaggagaacttggcagatggaagggcttcgaggcttctaccgcggcattataccgggcgttgtcagagtcatgccggcgacttggataacgtttcttgtgtacgaaaacacaaagttttatctttcagaggaagctggtggctctgataccattagatagacctgcgccttgtacaaacctgtaaagtagtcccgagcccaatgggcaccttcgtgccttccgtctgtcaataaccaccgggagattggtcgtcacatcattagtgtgcactctgatcagcaactctctttgcgtgtataaaaaaaagagtcataaaaaataaaaacaaaaagaatcacttcgaactcccg

SEQ ID NO: 4879 - DNA, 963 bp, Muscodor strobelii
  misc_feature: SGI cDNA ID NO. 561331
  misc_feature: Encodes the peptide sequence at SEQ ID NO 4880
atgacgcgtaaagatgcgggcctctctcccgccttgcttgagaccattgcgggcctgacagcaggctccgttgccacgctcactgttcacccacttgatattgtgaaaacccgcatgcagatccaccgcagcaatgcagcaacttcacaaaatctgactactatgtcagtgatccgcagcttgacgaggacaccccaccccctggccgctctctatcggggtctcacaccaaatctgcttggaaatgcgagtagctgggcttcattcttcttcttcaaggctcgtgttgagcaagctatccttactgtcaaaacaccaggatccggcagcgaagctgcgctcacacctcaggattattttgtctcttcgggagtggcgggtatcttcacccaggtactcaccaatccggtatgggtactgaagactcgtatgctgtcttctgatcgaagtgctgttggagcgtatcccagtatgtggtccggtgctgttcagcttctacgtacggagggttggaggggtttctatcgcggcttaggcatcagtctatttggtgtatcacatggcgctgtgcaatttgctgtctatgatcctctcaagaagatgtacatgaaacgccgtctcaagagatacggccctgcagaagatgggtctcatcgacggatgagcaacgaagccacgctgctcctttcgggcgtctccaaactgatagccggcgccgtcacatatccgtaccaagtaattcggagccgtcttcaaaactatgatgcggaagaacgatttgggaaaggtatccgcggggttgctaggagaacttggcagatggaagggcttcgaggcttctaccgcggcattataccgggcgttgtcagagtcatgccggcgacttggataacgtttcttgtgtacgaaaacacaaagttttatctttcagaggaagctggtggctctgataccattagatag

SEQ ID NO: 4880 - protein, 320 aa, Muscodor strobelii
  misc_feature: SGI Peptide ID NO. 561331
  misc_feature (115)..(206): Pfam Id: PF00153 Pfam Desc: Mitochondrial carrier protein
  misc_feature (222)..(313): Pfam Id: PF00153 Pfam Desc: Mitochondrial carrier protein
  misc_feature (10)..(104): Pfam Id: PF00153 Pfam Desc: Mitochondrial carrier protein
  misc_feature (4)..(309): NCBI GI: 46125927 Blast Desc: FG07341.1 [Gibberella zeae PH-1]
  misc_feature (7)..(317): NCBI GI: 39943926 Blast Desc: MGG_03974 [Magnaporthe grisea 70-15] gi|145014694|gb|EDJ99262.1| MGG_03974 [Magnaporthe grisea 70-15]
  misc_feature (1)..(315): NCBI GI: 85101398 Blast Desc: NCU04180 [Neurospora crassa OR74A] gi|11595718|emb|CAC18196.1| related to FAD carrier protein FLX1 [Neurospora crassa] gi|28922680|gb|EAA31904.1| conserved crassa
  misc_feature (24)..(309): NCBI GI: 171693949 Blast Desc: protein product [Podospora anserina] gi|170946923|emb|CAP73727.1| protein product [Podospora anserina]
  misc_feature (1)..(315): NCBI GI: 121703532 Blast Desc: mitochondrial folate carrier protein Flx1, [Aspergillus clavatus NRRL 1] gi|119398174|gb|EAW08604.1| mitochondrial folate carrier protein Flx1, [Aspergillus clavatus
  misc_feature (3)..(227): NCBI GI: 261351632 Blast Desc: solute carrier family 25 member 36 [Verticillium albo-atrum VaMs.102]
  misc_feature (1)..(309): NCBI GI: 119196453 Blast Desc: CIMG_02601 [Coccidioides immitis RS] gi|240110885|gb|EER29041.1| Mitochondrial carrier protein [Coccidioides posadasii C735 delta SOWgp]
  misc_feature (5)..(311): NCBI GI: 259480070 Blast Desc: TPA: mitochondrial folate carrier protein Flx1, (AFU_orthologue; AFUA_6G05170) [Aspergillus nidulans FGSC A4]
  misc_feature (1)..(306): NCBI GI: 212546193 Blast Desc: mitochondrial folate carrier protein Flx1, [Penicillium marneffei ATCC 18224] gi|210064770|gb|EEA18865.1| mitochondrial folate carrier protein Flx1, [Penicillium marneffei
  misc_feature (1)..(310): NCBI GI: 146324355 Blast Desc: mitochondrial folate carrier protein Flx1 [Aspergillus fumigatus Af293] gi|129556233|gb|EAL85522.2| mitochondrial folate carrier protein Flx1, [Aspergillus fumigatus Af293] mitochondrial
MTRKDAGLSPALLETIAGLTAGSVATLTVHPLDIVKTRMQIHRSNAATSQNLTTMSVIRSLTRTPHPLAALYRGLTPNLLGNASSWASFFFFKARVEQAILTVKTPGSGSEAALTPQDYFVSSGVAGIFTQVLTNPVWVLKTRMLSSDRSAVGAYPSMWSGAVQLLRTEGWRGFYRGLGISLFGVSHGAVQFAVYDPLKKMYMKRRLKRYGPAEDGSHRRMSNEATLLLSGVSKLIAGAVTYPYQVIRSRLQNYDAEERFGKGIRGVARRTWQMEGLRGFYRGIIPGVVRVMPATWITFLVYENTKFYLSEEAGGSDTIR

SEQ ID NO: 4881 - DNA, 2894 bp, Muscodor strobelii; identical to SEQ ID NO: 4878
  misc_feature: SGI EST ID NO. CUFF.12399.0
  misc_feature: Variant of the nucleotide sequence at SEQ ID NO 4879

SEQ ID NO: 4882 - DNA, 552 bp, Muscodor strobelii
  misc_feature: SGI cDNA ID NO. 561332
  misc_feature: Encodes the peptide sequence at SEQ ID NO 4883
atgataaaaccatctgatgatcagattccccaaccagccaccgtgaccacacagacgaaacacggcgtccacgctgctctctctagtcctaggcttcacactttatacacagatcctcatgacatcgcgcacgcacacagacaatctcgatattctaccctaacaccctgcgagagaaaagcacaagataaatgggcattgatcaaggcagacgagctcgcgctctgccctatgggatggggctggcatagatacgcagacgagagctacccaggctacgaatgtcatccttgtgcgcacttcatcagcgacaagacaatagctgaagggcttccggcgatgtacggggtacccggtatttttgcacactcaggagtcacaggcgctgatcaggtccccgatccatcggagagggtgcctgaaaaatacttcgggcctgtgagaccagcgggcattgacaagtatggccggttcacatactggagctatcaggttgacgagggaaaaacgcgagaggtagacccggcgctcagagctgcattaggttggtga

SEQ ID NO: 4883 - protein, 183 aa, Muscodor strobelii
  misc_feature: SGI Peptide ID NO. 561332
MIKPSDDQIPQPATVTTQTKHGVHAALSSPRLHTLYTDPHDIAHAHRQSRYSTLTPCERKAQDKWALIKADELALCPMGWGWHRYADESYPGYECHPCAHFISDKTIAEGLPAMYGVPGIFAHSGVTGADQVPDPSERVPEKYFGPVRPAGIDKYGRFTYWSYQVDEGKTREVDPALRAALGW

SEQ ID NO: 4884 - DNA, 1761 bp, Muscodor strobelii
  misc_feature: SGI cDNA ID NO. 561333
  misc_feature: Reduced expression when VOC is produced
  misc_feature: Encodes the peptide sequence at SEQ ID NO 4885
atggagagctttttgagggcttccggtaggcggctcttgcgcagccgagtttcacgggtcgctacggcgccagtgggccgcaatggctgggtctgccagtcttgtagatggcgtcaggccggccgaatgcgcttcagctccagcgtcgtcgcgcaggacaaggagaagccgtattatgtcacaacgccaatcttctacgtcaatgcttcaccccatgtcggccatctctacagcatggtcattgccgacgtcctcaagcgatgggaggccctcaagggccgaacagcctacctggccacgggcaccgacgagcacggcatgaaggtccagcaggccgccagactgcaagacatgcctgccaaggccctgtgtgacgccaacagcgagaccttcaaagacctggcgcgcaaggccaacatcgccaacgaccacttcatccgcaccaccgaccccgagcaccgcgacgccgtcgagttcttctgggcccgcctgcgcgagagcggctacatatacgagaccaagcacgagggctggtactgcgtgagcgacgagaccttctacccggagactatggtcgagaagcgcatggattctatgacgggcaagaacttcatggcctcgatcgagaccggcaatgctgtcgaatggactgaagagaaaaactaccatttcaaattgacggcgttccgcgacagactcctccgattttataaagagaaccccgagtgggtggtgcctagcacgcgtttcaacgaggtcatcgaatgggtaacaaatcacctcgaagacctttctatatcgcggcccatcacacgtctcgattggggcatcccggtacccgaagatcccagccagacgatatatgtctggctagacgcgctggtaaattacctaacgaccacgggctatcccgtctggccgccaaattccgagaaactgagtgcctggccggcagatgtgcatgtagtagggaaagacattgtgcgattccactgcatatactggcctgcattcctcatggccatcgacctccctctaccaaagcaagtcctaagccacggccactggctcatgggcgagcggaaaatgtcaaagtctatcgggaatgtcgtgaaccccttcttcgcgcttgatcgctggggcgtggacacgatgcggtacttcctcatctacagcggtcacgtctcaggtgattctgattataataaccagttcattgttgagagatacgaaaagggcctgcggaatggccttggtaatctactcaatcgcgtgacgaggccgaaacattggagtgtgagacgagctgtagagaaaatggtgctacgtaaagacgaggagttcccgtcttttattgatgagcagaggcttgtgttggaaacggtggtcgacaaagcagatcagcagatgaaggctttgaatcctagctacgcacttcagcggattatggatgttgtcatgcagacaaacaaattcttctcagaggccgagccatgggccaagagcaaaaaaggggacgtggaaacggtggaccagactatcttctttaccgcggagtctctacgcattgttgggattctgttacagccttttatgcctgagaaatctgctgaacttcttgatcggctgggtgttagtcccgagaggagatcgatgcaagatgccgtcttgttcaaggatagcacttatggcacgccgctgactgagcttgggcagggggcttcgactagcattttcccgccgatgccggttgtggattga

SEQ ID NO: 4885 - protein, 586 aa, Muscodor strobelii
  misc_feature: SGI Peptide ID NO. 561333
  misc_feature (58)..(426): Pfam Id: PF09334 Pfam Desc: tRNA synthetases class I (M)
  misc_feature (348)..(392): Pfam Id: PF00133 Pfam Desc: tRNA synthetases class I (I, L, M and V)
  misc_feature (12)..(584): NCBI GI: 154320610 Blast Desc: BC1G_01777 [Botryotinia fuckeliana B05.10] gi|150853466|gb|EDN28658.1| BC1G_01777 [Botryotinia fuckeliana B05.10]
  misc_feature (27)..(584): NCBI GI: 156040341 Blast Desc: SS1G_12187 [Sclerotinia sclerotiorum 1980] gi|154696243|gb|EDN95981.1| SS1G_12187 [Sclerotinia sclerotiorum 1980]
  misc_feature (1)..(586): NCBI GI: 85101208 Blast Desc: NCU03759 [Neurospora crassa OR74A] gi|30580531|sp|Q9C2H9.1|SYMM_NEUCR RecName: Full= methionyl-tRNA synthetase, mitochondrial; AltName: Full=Methionine--tRNA ligase;
  misc_feature (17)..(582): NCBI GI: 226282228 Blast Desc: methionyl-tRNA synthetase [Paracoccidioides brasiliensis Pb01]
  misc_feature (17)..(582): NCBI GI: 261204906 Blast Desc: methionyl-tRNA synthetase [Ajellomyces dermatitidis SLH14081] gi|239592249|gb|EEQ74830.1| methionyl-tRNA synthetase [Ajellomyces dermatitidis SLH14081] gi|239611595|gb|EEQ88582.1|
  misc_feature (27)..(586): NCBI GI: 261354829 Blast Desc: methionyl-tRNA synthetase [Verticillium albo-atrum VaMs.102]
  misc_feature (30)..(582): NCBI GI: 238843667 Blast Desc: methionine-tRNA synthetase [Microsporum canis CBS 113480]
  misc_feature (17)..(582): NCBI GI: 240107148 Blast Desc: methionyl-tRNA synthetase, [Coccidioides posadasii C735 delta SOWgp]
  misc_feature (1)..(582): NCBI GI: 171692863 Blast Desc: protein product [Podospora anserina] gi|170946380|emb|CAP73181.1| protein product [Podospora anserina]
  misc_feature (45)..(582): NCBI GI: 226292612 Blast Desc: methionyl-tRNA synthetase [Paracoccidioides brasiliensis Pb18]
  misc_feature (25)..(586): SWISSPROT Homolog: EC 6.1.1.10 Methionine--tRNA ligase
  misc_feature: Useful for introducing or modulating the production of volatile compounds
MESFLRASGRRLLRSRVSRVATAPVGRNGWVCQSCRWRQAGRMRFSSSVVAQDKEKPYYVTTPIFYVNASPHVGHLYSMVIADVLKRWEALKGRTAYLATGTDEHGMKVQQAARLQDMPAKALCDANSETFKDLARKANIANDHFIRTTDPEHRDAVEFFWARLRESGYIYETKHEGWYCVSDETFYPETMVEKRMDSMTGKNFMASIETGNAVEWTEEKNYHFKLTAFRDRLLRFYKENPEWVVPSTRFNEVIEWVTNHLEDLSISRPITRLDWGIPVPEDPSQTIYVWLDALVNYLTTTGYPVWPPNSEKLSAWPADVHVVGKDIVRFHCIYWPAFLMAIDLPLPKQVLSHGHWLMGERKMSKSIGNVVNPFFALDRWGVDTMRYFLIYSGHVSGDSDYNNQFIVERYEKGLRNGLGNLLNRVTRPKHWSVRRAVEKMVLRKDEEFPSFIDEQRLVLETVVDKADQQMKALNPSYALQRIMDVVMQTNKFFSEAEPWAKSKKGDVETVDQTIFFTAESLRIVGILLQPFMPEKSAELLDRLGVSPERRSMQDAVLFKDSTYGTPLTELGQGASTSIFPPMPVVD

SEQ ID NO: 4886 - DNA, 2142 bp, Muscodor strobelii
  misc_feature: SGI EST ID NO. CUFF.12361.0
  misc_feature: Variant of the nucleotide sequence at SEQ ID NO 4884
gtctttgttgtctacggcttgattgggtctgtatccaatggaataattgttcgaggaatatgggctgtttggagtcgcgccaagcaaatcggaccctagtagcttgagagctcgcaccagcttcatagtcgaatcgaaggtgcacgcgcagctcgatgccaaccctcgaccaattcgggccctagattcggcaaaatggagagctttttgagggcttccggtaggcggctcttgcgcagccgagtttcacgggtcgctacggcgccagtgggccgcaatggctgggtctgccagtcttgtagatggcgtcaggccggccgaatgcgcttcagctccagcgtcgtcgcgcaggacaaggagaagccgtattatgtcacaacgccaatcttctacgtcaatgcttcaccccatgtcggccatctctacagcatggtcattgccgacgtcctcaagcgatgggaggccctcaagggccgaacagcctacctggccacgggcaccgacgagcacggcatgaaggtccagcaggccgccagactgcaagacatgcctgccaaggccctgtgtgacgccaacagcgagaccttcaaagacctggcgcgcaaggccaacatcgccaacgaccacttcatccgcaccaccgaccccgagcaccgcgacgccgtcgagttcttctgggcccgcctgcgcgagagcggctacatatacgagaccaagcacgagggctggtactgcgtgagcgacgagaccttctacccggagactatggtcgagaagcgcatggattctatgacgggcaagaacttcatggcctcgatcgagaccggcaatgctgtcgaatggactgaagagaaaaactaccatttcaaattgacggcgttccgcgacagactcctccgattttataaagagaaccccgagtgggtggtgcctagcacgcgtttcaacgaggtcatcgaatgggtaacaaatcacctcgaagacctttctatatcgcggcccatcacacgtctcgattggggcatcccggtacccgaagatcccagccagacgatatatgtctggctagacgcgctggtaaattacctaacgaccacgggctatcccgtctggccgccaaattccgagaaactgagtgcctggccggcagatgtgcatgtagtagggaaagacattgtgcgattccactgcatatactggcctgcattcctcatggccatcgacctccctctaccaaagcaagtcctaagccacggccactggctcatgggcgagcggaaaatgtcaaagtctatcgggaatgtcgtgaaccccttcttcgcgcttgatcgctggggcgtggacacgatgcggtacttcctcatctacagcggtcacgtctcaggtgattctgattataataaccagttcattgttgagagatacgaaaagggcctgcggaatggccttggtaatctactcaatcgcgtgacgaggccgaaacattggagtgtgagacgagctgtagagaaaatggtgctacgtaaagacgaggagttcccgtcttttattgatgagcagaggcttgtgttggaaacggtggtcgacaaagcagatcagcagatgaaggctttgaatcctagctacgcacttcagcggattatggatgttgtcatgcagacaaacaaattcttctcagaggccgagccatgggccaagagcaaaaaaggggacgtggaaacggtggaccagactatcttctttaccgcggagtctctacgcattgttgggattctgttacagccttttatgcctgagaaatctgctgaacttcttgatcggctgggtgttagtcccgagaggagatcgatgcaagatgccgtcttgttcaaggatagcacttatggcacgccgctgactgagcttgggcagggggcttcgactagcattttcccgccgatgccggttgtggattgatttattgctgcctcgggatgggaaaatgcgaattgtataggggtgggagggagtagtgtgtaattacgcttagcggatttgggttgtaatgccagtgtagaataaggtatttgtagatctgtactatacatcacaacttgtactctcatgcacatctggatatattgtattgaaaattactgcccg

SEQ ID NO: 4887 - DNA, 3036 bp, Muscodor strobelii
  misc_feature: SGI cDNA ID NO. 561334
  misc_feature: Reduced expression when VOC is produced
  misc_feature: Encodes the peptide sequence at SEQ ID NO 4888
atgccgcgcactacccgtcggtccgccagcgctgccaaggccatcgcagccgcagaggctcagactgagcgagaggccattcagcagcagctggaacagaatatcgatgacgatgatgtgctgactgttgtcgttaagcgcggccgtgggcgaccttctaagtccaacgtcacagcagcctctcccacaggcccctccgagtcggcatcctcagcacctactcccattacaatcacgtcagatggcgagtattcaactcctgcaactagcaatgcggttacaccggctccatcgaccaaatctacgtctgaacctaaacaagccgctcagcgacctcgacgtcgtcgtctagttgttgaacttccacctctccctcctgacgatgagctttccggcagtggtttgaaacccaaaccgcaagccaaacctacggctggtcgctcaacgagacagcgcctctccgtcccctcttatgtagaggattcggacgaggatgacgagcttctcgaccctggtcagtctcgcagcattgcattggcgcgccgcctccaacaggaagaagacagcaaagtctacgacgctgatcagtcgactgctgatcttgagctagcgcttcgccttcaagacgaagaatacgagtctcccgctcctacgattagtgatcaagatggacccagctctggaatggctcgtaacaaacgcaagctcgggctgccttctaaagcaaagccatccgctggcagtaagaagaaggctgtgttcgtagtggatgacagcgaagatgtagaggataccgatgatgatcttccacttcgccaccgcaagaaacagaagatctccaacaaacaaggcgaaaaagcagctaaaccttcagcttccgcgactcataaaaccaaggacgtaatcgatgattctgaggcggaggagagcgacttcagcctctcatcagttactgacggttgggaggcttccagtgcatctgataccgaggacgatctgaccaatagtaacccgaacagttacaaccctatgaatcgcattgggaaccgattccccaggaccacggaggagcgccagaatcgccggcaagcaaaggatagagctgacttgatcaagcatcatccgcaactgcttactatgtgggacgacctagagaagatgccggtcttgaccgcggtggaagccaagcagcccaccaatatcacattggagctcaagccgttccagcttgaaggccttcattggatgacacagatggagaagacgaaatggaaaggtggtcttctgggcgatgagatgggcctcggaaagacgatccaagccgtctcgctcatcatgtccgactatccagtgaaaacacctacgttagttcttcttccacccgtcgcactgggtcaatggcaggacgagattgcttcgtacacaaacaatcagctgaagaccattgttttccacggtaccaacagcaaagccaagaagctatcactcaaagaactcaagaaacttgacgtgatcatcatgtcctacaacagcctcgaggccatgtatcgcagacaagagaagggaaccaagaggaaggatgtgctgtgcaaagagcgcagtctcattcaccaaatcaagtttcatcgtgtgattcttgacgaggctcattgtatcaagacgcggtctaccatgactgcgagagcctgctttgctctgcaatcagagtatcgctggtgcttgtcaggcactcccctacagaatcgcattggagagttgttctctcttgtccggtttctgaatatccaacctttcgcctcttatgcgtgcaagagatgcccttgtattttcctagaatggggcaatgctgttgcggatggtcggtgcaatcactgccctcactcatcgccttctcacgtatcacttttcaaccaagagcttctgaatccaattcagaaatatggcaacgcaggcccgggcaaggatgcctttaggaaactccgtcttttgactgaccgcatcatgctgcgccgactgaagaagaaccacaccaatgccatggagttgcccgtcaaggagatattgattgaccgccaattttttggtgaagaggaaaacgatcttgccagcagcattatgactagcacagagcgcaagttcaatacctacgtagcgcagggtgttgtcctcaacaactatgcaaacatctttggactgattatgcagatgcgtcaggttgctgatcatccagatctcatactgaagaagtcaagtgaaggcggacagaacgtgatggtgtgttgcatctgcgacgaacctgccgaggaagcgattcagtccaaatgcaaacacgagttctgccgcgaatgtgtccgaagctacctagcgtctcaggacgagggcggtgctgactgccctcgctgccatattccgctgtcaattgatcttgaacagccgagtatagagcaagacgagatgatggtcaagaagtcatccatcatcaaccgcatcaagatggagaactggacatcctctacaaagatcgagctgcttgttcaccaactgcacagactccggtcggacaaggcatcccacaagtcgatcatcttctcccagtttaccacgatgctccagctaatcgagtggcggctccgacgcgctggcatcactaccgtgatgcttgacggtagtatgacaccagcacaacgccaagcatccatcaaagctttcatggagaataccgaagtggaatgtttcctagtctcattgaaggcaggaggtgttgccttgaacctgacggaggcttcccacgttttcatcgtcgatccgtggtggaacccagccgctgagtggcagtcggcggatcgctgccatcgcatcgggcagactcgaccgtgcaccatcacacgactttgcatcgaggactctgtggagagcagaatggtccttctacaagagaagaaaacgaacatgatcaattctacaatcaactcagacgatgccgcaatggaggcactcacattggaggatctgtccttcctcttccgagggacctag

SEQ ID NO: 4888 - protein, 1011 aa, Muscodor strobelii
  misc_feature: SGI Peptide ID NO. 561334
  misc_feature (760)..(801): Pfam Id: PF00097 Pfam Desc: Zinc finger, C3HC4 type (RING finger)
  misc_feature (876)..(954): Pfam Id: PF00271 Pfam Desc: Helicase conserved C-terminal domain
  misc_feature (408)..(746): Pfam Id: PF00176 Pfam Desc: SNF2 family N-terminal domain
  misc_feature (312)..(1011): NCBI GI: 256731542 Blast Desc: NECHADRAFT_123411 [Nectria haematococca mpVI 77-13-4]
  misc_feature (324)..(1011): NCBI GI: 46123053 Blast Desc: FG05904.1 [Gibberella zeae PH-1] gi|116090833|gb|ABJ55998.1| RING-11 protein [Gibberella zeae]
  misc_feature (358)..(1010): NCBI GI: 85102654 Blast Desc: DNA repair protein RAD16 [Neurospora crassa OR74A] gi|16944468|emb|CAC18166.2| nucleotide exsicion repair protein RAD16 [Neurospora crassa] gi|28922921|gb|EAA32141.1| DNA repair
  misc_feature (39)..(1011): NCBI GI: 171693995 Blast Desc: protein product [Podospora anserina] gi|170946946|emb|CAP73750.1| protein product [Podospora anserina]
  misc_feature (161)..(1010): NCBI GI: 116197985 Blast Desc: CHGG_07148 [Chaetomium globosum CBS 148.51] gi|88178427|gb|EAQ85895.1| CHGG_07148 [Chaetomium globosum CBS 148.51]
  misc_feature (356)..(1010): NCBI GI: 156061829 Blast Desc: SS1G_03060 [Sclerotinia sclerotiorum 1980] gi|154700461|gb|EDO00200.1| SS1G_03060 [Sclerotinia sclerotiorum 1980]
  misc_feature (356)..(1011): NCBI GI: 154311656 Blast Desc: BC1G_06287 [Botryotinia fuckeliana B05.10] gi|150850798|gb|EDN25991.1| BC1G_06287 [Botryotinia fuckeliana B05.10]
  misc_feature (79)..(1010): NCBI GI: 39978259 Blast Desc: MGG_07014 [Magnaporthe grisea 70-15] gi|145013403|gb|EDJ98044.1| MGG_07014 [Magnaporthe grisea 70-15]
  misc_feature (373)..(1011): NCBI GI: 261355496 Blast Desc: DNA repair protein RAD16 [Verticillium albo-atrum VaMs.102]
  misc_feature (337)..(1011): NCBI GI: 242775674 Blast Desc: DNA excision repair protein Rad16, [Talaromyces stipitatus ATCC 10500] gi|218722307|gb|EED21725.1| DNA excision repair protein Rad16, [Talaromyces stipitatus ATCC 10500]
  misc_feature: Useful for introducing or modulating the production of volatile compounds
MPRTTRRSASAAKAIAAAEAQTEREAIQQQLEQNIDDDDVLTVVVKRGRGRPSKSNVTAASPTGPSESASSAPTPITITSDGEYSTPATSNAVTPAPSTKSTSEPKQAAQRPRRRRLVVELPPLPPDDELSGSGLKPKPQAKPTAGRSTRQRLSVPSYVEDSDEDDELLDPGQSRSIALARRLQQEEDSKVYDADQSTADLELALRLQDEEYESPAPTISDQDGPSSGMARNKRKLGLPSKAKPSAGSKKKAVFVVDDSEDVEDTDDDLPLRHRKKQKISNKQGEKAAKPSASATHKTKDVIDDSEAEESDFSLSSVTDGWEASSASDTEDDLTNSNPNSYNPMNRIGNRFPRTTEERQNRRQAKDRADLIKHHPQLLTMWDDLEKMPVLTAVEAKQPTNITLELKPFQLEGLHWMTQMEKTKWKGGLLGDEMGLGKTIQAVSLIMSDYPVKTPTLVLLPPVALGQWQDEIASYTNNQLKTIVFHGTNSKAKKLSLKELKKLDVIIMSYNSLEAMYRRQEKGTKRKDVLCKERSLIHQIKFHRVILDEAHCIKTRSTMTARACFALQSEYRWCLSGTPLQNRIGELFSLVRFLNIQPFASYACKRCPCIFLEWGNAVADGRCNHCPHSSPSHVSLFNQELLNPIQKYGNAGPGKDAFRKLRLLTDRIMLRRLKKNHTNAMELPVKEILIDRQFFGEEENDLASSIMTSTERKFNTYVAQGVVLNNYANIFGLIMQMRQVADHPDLILKKSSEGGQNVMVCCICDEPAEEAIQSKCKHEFCRECVRSYLASQDEGGADCPRCHIPLSIDLEQPSIEQDEMMVKKSSIINRIKMENWTSSTKIELLVHQLHRLRSDKASHKSIIFSQFTTMLQLIEWRLRRAGITTVMLDGSMTPAQRQASIKAFMENTEVECFLVSLKAGGVALNLTEASHVFIVDPWWNPAAEWQSADRCHRIGQTRPCTITRLCIEDSVESRMVLLQEKKTNMINSTINSDDAAMEALTLEDLSFLFRGT

SEQ ID NO: 4889 - DNA, 4078 bp, Muscodor strobelii
  misc_feature: SGI EST ID NO. CUFF.12364.0
  misc_feature: Variant of the nucleotide sequence at SEQ ID NO 4887
cccctctctcccaattaaatccaatgggcctgaatgattccattgaatcacaaaccttgcctaccgagcctgcctttcgtcgcatgtttccagccgaagtgcaggtcgcagctgccctttggtgttggttttcatttggccattgccttgtccagcatctccttgactaccttcctgatcctgaagtcaagcaccttctcttgttctttcacaaccgccattttctctccccccatcatcctctaataatccccacccacctttcaattccatcctttgtttcgcccgttctagcatcagaggcaaagggccgtgtagcccagcatccgttgatacttgcccgatgttgacgctattccttgcgtactttgtcactgtttgaggtttaggaagatctagtgcacttgtccgatttctttcttcagccttgtacactttctcggcacctttcccgtcctacactcgttctactttgccagaccttctgtggcacggccttcggcttcagcactgaggtcctcatttcaaactaggtcaaactatagaccaagccagaagaacgcaacgggaaagttggcagaacttcaccacttcaccatgccgcgcactacccgtcggtccgccagcgctgccaaggccatcgcagccgcagaggctcagactgagcgagaggccattcagcagcagctggaacagaatatcgatgacgatgatgtgctgactgttgtcgttaagcgcggccgtgggcgaccttctaagtccaacgtcacagcagcctctcccacaggcccctccgagtcggcatcctcagcacctactcccattacaatcacgtcagatggcgagtattcaactcctgcaactagcaatgcggttacaccggctccatcgaccaaatctacgtctgaacctaaacaagccgctcagcgacctcgacgtcgtcgtctagttgttgaacttccacctctccctcctgacgatgagctttccggcagtggtttgaaacccaaaccgcaagccaaacctacggctggtcgctcaacgagacagcgcctctccgtcccctcttatgtagaggattcggacgaggatgacgagcttctcgaccctggtcagtctcgcagcattgcattggcgcgccgcctccaacaggaagaagacagcaaagtctacgacgctgatcagtcgactgctgatcttgagctagcgcttcgccttcaagacgaagaatacgagtctcccgctcctacgattagtgatcaagatggacccagctctggaatggctcgtaacaaacgcaagctcgggctgccttctaaagcaaagccatccgctggcagtaagaagaaggctgtgttcgtagtggatgacagcgaagatgtagaggataccgatgatgatcttccacttcgccaccgcaagaaacagaagatctccaacaaacaaggcgaaaaagcagctaaaccttcagcttccgcgactcataaaaccaaggacgtaatcgatgattctgaggcggaggagagcgacttcagcctctcatcagttactgacggttgggaggcttccagtgcatctgataccgaggacgatctgaccaatagtaacccgaacagttacaaccctatgaatcgcattgggaaccgattccccaggaccacggaggagcgccagaatcgccggcaagcaaaggatagagctgacttgatcaagcatcatccgcaactgcttactatgtgggacgacctagagaagatgccggtcttgaccgcggtggaagccaagcagcccaccaatatcacattggagctcaagccgttccagcttgaaggccttcattggatgacacagatggagaagacgaaatggaaaggtggtcttctgggcgatgagatgggcctcggaaagacgatccaagccgtctcgctcatcatgtccgactatccagtgaaaacacctacgttagttcttcttccacccgtcgcactgggtcaatggcaggacgagattgcttcgtacacaaacaatcagctgaagaccattgttttccacggtaccaacagcaaagccaagaagctatcactcaaagaactcaagaaacttgacgtgatcatcatgtcctacaacagcctcgaggccatgtatcgcagacaagagaagggaaccaagaggaaggatgtgctgtgcaaagagcgcagtctcattcaccaaatcaagtttcatcgtgtgattcttgacgaggctcattgtatcaagacgcggtctaccatgactgcgagagcctgctttgctctgcaatcagagtatcgctggtgcttgtcaggcactcccctacagaatcgcattggagagttgttctctcttgtccggtttctgaatatccaacctttcgcctcttatgcgtgcaagagatgcccttgtattttcctagaatggggcaatgctgttgcggatggtcggtgcaatcactgccctcactcatcgccttctcacgtatcacttttcaaccaagagcttctgaatccaattcagaaatatggcaacgcaggcccgggcaaggatgcctttaggaaactccgtcttttgactgaccgcatcatgctgcgccgactgaagaagaaccacaccaatgccatggagttgcccgtcaaggagatattgattgaccgccaattttttggtgaagaggaaaacgatcttgccagcagcattatgactagcacagagcgcaagttcaatacctacgtagcgcagggtgttgtcctcaacaactatgcaaacatctttggactgattatgcagatgcgtcaggttgctgatcatccagatctcatactgaagaagtcaagtgaaggcggacagaacgtgatggtgtgttgcatctgcgacgaacctgccgaggaagcgattcagtccaaatgcaaacacgagttctgccgcgaatgtgtccgaagctacctagcgtctcaggacgagggcggtgctgactgccctcgctgccatattccgctgtcaattgatcttgaacagccgagtatagagcaagacgagatgatggtcaagaagtcatccatcatcaaccgcatcaagatggagaactggacatcctctacaaagatcgagctgcttgttcaccaactgcacagactccggtcggacaaggcatcccacaagtcgatcatcttctcccagtttaccacgatgctccagctaatcgagtggcggctccgacgcgctggcatcactaccgtgatgcttgacggtagtatgacaccagcacaacgccaagcatccatcaaagctttcatggagaataccgaagtggaatgtttcctagtctcattgaaggcaggaggtgttgccttgaacctgacggaggcttcccacgttttcatcgtcgatccgtggtggaacccagccgctgagtggcagtcggcggatcgctgccatcgcatcgggcagactcgaccgtgcaccatcacacgactttgcatcgaggactctgtggagagcagaatggtccttctacaagagaagaaaacgaacatgatcaattctacaatcaactcagacgatgccgcaatggaggcactcacattggaggatctgtccttcctcttccgagggacctagatcgcttatgctggatcggaccaggcagtcgtacgaccgccagaattatccgagattcatttggactgtctgtcaaatgcagaaggcaagatgtgaaggaactcatcatgcttttacttttctggtggcaaatgactgtatcacatctgtacattcatgttcgagtaggcatcgaagacctgcctccgttccattttcggaacgataaaactttgctcagctagacatgggctctctcgggcatgctacacagaaggtggcgaaggtagcagtgtgaaatgaacgtattcatatcatgacgcaggttggaatcactcgggaagaggactgcatcaagtactcttgcgagatgaccacaaggcgcagatagattttgtaatgaggagaaatgactgtaatgagcacgagaagcgagaacagggaaatcaataaaaattgctcaaaa

SEQ ID NO: 4890 - DNA, 1863 bp, Muscodor strobelii
  misc_feature: SGI cDNA ID NO. 561335
  misc_feature: Reduced expression when VOC is produced
  misc_feature: Encodes the peptide sequence at SEQ ID NO 4891
atggtcctttcaaggcaatctaccatttggagcaacaatcagagcaatcgcaaccggcagcaacggccatctattagagggccccggtcagctctcaccgatttcttagcctcgcagaacatctctgccgctcagattcgaactgacgctcagaatcgtattgcccaagcggcagcaaatgcatcctctaatgcccaatctacgtccgccgaccaagatgctgaagaagacagtgaagatcaagttgtggccgcagctgcgcgtcgagctcaaactcagaagcgcaagaggcagcaggctgccatcgacaagatcaaagaatcaaaagctttcaagaaacgcaagtttgccaaaggaaacgatgacgacgatgatgaagatgacgacgacctagcttggcggctgcttgaggagaagtcgacaccacttcccggtcaaatgagcaactgcgatatatgcagtaaacgcttcaccgtaactccgtattctcgcgctggcccgaatggtggtttgttatgcagtccctgcggccggaaacaaacccaggacgaggacgcggccaagaagaagaaacagaaaagaggccctgcgccgaacaagagcgtcaaccgacgcaagcagcagagcaacctcttagatggacagattggggctaaggatttgttgagtctttgcatcgagacgttagccaagaacattgatcgtgcagatgatcttggtggcattcctccccacaccatcgaccgcgtcgcgaggatgctttgcaaacgccgcctggtggacagtcgaacgttacagctgttcctcgacccttactatgataccgtcaaactatatgacgtagcaaaattatcctcagacgacatgttcaagatttttcagaccatgccccaactcaaaaccctcaagctgtgcaacgccattcaattcaaggacaaggtcctgcagtacctcatcaccagaaatctcgagctcgaacatcttcatatcagcggtgctaacctgctgagtgagaaagtctggacggaatacctgactgcaaagggaaagagcctcaagagcttgcaaatatcttacacagataagcatatcggggatgatttcttggcccagctgccgaacctctgtccgtcactcgaatatctcaaaattcgccacaaccagcagatcacagatgttggacttgctcacatcggagagctctcgcagctcaagaatctgaacttagaactgaacaacttgacaaccaccgaggtctacgttgggttaatcgcgaagcttggaaagcaactccgcagcctgtccttaagaagagttaccgacgtcgatgatcggttacttgatgctctccacgaacactgcacaagcctcactaagctgcgtatcacagagagcgagttcatgactgacgccggtttcgcccgattgttcacaggctggggaaataacggactctcaatccttgatttggaaaagtgtcgccatgtggactcatcgaagcctcgtgacaactcacataaggttggcctttgctcggaaggctttgaagctcttatggagcattcgcgtttacacatacgtaacctcaaggtccattcctgccgtcatatctcccgagaggccttcgagcgagccttcgcgacagacaaaatctaccccgaactgagagagcttgaagtcagtttctgtgaagaggtgactgattacattgtcggctgcattttccgcagttgtccgaacttgagggagcttaatgtgttcggttgtatgaaagtgaaagatgtgcgggtgccaaggggcaggatcttagtcggcatccccaacgcactcggcatgattacagaggccgttgacgatgaataa

SEQ ID NO: 4891 - protein, 620 aa, Muscodor strobelii
  misc_feature: SGI Peptide ID NO. 561335
  misc_feature (13)..(616): NCBI GI: 256731140 Blast Desc: NECHADRAFT_85090 [Nectria haematococca mpVI 77-13-4]
  misc_feature (7)..(620): NCBI GI: 85102650 Blast Desc: NCU03649 [Neurospora crassa OR74A] gi|16944469|emb|CAC18167.2| related to nucleotide exsicion repair protein RAD7 [Neurospora crassa] gi|28922920|gb|EAA32140.1|
  misc_feature (25)..(618): NCBI GI: 171693997 Blast Desc: protein product [Podospora anserina] gi|170946947|emb|CAP73751.1| protein product [Podospora anserina]
  misc_feature (35)..(620): NCBI GI: 116197987 Blast Desc: CHGG_07149 [Chaetomium globosum CBS 148.51] gi|88178428|gb|EAQ85896.1| CHGG_07149 [Chaetomium globosum CBS 148.51]
  misc_feature (16)..(616): NCBI GI: 46123055 Blast Desc: FG05905.1 [Gibberella zeae PH-1]
  misc_feature (15)..(619): NCBI GI: 154311654 Blast Desc: BC1G_06286 [Botryotinia fuckeliana B05.10] gi|150850797|gb|EDN25990.1| BC1G_06286 [Botryotinia fuckeliana B05.10]
  misc_feature (22)..(617): NCBI GI: 156061827 Blast Desc: SS1G_03059 [Sclerotinia sclerotiorum 1980] gi|154700460|gb|EDO00199.1| SS1G_03059 [Sclerotinia sclerotiorum 1980]
  misc_feature (24)..(618): NCBI GI: 261355495 Blast Desc: DNA repair protein Rad7 [Verticillium albo-atrum VaMs.102]
  misc_feature (12)..(605): NCBI GI: 212532481 Blast Desc: DNA repair protein Rad7, protein [Penicillium marneffei ATCC 18224] gi|210071761|gb|EEA25850.1| DNA repair protein Rad7, protein [Penicillium marneffei ATCC 18224]
  misc_feature (14)..(605): NCBI GI: 169775529 Blast Desc: [Aspergillus oryzae RIB40] gi|83770095|dbj|BAE60230.1| protein product [Aspergillus oryzae]
  misc_feature: Useful for introducing or modulating the production of volatile compounds
MVLSRQSTIWSNNQSNRNRQQRPSIRGPRSALTDFLASQNISAAQIRTDAQNRIAQAAANASSNAQSTSADQDAEEDSEDQVVAAAARRAQTQKRKRQQAAIDKIKESKAFKKRKFAKGNDDDDDEDDDDLAWRLLEEKSTPLPGQMSNCDICSKRFTVTPYSRAGPNGGLLCSPCGRKQTQDEDAAKKKKQKRGPAPNKSVNRRKQQSNLLDGQIGAKDLLSLCIETLAKNIDRADDLGGIPPHTIDRVARMLCKRRLVDSRTLQLFLDPYYDTVKLYDVAKLSSDDMFKIFQTMPQLKTLKLCNAIQFKDKVLQYLITRNLELEHLHISGANLLSEKVWTEYLTAKGKSLKSLQISYTDKHIGDDFLAQLPNLCPSLEYLKIRHNQQITDVGLAHIGELSQLKNLNLELNNLTTTEVYVGLIAKLGKQLRSLSLRRVTDVDDRLLDALHEHCTSLTKLRITESEFMTDAGFARLFTGWGNNGLSILDLEKCRHVDSSKPRDNSHKVGLCSEGFEALMEHSRLHIRNLKVHSCRHISREAFERAFATDKIYPELRELEVSFCEEVTDYIVGCIFRSCPNLRELNVFGCMKVKDVRVPRGRILVGIPNALGMITEAVDDE

SEQ ID NO: 4892 - DNA, 2833 bp, Muscodor strobelii
  misc_feature: SGI EST ID NO. CUFF.12420.0
  misc_feature: Variant of the nucleotide sequence at SEQ ID NO 4890
cgggtttgtaaggcaactatgcgcatcaattcatgcactactggcaggtccgacacgctacacgcttaggagttgccttccaagtcaattttattgaatttgccacaacaacacaacttggcagcttcgccattgtatctacttggtcaatgcagatactctgccctgtggtcgctggacttacctgcagttgccgtcatttgtgacctgcagcaaccactggtacctctttcttaagcccagcgaatcttcgctcacaaaggccaaggaagctttctgcatcctcctctccttcaccatcggcgcacagtctactactatctcacaaagaacacaacacaacacactcctctctccgtcatggtcctttcaaggcaatctaccatttggtccatttctacatcttgaggtacacgcaaagaatcatcctgcgaacacgccttgccaagggattgcttcgcaggatttaattatttgttgacatactaccgcaagtgttcgcagccttcggaacgatttcgtgtagagacttttctctacacgactactagtcatcatgagcaacaatcagagcaatcgcaaccggcagcaacggccatctattagagggccccggtcagctctcaccgatttcttagcctcgcagaacatctctgccgctcagattcgaactgacgctcagaatcgtattgcccaagcggcagcaaatgcatcctctaatgcccaatctacgtccgccgaccaagatgctgaagaagacagtgaagatcaagttgtggccgcagctgcgcgtcgagctcaaactcagaagcgcaagaggcagcaggctgccatcgacaagatcaaagaatcaaaagctttcaagaaacgcaagtttgccaaaggaaacgatgacgacgatgatgaagatgacgacgacctagcttggcggctgcttgaggagaagtcgacaccacttcccggtcaaatgagcaactgcgatatatgcagtaaacgcttcaccgtaactccgtattctcgcgctggcccgaatggtggtttgttatgcagtccctgcggccggaaacaaacccaggacgaggacgcggccaagaagaagaaacagaaaagaggccctgcgccgaacaagagcgtcaaccgacgcaagcagcagagcaacctcttagatggacagattggggctaaggatttgttgagtctttgcatcgagacgttagccaagaacattgatcgtgcagatgatcttggtggcattcctccccacaccatcgaccgcgtcgcgaggatgctttgcaaacgccgcctggtggacagtcgaacgttacagctgttcctcgacccttactatgataccgtcaaactatatgacgtagcaaaattatcctcagacgacatgttcaagatttttcagaccatgccccaactcaaaaccctcaagctgtgcaacgccattcaattcaaggacaaggtcctgcagtacctcatcaccagaaatctcgagctcgaacatcttcatatcagcggtgctaacctgctgagtgagaaagtctggacggaatacctgactgcaaagggaaagagcctcaagagcttgcaaatatcttacacagataagcatatcggggatgatttcttggcccagctgccgaacctctgtccgtcactcgaatatctcaaaattcgccacaaccagcagatcacagatgttggacttgctcacatcggagagctctcgcagctcaagaatctgaacttagaactgaacaacttgacaaccaccgaggtctacgttgggttaatcgcgaagcttggaaagcaactccgcagcctgtccttaagaagagttaccgacgtcgatgatcggttacttgatgctctccacgaacactgcacaagcctcactaagctgcgtatcacagagagcgagttcatgactgacgccggtttcgcccgattgttcacaggctggggaaataacggactctcaatccttgatttggaaaagtgtcgccatgtggactcatcgaagcctcgtgacaactcacataaggttggcctttgctcggaaggctttgaagctcttatggagcattcgcgtttacacatacgtaacctcaaggtccattcctgccgtcatatctcccgagaggccttcgagcgagccttcgcgacagacaaaatctaccccgaactgagagagcttgaagtcagtttctgtgaagaggtgactgattacattgtcggctgcattttccgcagttgtccgaacttgagggagcttaatgtgttcggttgtatgaaagtgaaagatgtgcgggtgccaaggggcaggatcttagtcggcatccccaacgcactcggcatgattacagaggccgttgacgatgaataaaaaagcagcagatgtggcgttcgaatctcgcattatcatttggagttcatgactcaacagcaacttgatgacgtctactttattgttttcattgcttccgatgttgcttgctatttcttaagggaaagcgtctgcgtgtacattattgccaaaaaggatgagcaaacgtgaattagtgatgagccatcacaatccttcgtgaagtcgccggctatggacagtgatgaaggagacagaagacccaaaatgaaggcgctatcagactctgcttcgggttgatgtacatagattcataaaagacaagaaataccgactattatgtttctatcacgtgattttcatgattggagaagatgaaggctagatattgatacatatatcgataggttttggacaaaaagacgataccctttgtttaaagatacctatgcaacgcaatgc

SEQ ID NO: 4893 - DNA, 1707 bp, Muscodor strobelii
  misc_feature: SGI cDNA ID NO. 561336
  misc_feature: Encodes the peptide sequence at SEQ ID NO 4894
atgggttctgttggcgtggatgcgaacccgacgggggcactccccgcatttgacataaggcgcatcgcaattatcggagcgggaccgagtggaattgcagccgcgaaacatctactagcagaaggattcaaagcctcgcagatcgacatctttgagcaacgagatgaagtgggaggagtatggaattacaccccattagcgccgatcgggtccttggccgttccgcagactgatgcgttcctgcctccagaccctccggtcttcgagggcgatgatgaggacgacgattatgaatcagatgatggctgtatagattcttgctgtgcccctggctcaggggcttgttcgctgccctcgcttgcgcgagtagagaggcgagccgtgtttcccgggcctatgtatgagagtctgcatacgaatatcccgcacacgcttatgcggtactccgataaggacttcacgtcggggaaggaagagtgtgagatctttcctccgcgacaggttgttatggactacctcaaggaatacgcgcgcgatgttcgacatctcatcagtttcgcgacacaagtcacgagtcttaggctgatcaccgatcaaggtgcttcggcgccaaaggcgcaagtcaaaaaccaatgggaactagtttctctcaatctcctgaacaatgttgaaaagaaacagatatatgatgcagtggtcgttgcatcgggacattatgcaacgccatatatcccttcctttgcagagggaatggctgaattcgcttccaggcaccccagcataatatcgcactgcaagggctttcggtctgccttcgcgtttgcggggaagaaagtcgtagttgttggctctggaccttcgggactcgacattgcatcgcagatccgagatgtatgcatatcgcctctcatcgtgtcagcgcgcagcccggttgcagatgacatgtgtgagcatctgggcgtgggtgataaagtgcgcctcgtcggacaaattacgcgctttctggttgatgaacggggtattgaagttcagactgcccctggttctgcagcagcaagcgagaagagcacagaacggataacagacatcgatgcgattctcttttgcacaggttatctttacacgtacccgttcttcaatgccgaatctctctcctcctctgcgcccccactcatcaccgacggtcgacgtgtgcacgggatagcaagacatttcatctataacacacacccctctctcgtatttcctgctctgcccatcaaagtgatccctttccctctcgccgagggtcaagcagctgtgatggcacggctttggaacaatcgccttccgcttccctcacgtgacgaattggagagatgggagcgagaggatgagcaaggtaaaggatttgagggcgagagagcaggcgaggggaaagcatttcacgtcttcccgaagggcggcgacgcgaaatatatcaatgctttccatgagtgggctgcgaaagcaacggatcgagaagatggcaaaggaaaagaaccgccgttttggggtgctaaagagttgtgggagagaagcgtctatgctcgagctcgcatattgttcgaaaagggaggacgcaaagcaaagactttggaggagctgggattacgttatgatcccaatgcgaagagtacacccagtgcagttaggactgaagatgcaacgctagatatcgcagcttaa

SEQ ID NO: 4894 - protein, 568 aa, Muscodor strobelii
  misc_feature: SGI Peptide ID NO. 561336
  misc_feature (29)..(59): Pfam Id: PF01593 Pfam Desc: Flavin containing amine oxidoreductase
  misc_feature (21)..(59): Pfam Id: PF01266 Pfam Desc: FAD dependent oxidoreductase
  misc_feature (21)..(67): Pfam Id: PF07992 Pfam Desc: Pyridine nucleotide-disulphide oxidoreductase
  misc_feature (17)..(551): NCBI GI: 171694003 Blast Desc: protein product [Podospora anserina] gi|170946950|emb|CAP73754.1| protein product [Podospora anserina]
  misc_feature (17)..(566): NCBI GI: 39946134 Blast Desc: MGG_08187 [Magnaporthe grisea 70-15] gi|145019445|gb|EDK03673.1| MGG_08187 [Magnaporthe grisea 70-15]
  misc_feature (17)..(549): NCBI GI: 116197993 Blast Desc: CHGG_07152 [Chaetomium globosum CBS 148.51] gi|88178431|gb|EAQ85899.1| CHGG_07152 [Chaetomium globosum CBS 148.51]
  misc_feature (17)..(564): NCBI GI: 85101191 Blast Desc: NCU03755 [Neurospora crassa OR74A] gi|12718318|emb|CAC28669.1| related to flavin-containing monooxygenase [Neurospora crassa] gi|28922641|gb|EAA31866.1|
  misc_feature (16)..(547): NCBI GI: 156050481 Blast Desc: SS1G_07828 [Sclerotinia sclerotiorum 1980] gi|154692228|gb|EDN91966.1| SS1G_07828 [Sclerotinia sclerotiorum 1980]
  misc_feature (16)..(548): NCBI GI: 256731345 Blast Desc: NECHADRAFT_63518 [Nectria haematococca mpVI 77-13-4]
  misc_feature (13)..(547): NCBI GI: 239612289 Blast Desc: flavin dependent monooxygenase [Ajellomyces dermatitidis ER-3]
  misc_feature (13)..(547): NCBI GI: 261202506 Blast Desc: flavin dependent monooxygenase [Ajellomyces dermatitidis SLH14081] gi|239590564|gb|EEQ73145.1| flavin dependent monooxygenase [Ajellomyces dermatitidis SLH14081]
  misc_feature (16)..(556): NCBI GI: 46125623 Blast Desc: FG07189.1 [Gibberella zeae PH-1]
  misc_feature (17)..(546): NCBI GI: 261355558 Blast Desc: thiol-specific monooxygenase [Verticillium albo-atrum VaMs.102]
MGSVGVDANPTGALPAFDIRRIAIIGAGPSGIAAAKHLLAEGFKASQIDIFEQRDEVGGVWNYTPLAPIGSLAVPQTDAFLPPDPPVFEGDDEDDDYESDDGCIDSCCAPGSGACSLPSLARVERRAVFPGPMYESLHTNIPHTLMRYSDKDFTSGKEECEIFPPRQVVMDYLKEYARDVRHLISFATQVTSLRLITDQGASAPKAQVKNQWELVSLNLLNNVEKKQIYDAVVVASGHYATPYIPSFAEGMAEFASRHPSIISHCKGFRSAFAFAGKKVVVVGSGPSGLDIASQIRDVCISPLIVSARSPVADDMCEHLGVGDKVRLVGQITRFLVDERGIEVQTAPGSAAASEKSTERITDIDAILFCTGYLYTYPFFNAESLSSSAPPLITDGRRVHGIARHFIYNTHPSLVFPALPIKVIPFPLAEGQAAVMARLWNNRLPLPSRDELERWEREDEQGKGFEGERAGEGKAFHVFPKGGDAKYINAFHEWAAKATDREDGKGKEPPFWGAKELWERSVYARARILFEKGGRKAKTLEELGLRYDPNAKSTPSAVRTEDATLDIAA

SEQ ID NO: 4895 - DNA, 2034 bp, Muscodor strobelii
  misc_feature: SGI EST ID NO. CUFF.12369.0
  misc_feature: Variant of the nucleotide sequence at SEQ ID NO 4893
ctcatacacaaatagcacctggtttcaaagcctgcatccttcccagtcttttgtagaattacagttatgatgagaaataacattgttactttacttgaagtgctttctgaaaccatccgctaattataaagtacttaacttgaagctcatgtacagaaaaaccctcataactacgtgcactgtcaatctataggcatcctattacggccgattctacgacttgattcgcagtttcgatattcgggcaagttgccatcatcaaatgggttctgttggcgtggatgcgaacccgacgggggcactccccgcatttgacataaggcgcatcgcaattatcggagcgggaccgagtggaattgcagccgcgaaacatctactagcagaaggattcaaagcctcgcagatcgacatctttgagcaacgagatgaagtgggaggagtatggaattacaccccattagcgccgatcgggtccttggccgttccgcagactgatgcgttcctgcctccagaccctccggtcttcgagggcgatgatgaggacgacgattatgaatcagatgatggctgtatagattcttgctgtgcccctggctcaggggcttgttcgctgccctcgcttgcgcgagtagagaggcgagccgtgtttcccgggcctatgtatgagagtctgcatacgaatatcccgcacacgcttatgcggtactccgataaggacttcacgtcggggaaggaagagtgtgagatctttcctccgcgacaggttgttatggactacctcaaggaatacgcgcgcgatgttcgacatctcatcagtttcgcgacacaagtcacgagtcttaggctgatcaccgatcaaggtgcttcggcgccaaaggcgcaagtcaaaaaccaatgggaactagtttctctcaatctcctgaacaatgttgaaaagaaacagatatatgatgcagtggtcgttgcatcgggacattatgcaacgccatatatcccttcctttgcagagggaatggctgaattcgcttccaggcaccccagcataatatcgcactgcaagggctttcggtctgccttcgcgtttgcggggaagaaagtcgtagttgttggctctggaccttcgggactcgacattgcatcgcagatccgagatgtatgcatatcgcctctcatcgtgtcagcgcgcagcccggttgcagatgacatgtgtgagcatctgggcgtgggtgataaagtgcgcctcgtcggacaaattacgcgctttctggttgatgaacggggtattgaagttcagactgcccctggttctgcagcagcaagcgagaagagcacagaacggataacagacatcgatgcgattctcttttgcacaggttatctttacacgtacccgttcttcaatgccgaatctctctcctcctctgcgcccccactcatcaccgacggtcgacgtgtgcacgggatagcaagacatttcatctataacacacacccctctctcgtatttcctgctctgcccatcaaagtgatccctttccctctcgccgagggtcaagcagctgtgatggcacggctttggaacaatcgccttccgcttccctcacgtgacgaattggagagatgggagcgagaggatgagcaaggtaaaggatttgagggcgagagagcaggcgaggggaaagcatttcacgtcttcccgaagggcggcgacgcgaaatatatcaatgctttccatgagtgggctgcgaaagcaacggatcgagaagatggcaaaggaaaagaaccgccgttttggggtgctaaagagttgtgggagagaagcgtctatgctcgagctcgcatattgttcgaaaagggaggacgcaaagcaaagactttggaggagctgggattacgttatgatcccaatgcgaagagtacacccagtgcagttaggactgaagatgcaacgctagatatcgcagcttaaaaaactcaaaggtttaaatttcaacattgataggttgccagaaatcgaccagatatcgatgatca

SEQ ID NO: 4896 - DNA, 1287 bp, Muscodor strobelii
  misc_feature: SGI cDNA ID NO. 561337
  misc_feature: Elevated expression when VOC is produced
  misc_feature: Encodes the peptide sequence at SEQ ID NO 4897
atggatcacgaccacagccaacagattgggcaagacgatatcgtcattgcagtcatgggaatgactggctgcgggaaaagcactttcatttctcaattcgtggaccgggatgttcccatcggccacgacctggaagcaatgacgaaaatgacggagctgtacagcttccaacacgaacgttatggaacgattaactttatcgacactcccggatttgacgacacctacctctcagatactgatattttgaaaaacattgctggtttcttgagctcgacttatgcggctggggtccgacttgcggggatcatctatattcatcgtatcactgacaacaaagtttctggatcggctttgaagaatcttgcaatgttcaaagagctatgcggcgaagatgcttgtcagcatatagtcctggctactagcatgtgggaccaagtgaacaccgacaaggctgtgcaaagagaggagcagctgaagagcaccgaccagttctggggtctcttgcatgcgcggggtgctgaggtaatgagatgggacaagggcatcccatctgccacggagatgatcgatcaccttgtgaatcgccgtcgtacgaagggtccggcaacacttcagatccaacgcgagttggtggatgaaaagaagggtctggatcagacttcagctggtcagaaggtgtcccatgatctgtcacagatcatgatgaagtgggatgtggagatcgaagagctgcgcaaaggacaccagatagctttagaggaacaagaccgggccgtatctgagatgtttgcgaaacaactagcagacgttgaagccaagctgcgtaaggctgacgaatcacgagagaaactccaggtcgacatggagcaactacttattgaaacgaagactgcgtatgcagtgaaggagcaggaactgttgcagcagattgcccggggtgaggaaatgttggccaagcaggttgcacaacgcgagagggatgagcgactgcgcgagaagactctccaagaccttaaagaggagatggcacggaaatatagcgacaacggggagaacttcgaaattacatggcaaaagcgagagagacaaatgaaagaggagtgggaaaatgcagctaagcagaaagccgccgaggaaaaacaactcgaggaggagatcaaacacagacaacgatggagacgtcgccttctgagggtcctcggcataattccgacattgctaggtatcgggataggtatcgcgggaggtgacccagctgttgctgacggactgtttggtgtatag

SEQ ID NO: 4897 - protein, 428 aa, Muscodor strobelii
  misc_feature: SGI Peptide ID NO. 561337
  misc_feature (8)..(421): NCBI GI: 256728210 Blast Desc: NECHADRAFT_54135 [Nectria haematococca mpVI 77-13-4]
  misc_feature (8)..(416): NCBI GI: 46127679 Blast Desc: FG08217.1 [Gibberella zeae PH-1]
  misc_feature (12)..(309): NCBI GI: 189196544 Blast Desc: conserved [Pyrenophora tritici-repentis Pt-1C-BFP] gi|187980489|gb|EDU47115.1| conserved [Pyrenophora tritici-repentis Pt-1C-BFP]
  misc_feature (9)..(394): NCBI GI: 116206562 Blast Desc: CHGG_02574 [Chaetomium globosum CBS 148.51] gi|88183171|gb|EAQ90639.1| CHGG_02574 [Chaetomium globosum CBS 148.51]
  misc_feature (12)..(350): NCBI GI: 116206564 Blast Desc: CHGG_02575 [Chaetomium globosum CBS 148.51] gi|88183172|gb|EAQ90640.1| CHGG_02575 [Chaetomium globosum CBS 148.51]
  misc_feature (12)..(295): NCBI GI: 46115214 Blast Desc: FG03449.1 [Gibberella zeae PH-1]
  misc_feature (2)..(346): NCBI GI: 169769098 Blast Desc: [Aspergillus oryzae RIB40] gi|238501532|ref|XP_002382000.1| conserved [Aspergillus flavus NRRL3357] gi|83766877|dbj|BAE57017.1| protein product oryzae]
  misc_feature (9)..(349): NCBI GI: 242782693 Blast Desc: conserved [Talaromyces stipitatus ATCC 10500] gi|218720198|gb|EED19617.1| conserved [Talaromyces stipitatus ATCC 10500]
  misc_feature (13)..(310): NCBI GI: 256735682 Blast Desc: NECHADRAFT_75781 [Nectria haematococca mpVI 77-13-4]
  misc_feature (6)..(312): NCBI GI: 169769100 Blast Desc: [Aspergillus oryzae RIB40] gi|238501534|ref|XP_002382001.1| conserved [Aspergillus flavus NRRL3357] gi|83766878|dbj|BAE57018.1| protein product oryzae]
  misc_feature: Useful for introducing or modulating the production of volatile compounds
MDHDHSQQIGQDDIVIAVMGMTGCGKSTFISQFVDRDVPIGHDLEAMTKMTELYSFQHERYGTINFIDTPGFDDTYLSDTDILKNIAGFLSSTYAAGVRLAGIIYIHRITDNKVSGSALKNLAMFKELCGEDACQHIVLATSMWDQVNTDKAVQREEQLKSTDQFWGLLHARGAEVMRWDKGIPSATEMIDHLVNRRRTKGPATLQIQRELVDEKKGLDQTSAGQKVSHDLSQIMMKWDVEIEELRKGHQIALEEQDRAVSEMFAKQLADVEAKLRKADESREKLQVDMEQLLIETKTAYAVKEQELLQQIARGEEMLAKQVAQRERDERLREKTLQDLKEEMARKYSDNGENFEITWQKRERQMKEEWENAAKQKAAEEKQLEEEIKHRQRWRRRLLRVLGIIPTLLGIGIGIAGGDPAVADGLFGV

SEQ ID NO: 4898 - DNA, 1966 bp, Muscodor strobelii
  misc_feature: SGI EST ID NO. CUFF.12379.0
  misc_feature: Variant of the nucleotide sequence at SEQ ID NO 4896
gccattggagctattggaggctgagtgcaggagtcgcagcaagcgattgcatatacattcatatcagctctgaaactgacgaacgatgcagacacggcgccaaatttcctcctattatagttcatcactgtccctgctacaagtatttgccctcatacggccgtccctgaaaatacgcagcctcaacaaggcatacattgccctcgcactggcttaaacttctgctgttcttacctaatcatcgtcccgtatcttcactcatccagcatctcgcaggctcccagacaattgggtttgcaggaccgccgtacctctgatacgattcattaccccgtctaagttccgcttctagctaggcttcaatcttgttcgatcacaatggatcacgaccacagccaacagattgggcaagacgatatcgtcattgcagtcatgggaatgactggctgcgggaaaagcactttcatttctcaattcgtggaccgggatgttcccatcggccacgacctggaagcaatgacgaaaatgacggagctgtacagcttccaacacgaacgttatggaacgattaactttatcgacactcccggatttgacgacacctacctctcagatactgatattttgaaaaacattgctggtttcttgagctcgacttatgcggctggggtccgacttgcggggatcatctatattcatcgtatcactgacaacaaagtttctggatcggctttgaagaatcttgcaatgttcaaagagctatgcggcgaagatgcttgtcagcatatagtcctggctactagcatgtgggaccaagtgaacaccgacaaggctgtgcaaagagaggagcagctgaagagcaccgaccagttctggggtctcttgcatgcgcggggtgctgaggtaatgagatgggacaagggcatcccatctgccacggagatgatcgatcaccttgtgaatcgccgtcgtacgaagggtccggcaacacttcagatccaacgcgagttggtggatgaaaagaagggtctggatcagacttcagctggtcagaaggtgtcccatgatctgtcacagatcatgatgaagtgggatgtggagatcgaagagctgcgcaaaggacaccagatagctttagaggaacaagaccgggccgtatctgagatgtttgcgaaacaactagcagacgttgaagccaagctgcgtaaggctgacgaatcacgagagaaactccaggtcgacatggagcaactacttattgaaacgaagactgcgtatgcagtgaaggagcaggaactgttgcagcagattgcccggggtgaggaaatgttggccaagcaggttgcacaacgcgagagggatgagcgactgcgcgagaagactctccaagaccttaaagaggagatggcacggaaatatagcgacaacggggagaacttcgaaattacatggcaaaagcgagagagacaaatgaaagaggagtgggaaaatgcagctaagcagaaagccgccgaggaaaaacaactcgaggaggagatcaaacacagacaacgatggagacgtcgccttctgagggtcctcggcataattccgacattgctaggtatcgggataggtatcgcgggaggtgacccagctgttgctgacggactgtttggtgtatagcttgccagcgacttgcgctggagagtgcgtctctcgaagagattctcttaatacattgctatcaaagccgctctcgcattggcagagggtagccaccgaatttttcaaacaattgagcacaattgcccatcaactcaacaatatcattatctgaccattgtggcgcgacagcagccctgctatactcaagctctcttacaatggtctaacacacctgtttgaacaaggtctatagtaagcaattaaactgtcaaacagcagcaattggagatagtagaagagatatcaagtaacttgttcc

SEQ ID NO: 4899 - DNA, 1749 bp, Muscodor strobelii
  misc_feature: SGI cDNA ID NO. 561338
  misc_feature: Elevated expression when VOC is produced
  misc_feature: Encodes the peptide sequence at SEQ ID NO 4900
atgaatcccgacattgagcacccagagcatgttcgcggcaaagcttccatctttcgtaatggcagagagcgtcgcgaaacagatatttttgttgcgcttatgggattgacaggctctgggaagagcacgttcatctcgcatcttactgaacatcatgtccccatcggagatgatctatattcatgtacacatgagtgcaaagtttatgattatgacatcgacgactcaacaactgtatacttcgtggatacacctgggtttaacgacaccctcctttccgacgtggaagtcttgaaggaaatcgcgacttggctcaccgactcttatggtcgcgatattaccttgacaggcatcatttaccttcatcggatcacagacaataagatgggtggttcaggactgaagaacctatcaatgctcaagaagctttgtggagatgatgcgctgaaacgcgtgatacttaccaccacgcattgggaaaaggtcgaacttgaaactggtgaaagaagggaaaatcagctgcgggaggacttttgggactttctcgtggggaaaggatcgcgagttgaacggcactggaacacgaaagagtccgctgaccgtatcgtcgctcacctcctgccccaaactcaaacccaacctcaattggcaccaccgtcgcctcttcgtcttgcaattcaagtcgagatggtggacgaagaaaagcctcttcacgagactgaggcaggaatggacctcgaacagattctcgccgaagaaaggcgaaagtacgaggagaagttggcggaaattcgtaaagagatggagcaggctttgctacagcgggatcaagattcgaaagaactgctcgagtccgaacggtcgaagacagaagcgcagattgaagccctcatgagtcagcagaacgagatccgggtcaacatggacaagctccatacagagaaactcacagcgatggaagcaaaattgcgcgagcacgcggaaaagaccgagatgaaaaaactcaccaagatgcactctcagcatgaaccggcctggggcagaactatcagcctctgcctcaatggcgaaaggacttgggcgttcgtctgcgcaaatggcatgaaatggagaaaggactcggatgtcagtaatagttcgacaaatttcataagggtggatgagaagtctggggaaaccgccaggtataaacggctggtctatggcgatggcaaggactcgtcctactcgcattaccacacgggtctcttcataacgaggtgccactgccaacataaggtgcagggaacctatcctgagttgcacgacttcctgaaaacgaagaacggaactcgctgtccgaagtcgatttccttgggacccgatggatgttatttcatttccaccgacaagggctcatcaatgaagtgtcacccgaacgccaatattcaatacgaaaaggcagagatacagcgcttgtggtggggattccagggcagctttgtcatcgtggtgggaaagaagaagaccaccaaactcgaaatggatctcaaggggcattacgggtccctgagtagcgttctggagaaggaggatcccgccaacatctacgaactcgctcttgatatcaaagggggaaatgacttcatccttctacttcgtaacagaaaagtggtggtctccgctcatcgtcgtgaaccagtgtggtacttggacttcaaggacttctacttattgaattttggccaggagttaagcacaccgttttag

SEQ ID NO: 4900 - protein, 582 aa, Muscodor strobelii
  misc_feature: SGI Peptide ID NO. 561338
  misc_feature (18)..(554): NCBI GI: 256735682 Blast Desc: NECHADRAFT_75781 [Nectria haematococca mpVI 77-13-4]
  misc_feature (28)..(331): NCBI GI: 256728380 Blast Desc: NECHADRAFT_54176 [Nectria haematococca mpVI 77-13-4]
  misc_feature (18)..(332): NCBI GI: 46115214 Blast Desc: FG03449.1 [Gibberella zeae PH-1]
  misc_feature (28)..(315): NCBI GI: 116206562 Blast Desc: CHGG_02574 [Chaetomium globosum CBS 148.51] gi|88183171|gb|EAQ90639.1| CHGG_02574 [Chaetomium globosum CBS 148.51]
  misc_feature (28)..(331): NCBI GI: 169769098 Blast Desc: [Aspergillus oryzae RIB40] gi|238501532|ref|XP_002382000.1| conserved [Aspergillus flavus NRRL3357] gi|83766877|dbj|BAE57017.1| protein product oryzae]
  misc_feature (28)..(342): NCBI GI: 189196544 Blast Desc: conserved [Pyrenophora tritici-repentis Pt-1C-BFP] gi|187980489|gb|EDU47115.1| conserved [Pyrenophora tritici-repentis Pt-1C-BFP]
  misc_feature (28)..(339): NCBI GI: 116206564 Blast Desc: CHGG_02575 [Chaetomium globosum CBS 148.51] gi|88183172|gb|EAQ90640.1| CHGG_02575 [Chaetomium globosum CBS 148.51]
  misc_feature (26)..(325): NCBI GI: 169864282 Blast Desc: CC1G_12375 [Coprinopsis cinerea okayama7#130] gi|116500172|gb|EAU83067.1| CC1G_12375 [Coprinopsis cinerea okayama7#130]
  misc_feature (28)..(343): NCBI GI: 189198139 Blast Desc: conserved [Pyrenophora tritici-repentis Pt-1C-BFP] gi|187981355|gb|EDU47981.1| conserved [Pyrenophora tritici-repentis Pt-1C-BFP]
  misc_feature (28)..(324): NCBI GI: 256728210 Blast Desc: NECHADRAFT_54135 [Nectria haematococca mpVI 77-13-4]
  misc_feature: Useful for introducing or modulating the production of volatile compounds
MNPDIEHPEHVRGKASIFRNGRERRETDIFVALMGLTGSGKSTFISHLTEHHVPIGDDLYSCTHECKVYDYDIDDSTTVYFVDTPGFNDTLLSDVEVLKEIATWLTDSYGRDITLTGIIYLHRITDNKMGGSGLKNLSMLKKLCGDDALKRVILTTTHWEKVELETGERRENQLREDFWDFLVGKGSRVERHWNTKESADRIVAHLLPQTQTQPQLAPPSPLRLAIQVEMVDEEKPLHETEAGMDLEQILAEERRKYEEKLAEIRKEMEQALLQRDQDSKELLESERSKTEAQIEALMSQQNEIRVNMDKLHTEKLTAMEAKLREHAEKTEMKKLTKMHSQHEPAWGRTISLCLNGERTWAFVCANGMKWRKDSDVSNSSTNFIRVDEKSGETARYKRLVYGDGKDSSYSHYHTGLFITRCHCQHKVQGTYPELHDFLKTKNGTRCPKSISLGPDGCYFISTDKGSSMKCHPNANIQYEKAEIQRLWWGFQGSFVIVVGKKKTTKLEMDLKGHYGSLSSVLEKEDPANIYELALDIKGGNDFILLLRNRKVVVSAHRREPVWYLDFKDFYLLNFGQELSTPF

SEQ ID NO: 4901 - DNA, 2286 bp, Muscodor strobelii
  misc_feature: SGI EST ID NO. CUFF.12381.0
  misc_feature: Variant of the nucleotide sequence at SEQ ID NO 4899
gccgcattggaagatcacttggacgcctttgtaatttctcactcccaagcaccagccttagtattcttcttctacatactgctcgtcctaggatacatatttctccattgcaagcggggcgcggccaccatgaatcccgacattgagcacccagagcatgttcgcggcaaagcttccatctttcgtaatggcagagagcgtcgcgaaacagatatttttgttgcgcttatgggattgacaggctctgggaagagcacgttcatctcgcatcttactgaacatcatgtccccatcggagatgatctatattcatgtacacatgagtgcaaagtttatgattatgacatcgacgactcaacaactgtatacttcgtggatacacctgggtttaacgacaccctcctttccgacgtggaagtcttgaaggaaatcgcgacttggctcaccgactcttatggtcgcgatattaccttgacaggcatcatttaccttcatcggatcacagacaataagatgggtggttcaggactgaagaacctatcaatgctcaagaagctttgtggagatgatgcgctgaaacgcgtgatacttaccaccacgcattgggaaaaggtcgaacttgaaactggtgaaagaagggaaaatcagctgcgggaggacttttgggactttctcgtggggaaaggatcgcgagttgaacggcactggaacacgaaagagtccgctgaccgtatcgtcgctcacctcctgccccaaactcaaacccaacctcaattggcaccaccgtcgcctcttcgtcttgcaattcaagtcgagatggtggacgaagaaaagcctcttcacgagactgaggcaggaatggacctcgaacagattctcgccgaagaaaggcgaaagtacgaggagaagttggcggaaattcgtaaagagatggagcaggctttgctacagcgggatcaagattcgaaagaactgctcgagtccgaacggtcgaagacagaagcgcagattgaagccctcatgagtcagcagaacgagatccgggtcaacatggacaagctccatacagagaaactcacagcgatggaagcaaaattgcgcgagcacgcggaaaagaccgagatgaaaaaactcaccaagatgcactctcagcatgaaccggcctggggcagaactatcagcctctgcctcaatggcgaaaggacttgggcgttcgtctgcgcaaatggcatgaaatggagaaaggactcggatgtcagtaatagttcgacaaatttcataagggtggatgagaagtctggggaaaccgccaggtataaacggctggtctatggcgatggcaaggactcgtcctactcgcattaccacacgggtctcttcataacgaggtgccactgccaacataaggtgcagggaacctatcctgagttgcacgacttcctgaaaacgaagaacggaactcgctgtccgaagtcgatttccttgggacccgatggatgttatttcatttccaccgacaagggctcatcaatgaagtgtcacccgaacgccaatattcaatacgaaaaggcagagatacagcgcttgtggtggggattccagggcagctttgtcatcgtggtgggaaagaagaagaccaccaaactcgaaatggatctcaaggggcattacgggtccctgagtagcgttctggagaaggaggatcccgccaacatctacgaactcgctcttgatatcaaagggggaaatgacttcatccttctacttcgtaacagaaaagtggtggtctccgctcatcgtcgtgaaccagtgtggtacttggacttcaaggacttctacttattgaattttggccaggagttaagcacaccgttttaggagtctttgctttaaattcctgtcatcgcgttttatgccgtatgccattacatattgctatattgttttgaaaaaaaatcgcaaaacaagtattttattattttacattaatcttttagtggccctttaaaattttacacctgcgggccctctttatatacgcgaatggtaattagtgcctagccacttgctgtcatatccttgatcgtatcttcgtcgactcgtatcggcttgcttcaaattagatcatcccgaagcgccgtgtatgattgctagatgcattttatcttctgctccttcgcagtcaagatgactcaaaattttatatcatatcttttgctttgccagcaccagtgcctctgtccctggaagacatctcgcaaaatttgcgcgcttattcccttttgc

SEQ ID NO: 4902 - DNA, 1044 bp, Muscodor strobelii
  misc_feature: SGI cDNA ID NO. 561339
  misc_feature: Encodes the peptide sequence at SEQ ID NO 4903
atgaaggcattcaactgggctctcctctcgagctatgctctacttgctgccgcttcccccgtcgagaggatcaagctagagagagactcggttgacctcgacacctttaagctttatgcgcagtactcaggtgccgcttattgcaacagcaagatggccaatggtgcaactataacttgctccaataacgtctgcccggatgtcacctctgctggtgctacagtgcaagcaactttcgctggctcgtcgaccgatcttcaagggttcgtagctgtagaccctggacaccaagcagttgtcgtttcaatgagaggatcatcctcgttgaacaacttcatcacagactttgagttcttccaggaggactcccctcttgtcgccggcggccaagttcatatcgggttcgcaaaggcctggagcgaggtgtccagcgctgttctggctggtctgaaagctgcaaccgatgccaacccttcctacagaatcgttttcactggccattcactcggagccgcggtcagctcctacggggcggcattcgctcgcgcccagggttatgcaattgacatgatcaatttcggtagccctcgcttcggcaacgacatcttagtggacttcgtcacaaaccagcctggtattgaatggcgtatgacccatctggatgaccctgtgcctcgtctgcctcccatcatctttaactaccgccacacctctccagagtactggttgagcgacggccaaggcgacacgaccgcctattcagctagtgacgtcaagatttgcgacggcaacgccaacactgcttgcaacggtggcacctttggcctcgacatcgtcgcacacttgaactaccttgagaacatctctgggtgcaacgccgccgagttcatcttcaagagagacttggcagaaggaaatctgcagagcagagacgaggattactactggtacttggctactgcaccggccaacagcatctctaacgatgatcttaccaacaaggtcaacgactgggccgctcaagatgtggctgcgagttcttga

SEQ ID NO: 4903 - protein, 347 aa, Muscodor strobelii
  misc_feature: SGI Peptide ID NO. 561339
  misc_feature (8)..(77): Pfam Id: PF03893 Pfam Desc: Lipase 3 N-terminal region
  misc_feature (100)..(232): Pfam Id: PF01764 Pfam Desc: Lipase (class 3)
  misc_feature (1)..(342): NCBI GI: 148791375 Blast Desc: lipase [Fusarium oxysporum]
  misc_feature (9)..(342): NCBI GI: 256731543 Blast Desc: NECHADRAFT_49364 [Nectria haematococca mpVI 77-13-4]
  misc_feature (9)..(314): NCBI GI: 1000397 Blast Desc: lipase [Fusarium heterosporum]
  misc_feature (7)..(300): NCBI GI: 46123057 Blast Desc: FG05906.1 [Gibberella zeae PH-1]
  misc_feature (7)..(300): NCBI GI: 33621223 Blast Desc: extracellular lipase [Gibberella zeae]
  misc_feature (15)..(314): NCBI GI: 11990253 Blast Desc: extracellular lipase [Nectria haematococca] gi|256721220|gb|EEU34629.1| [Nectria haematococca mpVI 77-13-4]
  misc_feature (7)..(310): NCBI GI: 39978263 Blast Desc: MGG_07016 [Magnaporthe grisea 70-15] gi|145013401|gb|EDJ98042.1| MGG_07016 [Magnaporthe grisea 70-15]
  misc_feature (1)..(295): NCBI GI: 116206442 Blast Desc: CHGG_02514 [Chaetomium globosum CBS 148.51] gi|88183111|gb|EAQ90579.1| CHGG_02514 [Chaetomium globosum CBS 148.51]
  misc_feature (30)..(284): NCBI GI: 261355494 Blast Desc: lipase [Verticillium albo-atrum VaMs.102]
  misc_feature (30)..(343): NCBI GI: 85102605 Blast Desc: NCU03639 [Neurospora crassa OR74A] gi|12718379|emb|CAC28687.1| triacylglycerol lipase precursor [Neurospora crassa] gi|28922910|gb|EAA32130.1| NCU03639 crassa
  misc_feature (24)..(291): SWISSPROT Homolog: EC 3.1.1.3 Triacylglycerol lipase
MKAFNWALLSSYALLAAASPVERIKLERDSVDLDTFKLYAQYSGAAYCNSKMANGATITCSNNVCPDVTSAGATVQATFAGSSTDLQGFVAVDPGHQAVVVSMRGSSSLNNFITDFEFFQEDSPLVAGGQVHIGFAKAWSEVSSAVLAGLKAATDANPSYRIVFTGHSLGAAVSSYGAAFARAQGYAIDMINFGSPRFGNDILVDFVTNQPGIEWRMTHLDDPVPRLPPIIFNYRHTSPEYWLSDGQGDTTAYSASDVKICDGNANTACNGGTFGLDIVAHLNYLENISGCNAAEFIFKRDLAEGNLQSRDEDYYWYLATAPANSISNDDLTNKVNDWAAQDVAASS

SEQ ID NO: 4904 - DNA, 1572 bp, Muscodor strobelii
  misc_feature: SGI EST ID NO. CUFF.12385.0
  misc_feature: Variant of the nucleotide sequence at SEQ ID NO 4902
agcaggtccatcgggctgccaaggtcgcctaaaaataccattccatattgtctcactatgatctgcactttgcatccttgggagctttctgtgcggaatgcttttggcagcttatgtctcgctttgccatgcgaaggaaccactaacgctcctaacgatcccagatacggtagtcaagcccggtataaggttatcttctctccggcgcgaaatgcgggagctatgatgaggttcgacaacggctcggattaaacgccgtggcatccaatgtccgcccccaatcttagcccaacagaggttgctcgtatgcgacacgcatgcacgaaacaatcccggtcaataatggcggccgagagtggccccgagaagtggctgtttcgaaggacaatacagcagcatcccattcattcaatactctttcaggtatatctccttcagatgcacaggtcccgtgaggtgtcatcgaatgctaccccacagtcaagagatctcgcaggatggagggatcgtccaacgtccattctgggacctagcgtagggttgtcttggctctccttatgggttgcaagtgacatgggctgctaaagatgaaacagtataaaggtcatgatgatatctcaatatatactcggttgacctcgacacctttaagctttatgcgcagtactcaggtgccgcttattgcaacagcaagatggccaatggtgcaactataacttgctccaataacgtctgcccggatgtcacctctgctggtgctacagtgcaagcaactttcgctggctcgtcgaccgatcttcaagggttcgtagctgtagaccctggacaccaagcagttgtcgtttcaatgagaggatcatcctcgttgaacaacttcatcacagactttgagttcttccaggaggactcccctcttgtcgccggcggccaagttcatatcgggttcgcaaaggcctggagcgaggtgtccagcgctgttctggctggtctgaaagctgcaaccgatgccaacccttcctacagaatcgttttcactggccattcactcggagccgcggtcagctcctacggggcggcattcgctcgcgcccagggttatgcaattgacatgatcaatttcggtagccctcgcttcggcaacgacatcttagtggacttcgtcacaaaccagcctggtattgaatggcgtatgacccatctggatgaccctgtgcctcgtctgcctcccatcatctttaactaccgccacacctctccagagtactggttgagcgacggccaaggcgacacgaccgcctattcagctagtgacgtcaagatttgcgacggcaacgccaacactgcttgcaacggtggcacctttggcctcgacatcgtcgcacacttgaactaccttgagaacatctctgggtgcaacgccgccgagttcatcttcaagagagacttggcagaaggaaatctgcagagcagagacgaggattactactggtacttggctactgcaccggccaacagcatctctaacgatgatcttaccaacaaggtcaacgactgggccgctcaagatgtggc

SEQ ID NO: 4905 - DNA, 444 bp, Muscodor strobelii
  misc_feature: SGI cDNA ID NO. 561340
  misc_feature: Reduced expression when VOC is produced
  misc_feature: Encodes the peptide sequence at SEQ ID NO 4906
atgagatccctcagtcttgcaggatcaactgcccgagcagctgtttctcgggcttgcaagaccccaagtgtccagacacccgcgataaaacgtactttctcttcgcttccgcatctccgcccctccatcgtctgcccaaacagcacagtctttcgaccatgcaatagctctaataccctcctctcccgcataccgacgacgacgacgagcactcctggtgccacagatggactcatagacatcctcccaaaatcctccattacggcacatcctgcattggccggccctctacagatccgatgtggtcccagagcaaacctgtcgagaagcagtcgactgaagcgcaagagacgtcacggattcttgtctcgtattcgaacgcggctcggcagaaagatactacagaggcgtaaggaaaagggccgcttggagctgcatggatag

SEQ ID NO: 4906 - protein, 147 aa, Muscodor strobelii
  misc_feature: SGI Peptide ID NO. 561340
  misc_feature (104)..(147): Pfam Id: PF00468 Pfam Desc: Ribosomal protein L34
  misc_feature (111)..(147): Pfam Id: PF00468 Pfam Desc: Ribosomal protein L34
  misc_feature (31)..(134): NCBI GI: 171693659 Blast Desc: protein product [Podospora anserina] gi|170946778|emb|CAP73582.1| protein product [Podospora anserina]
  misc_feature (31)..(142): NCBI GI: 46123059 Blast Desc: FG05907.1 [Gibberella zeae PH-1]
  misc_feature (31)..(145): NCBI GI: 85102600 Blast Desc: NCU03638 [Neurospora crassa OR74A] gi|16944634|emb|CAD11398.1| related to ribosomal protein L34, mitochondrial [Neurospora crassa] gi|28922909|gb|EAA32129.1|
  misc_feature (29)..(145): NCBI GI: 156054496 Blast Desc: SS1G_06096 [Sclerotinia sclerotiorum 1980] gi|154703876|gb|EDO03615.1| SS1G_06096 [Sclerotinia sclerotiorum 1980]
  misc_feature (24)..(145): NCBI GI: 169601736 Blast Desc: SNOG_03741 [Phaeosphaeria nodorum SN15] gi|111067826|gb|EAT88946.1| SNOG_03741 [Phaeosphaeria nodorum SN15]
  misc_feature (31)..(130): NCBI GI: 261354820 Blast Desc: conserved [Verticillium albo-atrum VaMs.102]
  misc_feature (48)..(145): NCBI GI: 156846365 Blast Desc: Kpol_543p42 [Vanderwaltozyma polyspora DSM 70294] gi|156116742|gb|EDO18212.1| Kpol_543p42 [Vanderwaltozyma polyspora DSM 70294]
  misc_feature (83)..(145): NCBI GI: 45201176 Blast Desc: AGR081Cp [Ashbya gossypii ATCC 10895] gi|44985959|gb|AAS54570.1| AGR081Cp [Ashbya gossypii ATCC 10895]
  misc_feature (70)..(145): NCBI GI: 146421128 Blast Desc: PGUG_02186 [Pichia guilliermondii ATCC 6260]
  misc_feature (70)..(145): NCBI GI: 190346083 Blast Desc: PGUG_02186 [Pichia guilliermondii ATCC 6260]
  misc_feature: Useful for introducing or modulating the production of volatile compounds
MRSLSLAGSTARAAVSRACKTPSVQTPAIKRTFSSLPHLRPSIVCPNSTVFRPCNSSNTLLSRIPTTTTSTPGATDGLIDILPKSSITAHPALAGPLQIRCGPRANLSRSSRLKRKRRHGFLSRIRTRLGRKILQRRKEKGRLELHG

SEQ ID NO: 4907 - DNA, 3156 bp, Muscodor strobelii
  misc_feature: SGI EST ID NO. CUFF.12475.1
  misc_feature: Variant of the nucleotide sequence at SEQ ID NO 4905
cgtcgtgaagttgaatgttagctaccgatcccatcgaaccacttgcatccgcgacattgaccactagctcttgcctcgttggccgacaggactttcgaaaggcttccacaactagattgtcatcatgagatccctcagtcttgcaggatcaactgcccgagcagctgtttctcgggcttgcaagaccccaagtgtccagacacccgcgataaaacgtactttctcttcgcttccgcatctccgcccctccatcgtctgcccaaacagcacagtctttcgaccatgcaatagctctaataccctcctctcccgcataccgacgacgacgacgagcactcctggtgccacagatggactcatagacatcctcccaaaatcctccattacggcacatcctgcattggccggccctctacagatccgatgtggtcccagagcaaacctgtcgagaagcagtcgactgaagcgcaagagacgtcacggattcttgtctcgtattcgaacgcggctcggcagaaagatactacagaggcgtaaggaaaagggccgcttggagctgcatggatagatactggagacttcgatcgcattgaactgaaaccctcgtacgcacgacctcagttgatggagtcgaacagccgcgagaaacgatttgcaccactgtgatcgaatgcttccgttgaaggtgcattcgatattccggcttttctctgccaatgcatcaaatccgaattcagtggcagcacatttggggaacttgtcagggttgaaagtgagaagaccgccagcgctgtagacacttgtatcatcattcgcctgtacgatatggacaaaagcgctgtatttagctcaacccgcaccagtatatagcgctcatgtataacatttcaccgagacaaataccatcaaccattctatttcatttacgcccatttctggccggttagagtccacgggatatctctatctagcttcaatgcggtacgacgactggagttcttcgttttggtcacgaggtaatgttaagagtattttcaagcctcaaacagagatagagaaagtgtccgaaccctgtaaagaattctagttatattcatactaagacttcagaaagctgatacttgatcttaaattcacaatcttctaagaccctctctatataccttcttgtgaaaccacacactatctaaacaggcccagtaacaccttcctcacaagtcaaggtatcagtatagcacacaacactcaaatcatcactcgcctgtccaatccaaaccttatacctcgcctcaggactaggcacaatccaattctgcgacaccacatcccaaacactcacatccttccgcgtgagctgtagcgtcagtgtggcgctatcaccagcatctaacaactcagtcttctcaaagtcacgaagctggataatcggtgtttcgaacccgccgttgtccgctgtatcggggaactggacatacacctgcgcgacggctttcccggcggtcttgccggtgtttttgacagtcacggatagcgtgtacgcaacgtcgaatagtgcgggatttcctccacttgcgccgccggctggtggacctggtttttggaccgttgagtagccctctgggtagggatatttcttcgtccctgctgcgccgatggcgtgcgcggcgtcggctgagagattgtcgagaaatgagtagagataccgcatgattggtatgaagcccttgggatagtatgcctcagatgcagcggggagtgaggtgttcattgatgatacgggggatgttggttttgcggctcgagtcggtgggacggaagatagtgtctctcctgagattgaagcattggaaagagaaaaggttgtgtagcttagtcctgctccgaaggcaaagcgtggcttgatacctgctttgtttagatatctatagtcgatgtacagaccctcggtatatgtgtcttggatttgactgaggataggcgttgagacaatgctgacactggcgggataatcgtcctctgatacggggatactgtaaggtaagtgaccgctgggagatacctcaccaaagatgacctccgttagagaatcgccagcttcttgtccaggtagatgagcaacgaggacagctttcacggacggtaggttgacccagggctccatgataatgggccctacggtgtgaacgactactacgacgttgctgtatttcgctgctgcgtcttggactagttcgtcgccgttgtgccatgctgctagaccgctcgcatcacggtctccgtggttgttttctacagtgtatgagttttcgcctgaatcggaggtgatgaatacaatagccacgtcgttggctgttggagccgcgaccgttgggaatgagtccgtgttgtagaatgtgacgttggtagccttcttcttcagggatgtgatcggatcatctaggtacggatactttgcgcttccagagccccaacccatgccgagggttcccttgttgcagctttgatcggtgcaggagttgataccatcgggattcgcttgcgcatccgtgccgaacacaaacaggggcttagatgtggtgataggcaagaaactaccgttgttcttgagaagcgttatagcctcctgagctacggctttggcaacaaccttatggttcccctgtacgttaacgtattcgttgactacacctgatggggaaatcaacgcgcctggatacagaagcccttcgcgatctgcagtgttggcagagaaattcggatcggggtagtcactactgtcctggcccagttggtaccaagctgctacgactcgcgttgccatgtcattgatcctatcgacagggactgagccgttaagaacggcgcgcgtgagttcgtacatccagtcgctcgtgccagtgagcggaataccattgccaaaagtatcaccgggcattgacatatcgagacccgcgagcgcagagctgacgcctcctatctgcgctagccagtctgtcatgactacgccctggaaaccaagctcgtctttaacgaggttgttgattagccatgagttctgtgagcaagcagaaccgtttactgcgttgtacgaagtcatcaaagcgcccgtgccggctcttattccggcggcaaatggccataaataaagctcatgca

SEQ ID NO: 4908 - DNA, 1321 bp, Muscodor strobelii
  misc_feature: SGI cDNA ID NO. 561341
  misc_feature: Encodes the peptide sequence at SEQ ID NO 4909
atgcctctttctcccgtatcacctaacgtacaggagtcggaggaggcatcaaaacggagaccacgcgatcactacgcaactgccactctcagtgacgcccctagcaacgagaaccgcctcttcccaaagttactgctatccaagatgtctgcctctaccctggaacatcaacaccagtcaggtctcacgcccgaggtcactatcaattcacctcccaagagtagcccgcctgcaatcacgacagccggttgtgacacccccacacggaactctctctctccgaatggcactccctctaagtccgacccactagcacaatcatctacacccacgatgccatcaacaacaaaccccctgcccaaggccacgcaggccaagcgtaagctcgcaccagaagagaaggcgcaggagcaagcagagaaaagacagaagcaggaagccaaagccgcagagaaagccgagaaggaagtcgccagagcggctgcgaaggctgagagggaagctgccaaagctgcgaagcaggcagataaggacgccgccgacgccgagaaagctaagaagaaggcggagaaggaagccaaggacgctgcaaaagctcgcgttgaagcggagaaaaaggcaaaagaggaggctcttgaggccaaacaacagaaacagaagaatatgatggctagcttcctcaagaaggcacccgtcgcacctgccaccaagaaaaacgaccaacctcagatcaaacccgaagcagattcccccaaagcccctccacagaaaattaacgccgaacccataaaatctgtcttcgaacagaccttccagcctttcttcataaaggcgggtgttacgttggcaccgccacctttcgagatggacgacgctgccaaagaactcaagtccaagaaactcgacgaataccttagcggagcccatgacgagtacacgccgccccagcctttcgatgcccaggaagtattcgacttcgcttttccccagcaacgcggaatagttaccccgagtgtcaaagagatcatggccacgatatatggagacggccactcagctgcttttggtcttggaagctccaaaagcgagtctcagacggagaaggccttggtcaaagcccaagataggttagatgcgatcccaatgaaatatctccgattctacgaagatgtgagaccggcctactatggcactgtgaccacgccgacgaatcggcaaaagcttcggctgctctcgagacgacccacaggcaagattctaccactcgcatacgactatgattcggaggcagaatgggtagaggacgatggggaagacctcg

SEQ ID NO: 4909 - protein, 440 aa, Muscodor strobelii
  misc_feature: SGI Peptide ID NO. 561341
  misc_feature (74)..(435): NCBI GI: 261358027 Blast Desc: conserved [Verticillium albo-atrum VaMs.102]
  misc_feature (219)..(437): NCBI GI: 171693541 Blast Desc: protein product [Podospora anserina] gi|170946719|emb|CAP73522.1| protein product [Podospora anserina]
  misc_feature (267)..(432): NCBI GI: 85101477 Blast Desc: NCU04198 [Neurospora crassa OR74A] gi|28922698|gb|EAA31922.1| [Neurospora crassa OR74A]
  misc_feature (211)..(433): NCBI GI: 145601771 Blast Desc: MGG_08654 [Magnaporthe grisea 70-15] gi|145010279|gb|EDJ94935.1| MGG_08654 [Magnaporthe grisea 70-15]
  misc_feature (267)..(432): NCBI GI: 21622344 Blast Desc: related to chromatin assembly complex, subunit p90 [Neurospora crassa]
  misc_feature (1)..(428): NCBI GI: 46123519 Blast Desc: FG06137.1 [Gibberella zeae PH-1]
  misc_feature (1)..(428): NCBI GI: 256731053 Blast Desc: NECHADRAFT_106375 [Nectria haematococca mpVI 77-13-4]
  misc_feature (110)..(428): NCBI GI: 116206366 Blast Desc: CHGG_02476 [Chaetomium globosum CBS 148.51] gi|88183073|gb|EAQ90541.1| CHGG_02476 [Chaetomium globosum CBS 148.51]
  misc_feature (137)..(440): NCBI GI: 189207092 Blast Desc: conserved [Pyrenophora tritici-repentis Pt-1C-BFP] gi|187975973|gb|EDU42599.1| conserved [Pyrenophora tritici-repentis Pt-1C-BFP]
  misc_feature (74)..(433): NCBI GI: 162312247 Blast Desc: chromatin remodeling complex subunit Rlf2 () [Schizosaccharomyces pombe] gi|229891777|sp|Q1MTN9.2|RLF2_SCHPO RecName: Full=Chromatin assembly factor 1 subunit rlf2 CAF factor
MPLSPVSPNVQESEEASKRRPRDHYATATLSDAPSNENRLFPKLLLSKMSASTLEHQHQSGLTPEVTINSPPKSSPPAITTAGCDTPTRNSLSPNGTPSKSDPLAQSSTPTMPSTTNPLPKATQAKRKLAPEEKAQEQAEKRQKQEAKAAEKAEKEVARAAAKAEREAAKAAKQADKDAADAEKAKKKAEKEAKDAAKARVEAEKKAKEEALEAKQQKQKNMMASFLKKAPVAPATKKNDQPQIKPEADSPKAPPQKINAEPIKSVFEQTFQPFFIKAGVTLAPPPFEMDDAAKELKSKKLDEYLSGAHDEYTPPQPFDAQEVFDFAFPQQRGIVTPSVKEIMATIYGDGHSAAFGLGSSKSESQTEKALVKAQDRLDAIPMKYLRFYEDVRPAYYGTVTTPTNRQKLRLLSRRPTGKILPLAYDYDSEAEWVEDDGEDL

SEQ ID NO: 4910 - DNA, 1647 bp, Muscodor strobelii
  misc_feature: SGI EST ID NO. CUFF.12406.0
  misc_feature: Variant of the nucleotide sequence at SEQ ID NO 4908
ttttgcttcaatggtgcgggtgatgttcaacaggctggcagcaaacacatgaccaccgcttctgtagcaacctgtttgagatcttttctgtcaacgcacagcaattgactactacactaattagtagtactctatacctgatttcatttcgcctgcacagcctgtttctgacataacaactatttcatcgcatcttcacccgagtttccagaatcgcactcaccgcatgatttgtcgaggccgaggtcacgagataccactcctcacaattggagttcgcaagacacaacctacgcgtcgccggtgagcttcgggctcttaccagcacgatcaatgcctctttctcccgtatcacctaacgtacaggagtcggaggaggcatcaaaacggagaccacgcgatcactacgcaactgccactctcagtgacgcccctagcaacgagaaccgcctcttcccaaagttactgctatccaagatgtctgcctctaccctggaacatcaacaccagtcaggtctcacgcccgaggtcactatcaattcacctcccaagagtagcccgcctgcaatcacgacagccggttgtgacacccccacacggaactctctctctccgaatggcactccctctaagtccgacccactagcacaatcatctacacccacgatgccatcaacaacaaaccccctgcccaaggccacgcaggccaagcgtaagctcgcaccagaagagaaggcgcaggagcaagcagagaaaagacagaagcaggaagccaaagccgcagagaaagccgagaaggaagtcgccagagcggctgcgaaggctgagagggaagctgccaaagctgcgaagcaggcagataaggacgccgccgacgccgagaaagctaagaagaaggcggagaaggaagccaaggacgctgcaaaagctcgcgttgaagcggagaaaaaggcaaaagaggaggctcttgaggccaaacaacagaaacagaagaatatgatggctagcttcctcaagaaggcacccgtcgcacctgccaccaagaaaaacgaccaacctcagatcaaacccgaagcagattcccccaaagcccctccacagaaaattaacgccgaacccataaaatctgtcttcgaacagaccttccagcctttcttcataaaggcgggtgttacgttggcaccgccacctttcgagatggacgacgctgccaaagaactcaagtccaagaaactcgacgaataccttagcggagcccatgacgagtacacgccgccccagcctttcgatgcccaggaagtattcgacttcgcttttccccagcaacgcggaatagttaccccgagtgtcaaagagatcatggccacgatatatggagacggccactcagctgcttttggtcttggaagctccaaaagcgagtctcagacggagaaggccttggtcaaagcccaagataggttagatgcgatcccaatgaaatatctccgattctacgaagatgtgagaccggcctactatggcactgtgaccacgccgacgaatcggcaaaagcttcggctgctctcgagacgacccacaggcaagattctaccactcgcatacgactatgattcggaggcagaatgggtagaggacgatggggaa

SEQ ID NO: 4911 - DNA, 525 bp, Muscodor strobelii
  misc_feature: SGI cDNA ID NO. 561342
  misc_feature: Encodes the peptide sequence at SEQ ID NO 4912
atggtaaaaagcgccgatgccgcatttttcaagttagagcaacggatggggaacggcacaccctgggaagaggctttatcgactgctggaacaaaggcaccgggcctcctgtcccctgcgacactggtagcgacgatcgccatcgctcttcctaatactaagctgaaggagtggataggccgacttgaaattggatggatgatccggtctcgcgcaatattgagcctgacggaagggttctggaagggtatatctacatataatcttaacgacatcttccatcttgaagatcccatcgcttcactagcttatacactcctaatagactatgatagtatccttggcgagaatttcacccgaagcagaaccaacatacagccatatttgccagcccgcggcattacgatagacagtgacgcctcccccgtcaagtcggcagcgagtcctatagagggtccggtcatcgatagcatcctaagcccggcgacccagacacctaacacattgcgcgtaatgcgcgactag

SEQ ID NO: 4912 - protein, 174 aa, Muscodor strobelii
  misc_feature: SGI Peptide ID NO. 561342
MVKSADAAFFKLEQRMGNGTPWEEALSTAGTKAPGLLSPATLVATIAIALPNTKLKEWIGRLEIGWMIRSRAILSLTEGFWKGISTYNLNDIFHLEDPIASLAYTLLIDYDSILGENFTRSRTNIQPYLPARGITIDSDASPVKSAASPIEGPVIDSILSPATQTPNTLRVMRD

SEQ ID NO: 4913 - DNA, 1686 bp, Muscodor strobelii
  misc_feature: SGI cDNA ID NO. 561343
  misc_feature: Elevated expression when VOC is produced
  misc_feature: Encodes the peptide sequence at SEQ ID NO 4914
atgtcggaccaggctcacaccacgccatcgacactctttgagaagtcggaggtacccgccgacaatgcacttagcaaccccaacggtccggagcacgacactgagaaaggcgcgtcgagcccaagcagtgtaagcgataaggcggaaccacagcgagagatcaccgggataaagtggttcttctgtgttctctctctctatgctaccgttgtcatctacggtcttgataccacaattgcggctgccgtacagggtgatatcgtcgccagtgttggtcatgtcgaacaacttgcatggatcggagccgggtttccattgggctccgtttccacgatcttcctgttcggttatctattcaacgctttcaacatgaaatggacatatgtcttcacggttctattattcaacatcggatcagcactgtgcggtgccgcaccaaacatggcgactctgatcgttggacgtgtcattgctggtgctggcggtactggtatttatctcgggtcgctaaactacatcaccgcaatgactgttcccaaggaacgtggtttatacactactctgatcggattttcatggggcgtcggcggtattctagggcccattgttggtggagcatttgcgatttcgtctgcgacatggcgttggggtttctatctgaatctggtagttggcgctgcgtctgccccggcttacatcatatgtcttcctcacattcgcatgatgccaggcgtcagcaagaaagagcgtttcttcaatatcgatttcgttggatttcttcttggcgctggcatgtggacgtcgttccttcttgcgttgactatggcgggcggtcagtggccttggaaggatggtcgtaccattgctaccttcgtcgtattcggcgttacaatcacactgtacggtctccagcagtacttctgttggttcacgagcacagcccatcgcgcctttcctgtccaattgcttaaggagcgaactcaggtcctattgtacatctgcaactccgctttcatcactacatttttcatcatggtgttctacatcccgctcttctttgagttcgtcaagagtgattcaagtctgacagccgcattgcgcctgttgccattcgtggcaatttgtatcacgaccgccattaccactggtcattttatcggagctgtccctttctacaatttgctgtacattggatcagggatattgatgattattggtggcagcttgattgttgtgtatcttcaaccggatgcttcgaccagcactctatacgggttcactgtgatcattgcattcggtgccggtctttctatgctgaaggtctattcgattgctgcgctgactactgctcccgccaatgtcggtggcgctctcagcatgcacaacgtctcagaggttggcggagaggtcatctcacttgctatttctggccagatttatcactccattgccgtcagaggactgctctccgcgcttgacggccaaggattcagccagtttgatatcatcagcgcacttgcaggtgctagaagtactttcttctctgatttggatgctccgctacgtgttgctgcagaggccgcgatttccaaggcattgcagtctgccttcatcctcgttcctgtctccggtggcgtaatgctggtcgcgtcgctccttatgagatgggagaagttggccatgtag

SEQ ID NO: 4914 - protein, 561 aa, Muscodor strobelii
  misc_feature: SGI Peptide ID NO. 561343
  misc_feature (66)..(473): Pfam Id: PF07690 Pfam Desc: Major Facilitator Superfamily
  misc_feature (96)..(227): Pfam Id: PF00083 Pfam Desc: Sugar (and other) transporter
  misc_feature (7)..(559): NCBI GI: 255940144 Blast Desc: Pc16g04910 [Penicillium chrysogenum Wisconsin 54-1255] gi|211585464|emb|CAP93161.1| Pc16g04910 [Penicillium chrysogenum Wisconsin 54-1255]
  misc_feature (27)..(559): NCBI GI: 115388655 Blast Desc: [Aspergillus terreus NIH2624] gi|114195917|gb|EAU37617.1| [Aspergillus terreus NIH2624]
  misc_feature (4)..(559): NCBI GI: 225555190 Blast Desc: conserved [Ajellomyces capsulatus G186AR]
  misc_feature (1)..(559): NCBI GI: 145251047 Blast Desc: An15g05060 [Aspergillus niger] gi|134082565|emb|CAK42480.1| protein product [Aspergillus niger]
  misc_feature (6)..(559): NCBI GI: 154272796 Blast Desc: [Ajellomyces capsulatus NAm1] gi|150415762|gb|EDN11106.1| [Ajellomyces capsulatus NAm1]
  misc_feature (1)..(561): NCBI GI: 242800469 Blast Desc: efflux pump antibiotic resistance protein, [Talaromyces stipitatus ATCC 10500] gi|218716940|gb|EED16361.1| efflux pump antibiotic resistance protein, [Talaromyces ATCC
  misc_feature (4)..(561): NCBI GI: 156058470 Blast Desc: SS1G_03247 [Sclerotinia sclerotiorum 1980] gi|154701034|gb|EDO00773.1| SS1G_03247 [Sclerotinia sclerotiorum 1980]
  misc_feature (10)..(559): NCBI GI: 242783880 Blast Desc: efflux pump antibiotic resistance protein, [Talaromyces stipitatus ATCC 10500] gi|218720422|gb|EED19841.1| efflux pump antibiotic resistance protein, [Talaromyces ATCC
  misc_feature (124)..(559): NCBI GI: 240281412 Blast Desc: MFS drug efflux transporter [Ajellomyces capsulatus H143]
  misc_feature (2)..(561): NCBI GI: 212544362 Blast Desc: conserved [Penicillium marneffei ATCC 18224] gi|210065304|gb|EEA19398.1| conserved [Penicillium marneffei ATCC 18224]
  misc_feature: Useful for introducing or modulating the production of volatile compounds
MSDQAHTTPSTLFEKSEVPADNALSNPNGPEHDTEKGASSPSSVSDKAEPQREITGIKWFFCVLSLYATVVIYGLDTTIAAAVQGDIVASVGHVEQLAWIGAGFPLGSVSTIFLFGYLFNAFNMKWTYVFTVLLFNIGSALCGAAPNMATLIVGRVIAGAGGTGIYLGSLNYITAMTVPKERGLYTTLIGFSWGVGGILGPIVGGAFAISSATWRWGFYLNLVVGAASAPAYIICLPHIRMMPGVSKKERFFNIDFVGFLLGAGMWTSFLLALTMAGGQWPWKDGRTIATFVVFGVTITLYGLQQYFCWFTSTAHRAFPVQLLKERTQVLLYICNSAFITTFFIMVFYIPLFFEFVKSDSSLTAALRLLPFVAICITTAITTGHFIGAVPFYNLLYIGSGILMIIGGSLIVVYLQPDASTSTLYGFTVIIAFGAGLSMLKVYSIAALTTAPANVGGALSMHNVSEVGGEVISLAISGQIYHSIAVRGLLSALDGQGFSQFDIISALAGARSTFFSDLDAPLRVAAEAAISKALQSAFILVPVSGGVMLVASLLMRWEKLAM

SEQ ID NO: 4915 - DNA, 2398 bp, Muscodor strobelii
  misc_feature: SGI EST ID NO. CUFF.12415.0
  misc_feature: Variant of the nucleotide sequence at SEQ ID NO 4913
gcattttgcctctaagagtcttcatttcaatgtcgagtccgaggagcattgctttcaaacctcgtaggtccgaggaccctacatgacctattatggattcgactatattagtgacgctgccatctaccattcttgtctctcattcctattaccgtcagacaatacataaaggcgacagttcaatctcagccttacgaactttccaaaactgggaatccaagtttcggtcaatacactcaaggtctcctcacctcaacgcaaggaaccaatcccagatacgactacaaccggcagcctgtctcccccggtcaaaatgtcggaccaggctcacaccacgccatcgacactctttgagaagtcggaggtacccgccgacaatgcacttagcaaccccaacggtccggagcacgacactgagaaaggcgcgtcgagcccaagcagtgtaagcgataaggcggaaccacagcgagagatcaccgggataaagtggttcttctgtgttctctctctctatgctaccgttgtcatctacggtcttgataccacaattgcggctgccgtacagggtgatatcgtcgccagtgttggtcatgtcgaacaacttgcatggatcggagccgggtttccattgggctccgtttccacgatcttcctgttcggttatctattcaacgctttcaacatgaaatggacatatgtcttcacggttctattattcaacatcggatcagcactgtgcggtgccgcaccaaacatggcgactctgatcgttggacgtgtcattgctggtgctggcggtactggtatttatctcgggtcgctaaactacatcaccgcaatgactgttcccaaggaacgtggtttatacactactctgatcggattttcatggggcgtcggcggtattctagggcccattgttggtggagcatttgcgatttcgtctgcgacatggcgttggggtttctatctgaatctggtagttggcgctgcgtctgccccggcttacatcatatgtcttcctcacattcgcatgatgccaggcgtcagcaagaaagagcgtttcttcaatatcgatttcgttggatttcttcttggcgctggcatgtggacgtcgttccttcttgcgttgactatggcgggcggtcagtggccttggaaggatggtcgtaccattgctaccttcgtcgtattcggcgttacaatcacactgtacggtctccagcagtacttctgttggttcacgagcacagcccatcgcgcctttcctgtccaattgcttaaggagcgaactcaggtcctattgtacatctgcaactccgctttcatcactacatttttcatcatggtgttctacatcccgctcttctttgagttcgtcaagagtgattcaagtctgacagccgcattgcgcctgttgccattcgtggcaatttgtatcacgaccgccattaccactggtcattttatcggagctgtccctttctacaatttgctgtacattggatcagggatattgatgattattggtggcagcttgattgttgtgtatcttcaaccggatgcttcgaccagcactctatacgggttcactgtgatcattgcattcggtgccggtctttctatgctgaaggtctattcgattgctgcgctgactactgctcccgccaatgtcggtggcgctctcagcatgcacaacgtctcagaggttggcggagaggtcatctcacttgctatttctggccagatttatcactccattgccgtcagaggactgctctccgcgcttgacggccaaggattcagccagtttgatatcatcagcgcacttgcaggtgctagaagtactttcttctctgatttggatgctccgctacgtgttgctgcagaggccgcgatttccaaggcattgcagtctgccttcatcctcgttcctgtctccggtggcgtaatgctggtcgcgtcgctccttatgagatgggagaagttggccatgtagagtgcagacttatcgtaggagctggtatcgcatttgtacttgactccggcggtgaatacagaggatctatagacttcggatatggttgcatacactcgcatgggtgttggctcagagcatgaacatggtgttatttgtttcgcttgctaggattggctttaatcaaatttttggagttcaaaaggagacgagaaggattatcggacacgccaattcgtccgtggcctggctatgtagttttcgatgtatggcatacaagtagagttgttcacatttaagatatgttttcgatacgagttcgatccattgtgatgccacgtgcagacattgactgctgcggtataataacaacattgcgtgctacgcatgggttgacctgcctcgtcccgtgcatgttct

SEQ ID NO: 4916 - DNA, 1635 bp, Muscodor strobelii
  misc_feature: SGI cDNA ID NO. 561344
  misc_feature: Elevated expression when VOC is produced
  misc_feature: Encodes the peptide sequence at SEQ ID NO 4917
atggctttcgggacggcttccgcgcttatagctcttgcgctgtgtctactactctaccctttgaggaaaattgggcagcggccaaagggatatccgccagggccaccaactctaccactcattggaaacctgcatttgatgccaaaggagaagggacatttacaatttcaaaaatgggcagagcagtacggaccagtctattcgcttgtcctaggaacaaaggtcatgatcatactgtcgacagatcaggcagttaaagatcttttagataagcgaagcgccatatactcgtcaaggcccgatatgtatcttgctcaagatatcgccagcggaggtttgcaaattgcgcttatggagtatggtgaaagatggagaacgcttaggggtattgcgcataagagcttgaacctcacagcgtcgcgaagctatgttccataccaagacctcgagaacaaggccatgttggttgctctccttgacaaaccatcacacttcatcgaccatatccggaggtacacaaactccatcgcaacacaaatgacattcggcttccgcactacgagcaatgacgatccaaagttgaagcagctttacacttgtgtaaaagagtggagcgatctctcaggcagtcaaggtgctgcattgctagatttgtatccgatcttgcgtcatctcccagatgcgctcctccccatgaggagacacgccaaagatcaccatcgcagggaatacgacttgttcgttggtcattacttagacgcaaagaaacgattactcgatggtaccgccaagccgtgcatctgctccgatattgcccgagcgcaagaccagttgaaaatctctgacggccaagctggatatctcagtggatcaatcctcgaggcaggctctgatacatctgcttcaactctcgttgccttcatccaagcgttgcttatcttcccagagattgccagtgttgcgcaagccgagatagatagagtatgtggagaccgcattcctgacctcaacgatctaccggacctaccatatatccgcggctgcgtaaaggaaatcatgcgctggatgccaacagcaatccttggggttccgcattgcacaaccgaggacgaccagtatcttggctaccacatcccgaaaggcgcacatgtagttttgaatgtctgggctatccacaacgactcgcgacgatatgccgaccctcgtcggttcgatccgacacgttgggcagatgatcagcgaacgtcttcagaagcggcaattgctttcgacgcaacaaaacgagatcaattcgtatttggcgctggcagacgcatctgtcagggcatgcacattgctgatcgcattctattcctgggcatctcacgcttgttatgggcttttgatatcagccgcactgttgatcagtctaccggtgaagaaataatccctgacatgtacgatctcacggagggaatgttggtcggacccaagccgttcgaagccaatatcaaacctcgtaacgcgttcaaggcagagcgggtccgcgccgaatgggatagtatgacagagctgttggacgatgagctgcagtggaagactgtacctgagggtatggtatggaaagactacgagcccggagagttcaaagagtga

SEQ ID NO: 4917 - protein, 544 aa, Muscodor strobelii
  misc_feature: SGI Peptide ID NO. 561344
  misc_feature (32)..(497): Pfam Id: PF00067 Pfam Desc: Cytochrome P450
  misc_feature (295)..(497): Pfam Id: PF00067 Pfam Desc: Cytochrome P450
  misc_feature (32)..(238): Pfam Id: PF00067 Pfam Desc: Cytochrome P450
  misc_feature (8)..(539): NCBI GI: 242773378 Blast Desc: cytochrome P450, [Talaromyces stipitatus ATCC 10500] gi|218721847|gb|EED21265.1| cytochrome P450, [Talaromyces stipitatus ATCC 10500]
  misc_feature (13)..(529): NCBI GI: 119483586 Blast Desc: Cytochrome P450 oxidoreductase, [Neosartorya fischeri NRRL 181] gi|119409852|gb|EAW19799.1| Cytochrome P450 oxidoreductase, [Neosartorya fischeri NRRL 181]
  misc_feature (8)..(532): NCBI GI: 171678956 Blast Desc: protein product [Podospora anserina] gi|170937549|emb|CAP62206.1| protein product [Podospora anserina]
  misc_feature (7)..(529): NCBI GI: 259484285 Blast Desc: TPA: cytochrome P450, (Eurofung) [Aspergillus nidulans FGSC A4]
  misc_feature (7)..(531): NCBI GI: 171694638 Blast Desc: protein product [Podospora anserina] gi|170947561|emb|CAP59722.1| protein product [Podospora anserina]
  misc_feature (1)..(529): NCBI GI: 255944711 Blast Desc: Pc20g05940 [Penicillium chrysogenum Wisconsin 54-1255] gi|211587858|emb|CAP85923.1| Pc20g05940 [Penicillium chrysogenum Wisconsin 54-1255]
  misc_feature (19)..(529): NCBI GI: 212530062 Blast Desc: cytochrome P450, [Penicillium marneffei ATCC 18224] gi|210074586|gb|EEA28673.1| cytochrome P450, [Penicillium marneffei ATCC 18224]
  misc_feature (1)..(534): NCBI GI: 85111866 Blast Desc: NCU11242 [Neurospora crassa OR74A] gi|28925910|gb|EAA34906.1| NCU11242 [Neurospora crassa OR74A] gi|38566928|emb|CAE76231.1| related to O-methylsterigmatocystin
  misc_feature (12)..(526): NCBI GI: 46139749 Blast Desc: FG11389.1 [Gibberella zeae PH-1]
  misc_feature (3)..(512): NCBI GI: 240111106 Blast Desc: Cytochrome P450 family protein [Coccidioides posadasii C735 delta SOWgp]
  misc_feature (50)..(524): SWISSPROT Homolog: EC 1.14.14.1 Unspecific monooxygenase
  misc_feature: Useful for introducing or modulating the production of volatile compounds
MAFGTASALIALALCLLLYPLRKIGQRPKGYPPGPPTLPLIGNLHLMPKEKGHLQFQKWAEQYGPVYSLVLGTKVMIILSTDQAVKDLLDKRSAIYSSRPDMYLAQDIASGGLQIALMEYGERWRTLRGIAHKSLNLTASRSYVPYQDLENKAMLVALLDKPSHFIDHIRRYTNSIATQMTFGFRTTSNDDPKLKQLYTCVKEWSDLSGSQGAALLDLYPILRHLPDALLPMRRHAKDHHRREYDLFVGHYLDAKKRLLDGTAKPCICSDIARAQDQLKISDGQAGYLSGSILEAGSDTSASTLVAFIQALLIFPEIASVAQAEIDRVCGDRIPDLNDLPDLPYIRGCVKEIMRWMPTAILGVPHCTTEDDQYLGYHIPKGAHVVLNVWAIHNDSRRYADPRRFDPTRWADDQRTSSEAAIAFDATKRDQFVFGAGRRICQGMHIADRILFLGISRLLWAFDISRTVDQSTGEEIIPDMYDLTEGMLVGPKPFEANIKPRNAFKAERVRAEWDSMTELLDDELQWKTVPEGMVWKDYEPGEFKE

SEQ ID NO: 4918 - DNA, 3286 bp, Muscodor strobelii
  misc_feature: SGI EST ID NO. CUFF.12431.0
  misc_feature: Variant of the nucleotide sequence at SEQ ID NO 4916
cgagcgcccgagcgtgattcctaaatcccatgcagtttgcgacagtgcggctcttttgtcaatcctggtccgtggagcttccgtactctcgggtcgtcaaccgaatgtggcttgagcctcgtgcatgccagacaacgtctaacgtctcttcaacgtcaaagttcctcccgctactcactagcttcggcgcggccctgcgcgtgttgccgtacttttgcagcctgagctgtgaagaatgtgacacatgtgacgccagatattcgagcttctcccaatacggcacgtcaattacgattcagaggaagaatgtgctatcagcatgggtgtgcgcaaacgcttgtctcgagacaccggcagtgagctcgccgtagcgcgagccggcacttgagttagtgtgtgcacaatggccgttcgacagcggaaggaatcccgaagatgctcaactacgagaaacttcgacgtaggatgcgatgacgacactgagcaccaccagatcagggggttcgctagacattctaagcgagaccctgcggttcctgtctgcggcacagcagccgtggcgaacgtggtagacctttcctagcatgatgtcagtcctttagtggtatggtattagagcttaacttgtgcgatgatgtctccagtgagatcttgcatcgctctattcgatggttctttgacatttgcggcacttgtgatcaccatccgaaattcggcaccctatctgctgggaccttttgttggttgccacaagcgcaatttttagaacgaggatgccatacagcctacgagacgatcgacatgggggtgagatgtcgagaatgtattacgtgtggtacaagggtcgaaggctcgcgttgacagatcactgccaaggtagtcaaacaccacgctaaacataccagggaatatgagttgcctacactcgtaatccgtatttcgacataggttcacttgcgagtcagggtacctgatgtttacggatagcgtgtcccctcaagagacggccgcagtatgtacacatgcagcctgctacactccagttgactggtagcgattgtgcaggttcaaatcctgccgattctcgggtacggctggtgggaccgtacatattcagcttgaccagagcctgcgatgctaaatcaaccccctggttattcacggcctcagctaacgtattgttatggtgctgtctcacgaaagcaatttgacagcaagtcagcaccttcaagaaatccgcctctcatgggttagtttgcattctatgctccgggtacggggagctggcggacgaggtataacggacattgcgggttttctctccgggtatattatatcatgacgaggtccccaggtccatggtatcgtttcggccgcatgatcttgcatgaactcgtccgctatcatatcatcttgctttcatactgttcatgaccatggctttcgggacggcttccgcgcttatagctcttgcgctgtgtctactactctaccctttgaggaaaattgggcagcggccaaagggatatccgccagggccaccaactctaccactcattggaaacctgcatttgatgccaaaggagaagggacatttacaatttcaaaaatgggcagagcagtacggaccagtctattcgcttgtcctaggaacaaaggtcatgatcatactgtcgacagatcaggcagttaaagatcttttagataagcgaagcgccatatactcgtcaaggcccgatatgtatcttgctcaagatatcgccagcggaggtttgcaaattgcgcttatggagtatggtgaaagatggagaacgcttaggggtattgcgcataagagcttgaacctcacagcgtcgcgaagctatgttccataccaagacctcgagaacaaggccatgttggttgctctccttgacaaaccatcacacttcatcgaccatatccggaggtacacaaactccatcgcaacacaaatgacattcggcttccgcactacgagcaatgacgatccaaagttgaagcagctttacacttgtgtaaaagagtggagcgatctctcaggcagtcaaggtgctgcattgctagatttgtatccgatcttgcgtcatctcccagatgcgctcctccccatgaggagacacgccaaagatcaccatcgcagggaatacgacttgttcgttggtcattacttagacgcaaagaaacgattactcgatggtaccgccaagccgtgcatctgctccgatattgcccgagcgcaagaccagttgaaaatctctgacggccaagctggatatctcagtggatcaatcctcgaggcaggctctgatacatctgcttcaactctcgttgccttcatccaagcgttgcttatcttcccagagattgccagtgttgcgcaagccgagatagatagagtatgtggagaccgcattcctgacctcaacgatctaccggacctaccatatatccgcggctgcgtaaaggaaatcatgcgctggatgccaacagcaatccttggggttccgcattgcacaaccgaggacgaccagtatcttggctaccacatcccgaaaggcgcacatgtagttttgaatgtctgggctatccacaacgactcgcgacgatatgccgaccctcgtcggttcgatccgacacgttgggcagatgatcagcgaacgtcttcagaagcggcaattgctttcgacgcaacaaaacgagatcaattcgtatttggcgctggcagacgcatctgtcagggcatgcacattgctgatcgcattctattcctgggcatctcacgcttgttatgggcttttgatatcagccgcactgttgatcagtctaccggtgaagaaataatccctgacatgtacgatctcacggagggaatgttggtcggacccaagccgttcgaagccaatatcaaacctcgtaacgcgttcaaggcagagcgggtccgcgccgaatgggatagtatgacagagctgttggacgatgagctgcagtggaagactgtacctgagggtatggtatggaaagactacgagcccggagagttcaaagagtgattcacgttcaaccgtcaagcagtgactgcgtatgatgaccaatgaaaattggtgttatcatacattggcagtgtcgagttcattccctatgtagcaaacttgattatacaggaggtcagcaatttttcaacagatagtagttttaggcttataaaagcttgtttcattgacactattccgatgagttgaccactgggcggcaatgaaaaaaaaga

SEQ ID NO: 4919 - DNA, 2355 bp, Muscodor strobelii
  misc_feature: SGI cDNA ID NO. 561345
  misc_feature: Reduced expression when VOC is produced
  misc_feature: Encodes the peptide sequence at SEQ ID NO 4920
atggacgctcccacgggcaacgcttcttccggcgaggatcgtttccgtggatcaggccagtccagaggccgaggtcgaggtcgtggccgaggaaactccagcgttcaaggtggcgccaacaggccccaacgcggtaggggaagaggacagaacacgccatcctcgcctccatcatccacccgacagccattaccaggtccgcggccagaaagcggccaagcggtgccccaagtacaatcttcaaccgcggagaacaacgaggacgaggacgtggaggcagaggtctgcttcatatgcgccagccccgtcgtccaccagtcagttgcgccctgcaaccacagaacatgtcacatatgcgcattgcgcatgagagccctctacaaaaacaaggaatgtgcacactgtcgtactgctgccccattcgtcatatttaccgacgatgccgctaagcgatacgaagactactccgactcggatgtgactagcgctgacgataacattggtattcgctacacgaacgaggatatagtcggcgatactgtcttgctcttacgctacaactgccccgatacatcttgtgattttgctggcctgggctggcccgatctacatcgccatgttcgaagcatccaccacaagaagatgtgtgatttgtgcacgagaaacaagaaagtcttcacccatgaacacgaattatttgctgataaggagctggagaagcacatgaggcatggtgacgatcagcccggcgccgtagaccagaccgggttccgtggccatccgctgtgtgggttctgcggctcgagattctacgacgatgacaagttatttgaacactgccgcagcaaacacgagcgatgtttcctgtgcgaccgacaagatccgagacagccgcattactaccgagactacaattctcttgaggatcatttcaagaaagaccactttctgtgtattgatcgtgagtgcttggagaaaaagtttgtcgtgtttgggtctgagatggacttgaaggcgcaccagttgagcgaacatggaacgtctctctccaaggacgtaaggcgtgaggcgagacttgtggatctatctggctttgacgttcgcgagagatatcagcaaccaaggaggggtggaggtgccggtcgcggacgagacagggactacgagggaggcagaaacggacgcgccagaggtcgtgatcccaatgccgaacctttgccgccgagctcagcacagcccctccggagagatgagctagctttgcagcggcaaatggcgatccattcctcccagtccgtttcaactcgtacctttggcggtcaattgtcgtcaagcgcatccggcccctcggggacatctgcacaatcaacacaaccgatcgcgagcgtgcacgccggcagcaatgctcggcccgcaccccttgtcccttctgttgaaatcgaaggtcttagtttgtccgacccgaatctcacgccggaagaccgtgcccgtttaatgcgccactcttcagtcatcgagcgtgcatctaatctgttacataatgacaaagttaagatcgacagttttcgcgcacacatttcatcatttcgacacgacaaaatacctgctgcggctctagtggatgctctattctcgcttttcgccgacacatcttcttccgcactggggacactggtgcgcgaagtggctgaccttttcgaagacaagaccaagggagaaaggctgcgaaaagcttggaatgactggcgtgctatcaatgaagactatcccacgcttccgggattgagtgggatgcatggggcaacaacctcgaatagtggttgggcagccgctgcggcaagttcaccagcagcagtaacggctgcgcccactcaacgactcacaacacgagtgctcaagttaaaaaactccacgcagcaatcaaggcgatccagtgtagagcatccactgacagggttctctaataaccatagcagccgatctactgcgccaccagctgcggcatttccatcactgccatctagtagtggcagcacatctcgcgcggcggctggagctctctggggtggcagcgcaaccaggacaacccccccacagagacctgcttctggtgctaatcgcgaagaggctttccccgcgttaccaacagccccaaagcccaccacgacaatatttggttatggtactggcagtgtacggagagatgctggagggtctagaaatacaggattcagttggggttccgccaatgatgacgcgtctggcgcggctcccgttgaagatgccgaggatagtggaagcaaaggaaagaaaggcaacaagggacgaaaaaaagttctggtgcaatggggataa

SEQ ID NO: 4920 - protein, 784 aa, Muscodor strobelii
  misc_feature: SGI Peptide ID NO. 561345
  misc_feature (79)..(747): NCBI GI: 39967407 Blast Desc: MGG_01987 [Magnaporthe grisea 70-15] gi|145012852|gb|EDJ97493.1| MGG_01987 [Magnaporthe grisea 70-15]
  misc_feature (82)..(784): NCBI GI: 256726623 Blast Desc: NECHADRAFT_33302 [Nectria haematococca mpVI 77-13-4]
  misc_feature (95)..(784): NCBI GI: 46122793 Blast Desc: FG05774.1 [Gibberella zeae PH-1]
  misc_feature (55)..(641): NCBI GI: 261353959 Blast Desc: zinc finger protein [Verticillium albo-atrum VaMs.102]
  misc_feature (63)..(746): NCBI GI: 85092739 Blast Desc: NCU02203 [Neurospora crassa OR74A] gi|28920960|gb|EAA30286.1| conserved [Neurospora crassa OR74A]
  misc_feature (50)..(746): NCBI GI: 116200850 Blast Desc: CHGG_10970 [Chaetomium globosum CBS 148.51] gi|88175684|gb|EAQ83152.1| CHGG_10970 [Chaetomium globosum CBS 148.51]
  misc_feature (73)..(784): NCBI GI: 156058187 Blast Desc: SS1G_04825 [Sclerotinia sclerotiorum 1980] gi|154702610|gb|EDO02349.1| SS1G_04825 [Sclerotinia sclerotiorum 1980]
  misc_feature (79)..(761): NCBI GI: 145229481 Blast Desc: An01g06250 [Aspergillus niger] gi|134055155|emb|CAK37100.1| protein product [Aspergillus niger]
  misc_feature (67)..(646): NCBI GI: 171680062 Blast Desc: protein product [Podospora anserina] gi|170939657|emb|CAP64884.1| protein product [Podospora anserina]
  misc_feature (69)..(735): NCBI GI: 70990204 Blast Desc: C2H2 finger domain protein [Aspergillus fumigatus Af293] gi|66847583|gb|EAL87913.1| C2H2 finger domain protein, [Aspergillus fumigatus Af293] gi|159130431|gb|EDP55544.1| C2H2
  misc_feature: Useful for introducing or modulating the production of volatile compounds
MDAPTGNASSGEDRFRGSGQSRGRGRGRGRGNSSVQGGANRPQRGRGRGQNTPSSPPSSTRQPLPGPRPESGQAVPQVQSSTAENNEDEDVEAEVCFICASPVVHQSVAPCNHRTCHICALRMRALYKNKECAHCRTAAPFVIFTDDAAKRYEDYSDSDVTSADDNIGIRYTNEDIVGDTVLLLRYNCPDTSCDFAGLGWPDLHRHVRSIHHKKMCDLCTRNKKVFTHEHELFADKELEKHMRHGDDQPGAVDQTGFRGHPLCGFCGSRFYDDDKLFEHCRSKHERCFLCDRQDPRQPHYYRDYNSLEDHFKKDHFLCIDRECLEKKFVVFGSEMDLKAHQLSEHGTSLSKDVRREARLVDLSGFDVRERYQQPRRGGGAGRGRDRDYEGGRNGRARGRDPNAEPLPPSSAQPLRRDELALQRQMAIHSSQSVSTRTFGGQLSSSASGPSGTSAQSTQPIASVHAGSNARPAPLVPSVEIEGLSLSDPNLTPEDRARLMRHSSVIERASNLLHNDKVKIDSFRAHISSFRHDKIPAAALVDALFSLFADTSSSALGTLVREVADLFEDKTKGERLRKAWNDWRAINEDYPTLPGLSGMHGATTSNSGWAAAAASSPAAVTAAPTQRLTTRVLKLKNSTQQSRRSSVEHPLTGFSNNHSSRSTAPPAAAFPSLPSSSGSTSRAAAGALWGGSATRTTPPQRPASGANREEAFPALPTAPKPTTTIFGYGTGSVRRDAGGSRNTGFSWGSANDDASGAAPVEDAEDSGSKGKKGNKGRKKVLVQWG

SEQ ID NO: 4921 - DNA, 3911 bp, Muscodor strobelii
  misc_feature: SGI EST ID NO. CUFF.12497.1
  misc_feature: Variant of the nucleotide sequence at SEQ ID NO 4919
gccggcgatgacacacaccaggtacaggtacagtacctattgcgcgctataggcccagtcgacaagcattacatacaaagctgtgtgctcagcattgtgctctgtttgtcaagacctttagctatgtagattgttgcttgaccaagcatctttacatcaacccacagtgtcagatagagcggccattccttccttcgttcctccctcccatccctcccatcgcaactctttgtcattacacatatcattcataataggtcggcaaactcttgtaacccgctcgacccacgccccacacgattcgcacgtccgcgcgccgatccatctctcatctacgacttcacacttatctggcccacaatcatcaaaccgtacgcagccttccccacgtcaaagaagcgacgggtgctcagcatggacgctcccacgggcaacgcttcttccggcgaggatcgtttccgtggatcaggccagtccagaggccgaggtcgaggtcgtggccgaggaaactccagcgttcaaggtggcgccaacaggccccaacgcggtaggggaagaggacagaacacgccatcctcgcctccatcatccacccgacagccattaccaggtccgcggccagaaagcggccaagcggtgccccaagtacaatcttcaaccgcggagaacaacgaggacgaggacgtggaggcagaggtctgcttcatatgcgccagccccgtcgtccaccagtcagttgcgccctgcaaccacagaacatgtcacatatgcgcattgcgcatgagagccctctacaaaaacaaggaatgtgcacactgtcgtactgctgccccattcgtcatatttaccgacgatgccgctaagcgatacgaagactactccgactcggatgtgactagcgctgacgataacattggtattcgctacacgaacgaggatatagtcggcgatactgtcttgctcttacgctacaactgccccgatacatcttgtgattttgctggcctgggctggcccgatctacatcgccatgttcgaagcatccaccacaagaagatgtgtgatttgtgcacgagaaacaagaaagtcttcacccatgaacacgaattatttgctgataaggagctggagaagcacatgaggcatggtgacgatcagcccggcgccgtagaccagaccgggttccgtggccatccgctgtgtgggttctgcggctcgagattctacgacgatgacaagttatttgaacactgccgcagcaaacacgagcgatgtttcctgtgcgaccgacaagatccgagacagccgcattactaccgagactacaattctcttgaggatcatttcaagaaagaccactttctgtgtattgatcgtgagtgcttggagaaaaagtttgtcgtgtttgggtctgagatggacttgaaggcgcaccagttgagcgaacatggaacgtctctctccaaggacgtaaggcgtgaggcgagacttgtggatctatctggctttgacgttcgcgagagatatcagcaaccaaggaggggtggaggtgccggtcgcggacgagacagggactacgagggaggcagaaacggacgcgccagaggtcgtgatcccaatgccgaacctttgccgccgagctcagcacagcccctccggagagatgagctagctttgcagcggcaaatggcgatccattcctcccagtccgtttcaactcgtacctttggcggtcaattgtcgtcaagcgcatccggcccctcggggacatctgcacaatcaacacaaccgatcgcgagcgtgcacgccggcagcaatgctcggcccgcaccccttgtcccttctgttgaaatcgaaggtcttagtttgtccgacccgaatctcacgccggaagaccgtgcccgtttaatgcgccactcttcagtcatcgagcgtgcatctaatctgttacataatgacaaagttaagatcgacagttttcgcgcacacatttcatcatttcgacacgacaaaatacctgctgcggctctagtggatgctctattctcgcttttcgccgacacatcttcttccgcactggggacactggtgcgcgaagtggctgaccttttcgaagacaagaccaagggagaaaggctgcgaaaagcttggaatgactggcgtgctatcaatgaagactatcccacgcttccgggattgagtgggatgcatggggcaacaacctcgaatagtggttgggcagccgctgcggcaagttcaccagcagcagtaacggctgcgcccactcaacgactcacaacacgagtgctcaagttaaaaaactccacgcagcaatcaaggcgatccagtgtagagcatccactgacagggttctctaataaccatagcagccgatctactgcgccaccagctgcggcatttccatcactgccatctagtagtggcagcacatctcgcgcggcggctggagctctctggggtggcagcgcaaccaggacaacccccccacagagacctgcttctggtgctaatcgcgaagaggctttccccgcgttaccaacagccccaaagcccaccacgacaatatttggttatggtactggcagtgtacggagagatgctggagggtctagaaatacaggattcagttggggttccgccaatgatgacgcgtctggcgcggctcccgttgaagatgccgaggatagtggaagcaaaggaaagaaaggcaacaagggacgaaaaaaagttctggtgcaatggggataaaaggagaaaactcgttgttacatcatctactcgcaaaaggccaaatactcttcccaagtatatatcgatcccgaaacatagccattcttccgcataattcgtgtatggccttccacttctcgacagctctcaaatttctcatctgattttctttgcggacggcaattgaaacagctgtatgggccatcatgcagtggtctgactcaatcatttatgagaacagtgaaaccctggttgcccaaatcaaagtgtcttatgagaagtgtgtactaattcgtcgtaatgttgatcgggttgtctttctgctctcacattgctcgtctctggacgctcgcatcaccagaagcgcgtggtagccaaggcatagccctatatgcacattttcagcagctgtcacgtccacacaattcaatcccgtagaacaacccccttgttccggatcgtatctgagccgtattagacttaaacgacattgtgtgaacgactaagactgggctacgaatagttcgggtgatattgattgtccttctacctgccttttgaaaggcactcgaagttgggaaacgagaatcttatattttcaatcctcatagcgaactaaaggtctctgattgtgatggccatgctagacatacgatttaggggacaaaaatccttcactctgaacaagtccaactcgggactgacgtactccgcaaattgggcctgacttcatttggactaatcgtcctcccaaatgggaagatcttcgagcacccttcgctgttcgacgcgtcagggtcggctcaagatcgtcgactctccgatgcgtcccggaataaggtcatccggcgcaagcttattaccatgtatcacagcagtgacgagcatcgtacctcaactgatcagcgtgagctgcagaagcaattcaattgcaggactcaatcgtactcctattcagagttacactgtccccctcacgctcaacatagacatatgttggtatatctgcatgtactattacataggaacttaggtgattccgtaggtgacctttggattacaatcaaccagttgtactttcatacttatttaagtttcgggaatacaccacgttgaaaagtgatatcggcgcctatcacactactcaccttgctgacatg

SEQ ID NO: 4922 - DNA, 831 bp, Muscodor strobelii
  misc_feature: SGI cDNA ID NO. 561346
  misc_feature: Reduced expression when VOC is produced
  misc_feature: Encodes the peptide sequence at SEQ ID NO 4923
atggcaacaccattgactcaggaagatcaaacccgctacaccagcatcatcgatggtatcctggcaacagccgacctcgagaccgtcacgcgcaagaagatccgaagcggtctggagactgcgctcggtggcaaagacttgagcgaacagaaggtcgcaatcaaagctttgatcgaagagcgatttgatgcaatctcatcggtcgcagcacccaccgagaccgatgatgcccgtcactcagccaatgggaacacgaacggccacgacggggctccgttggatgattcagatgccaatggcgacgagatcaaggtttccaccctgccacccaaaaaagtgtcccgcaaagagaagagcgtagataccgaagacgcggacgccaaattagctgccctccttcaagctgaggagaaccaacgtactcgcacaacacgcggaggaggtgccaagcctgccacgaagaagaagaagaagcccgcccccaaaaagaaaagcgaaaagagagggcggggagaagacaacagtgatgaagagggcagcgaagcatctagtcctaagaagcgaaaggctggcggaggatttcagaaacctttcaatctcagctaccctcttgctgaactctgtggggagtcccaactgtctcgtccccaggtcgtcaaaaaactgtgggaacatatcaaagacaaacaacttcaagaccccagcgacaagcgccagattcggtgcgatgagagcatgcatgccatcttcaaagtggccaaggtggacatgttccagatgaacaagctgattggccaacatctgtaccctgtgggcgaggaggaggcatag

SEQ ID NO: 4923 - protein, 276 aa, Muscodor strobelii
  misc_feature: SGI Peptide ID NO. 561346
  misc_feature (9)..(63): Pfam Id: PF08766 Pfam Desc: DEK C terminal domain
  misc_feature (194)..(269): Pfam Id: PF02201 Pfam Desc: SWIB/MDM2 domain
  misc_feature (1)..(273): NCBI GI: 46122793 Blast Desc: FG05774.1 [Gibberella zeae PH-1]
  misc_feature (1)..(274): NCBI GI: 261353960 Blast Desc: conserved [Verticillium albo-atrum VaMs.102]
  misc_feature (1)..(274): NCBI GI: 39967417 Blast Desc: MGG_01988 [Magnaporthe grisea 70-15] gi|145012853|gb|EDJ97494.1| MGG_01988 [Magnaporthe grisea 70-15]
  misc_feature (1)..(273): NCBI GI: 171680064 Blast Desc: protein product [Podospora anserina] gi|170939658|emb|CAP64885.1| protein product [Podospora anserina]
  misc_feature (4)..(275): NCBI GI: 256726623 Blast Desc: NECHADRAFT_33302 [Nectria haematococca mpVI 77-13-4]
  misc_feature (1)..(273): NCBI GI: 85092741 Blast Desc: NCU02204 [Neurospora crassa OR74A] gi|28920961|gb|EAA30287.1| conserved [Neurospora crassa OR74A]
  misc_feature (3)..(273): NCBI GI: 116200844 Blast Desc: CHGG_10967 [Chaetomium globosum CBS 148.51] gi|88175681|gb|EAQ83149.1| CHGG_10967 [Chaetomium globosum CBS 148.51]
  misc_feature (5)..(274): NCBI GI: 156058185 Blast Desc: SS1G_04824 [Sclerotinia sclerotiorum 1980] gi|154702609|gb|EDO02348.1| SS1G_04824 [Sclerotinia sclerotiorum 1980]
  misc_feature (5)..(274): NCBI GI: 154299113 Blast Desc: BC1G_11869 [Botryotinia fuckeliana B05.10] gi|150857572|gb|EDN32764.1| BC1G_11869 [Botryotinia fuckeliana B05.10]
  misc_feature (5)..(269): NCBI GI: 238843001 Blast Desc: SWIB/MDM2 domain-containing protein [Microsporum canis CBS 113480]
  misc_feature: Useful for introducing or modulating the production of volatile compounds
MATPLTQEDQTRYTSIIDGILATADLETVTRKKIRSGLETALGGKDLSEQKVAIKALIEERFDAISSVAAPTETDDARHSANGNTNGHDGAPLDDSDANGDEIKVSTLPPKKVSRKEKSVDTEDADAKLAALLQAEENQRTRTTRGGGAKPATKKKKKPAPKKKSEKRGRGEDNSDEEGSEASSPKKRKAGGGFQKPFNLSYPLAELCGESQLSRPQVVKKLWEHIKDKQLQDPSDKRQIRCDESMHAIFKVAKVDMFQMNKLIGQHLYPVGEEEA

SEQ ID NO: 4924 - DNA, 2548 bp, Muscodor strobelii
  misc_feature: SGI EST ID NO. CUFF.12549.1
  misc_feature: Variant of the nucleotide sequence at SEQ ID NO 4922
cctcctttagggtctgcaaggcgtgaatgtggatccggggctggcaacgttggagtgagttgaaggcgatttctgccaccgaattggatgcttccattcatcgtcatctgcctcgctctaaacccttcaacggcaggcacgccgcacccacgcacaacacaaagatcccttccctcagcaacacaccaccgcctaaccaccaaccacctgcaccaacgacgctgccgccaacaaatcgtacattcactcactacccgctcttcaaacctcacacaatcgactgctgttggcaacgccttctcgtgcacattgcaacctggaaggacgcaggctttcttctcccttgggcatttgcgcatcacatcattataacacacgggccgcaacctcacagattcttagtaagcatacctgacgtcctcatcctgactatacctcaacccacaccatccattcccacccatccctcggcgccagcctgacaagccgtccggggtaggcaaggcgccatacggctcgttgcaatatagtcatacagcctcatccagcctcatccagtctcatcccgtcggcagcgacaccttctgcgactggtgccctcgctctctcctgtcgtagtgtgcgcctgcaccgtagcactctttcgctactccattcttaatctcctctatctcccttcgtcgcgtgctagcaagttctacacatcttcaatatcagcctatcctaattccctgatgtatgtgttgggtcccactgcctaccgtctgcccgctcctacgtccatggcataaaatactgggagcactcttgcttttccgcgattgacacttttcctcagctaactgatcgcgtcatattagacaccaagaccacatagcaattcgccgcgccacctagtcttgtgatcgttcgattcgccattgcaaccccccccaacgtcgtcgcaccatatagtcagctgcgcataatacccatcgctatgcactgacaagccagctcagtccgattaacgccgcgcctctgagcatatcgcccgcaaccctcgatgaataatctatagacgccgcctatctcttgcgacaccatggcaacaccattgactcaggaagatcaaacccgctacaccagcatcatcgatggtatcctggcaacagccgacctcgagaccgtcacgcgcaagaagatccgaagcggtctggagactgcgctcggtggcaaagacttgagcgaacagaaggtaatcttgcagttctctctatctaatttagcacacgtatctccagctactgcgtcaactcaaaccctgcacccgaatgcctggtcgctgatgtacaatttcctactaggtcgcaatcaaagctttgatcgaagagcgatttgatgcaatctcatcggtcgcagcacccaccgagaccgatgatgcccgtcactcagccaatgggaacacgaacggccacgacggggctccgttggatgattcagatgccaatggcgacgagatcaaggtttccaccctgccacccaaaaaagtgtcccgcaaagagaagagcgtagataccgaagacgcggacgccaaattagctgccctccttcaagctgaggagaaccaacgtactcgcacaacacgcggaggaggtgccaagcctgccacgaagaagaagaagaagcccgcccccaaaaagaaaagcgaaaagagagggcggggagaagacaacagtgatgaagagggcagcgaagcatctagtcctaagaagcgaaaggctggcggaggatttcagaaacctttcaatctcagctaccctcttgctgaactctgtggggagtcccaactgtctcgtccccaggtcgtcaaaaaactgtgggaacatatcaaagacaaacaacttcaagaccccagcgacaagcgccagattcggtgcgatgagagcatgcatgccatcttcaaagtggccaaggtggacatgttccagatgaacaagctgattggccaacatctgtaccctgtgggcgaggaggaggcatagacacaatagtctggatgcgcggacgacttgccgtgagactagctctcaacactttctgtagtcacattggagatgaggagtttggtaacagtaggccggaaggccggccaaggttcttattggtgcctttctgtcttatacgaggtgaatgtgggaggggacatgcgaaggcggataattgagatgcatggtgctactttatcgacacgatggtcatggagtctcaacaagcatggcgttttcgggtaacattatggctttgcatcccaccttgctctaggcgtcaatacgcacgtgcaataaaaagagaatcattgtctcaattctgtcatttgattattgtgcagcgtcgagtatatggccacgcccatgatgaaacgcattcgaaataccaatgacaagtagataaggtatcttgatgggtaacgtctagtgagcccatgtgggtttgtgctcttccattacggcatcaccaattagctacaataaatcgaggtgggcgcaacccaaagccggagcgctat

SEQ ID NO: 4925 - DNA, 891 bp, Muscodor strobelii
  misc_feature: SGI cDNA ID NO. 561347
  misc_feature: Elevated expression when VOC is produced
  misc_feature: Encodes the peptide sequence at SEQ ID NO 4926
atggcaacaccatgttttcaccaagctgcaactacgctagaaggattcgaaacgctaaactgcagttattcagtgactcaggaagatcaaacccgctacaccagcatcatcgatggtatcctggcaacagccgacctcgagaccgtcacgcgcaagaagatccgaagcggtctggagactgcgctcggtggcaaagacttgagcgaacagaaggtcgcaatcaaagctttgatcgaagagcgatttgatgcaatctcatcggtcgcagcacccaccgagaccgatgatgcccgtcactcagccaatgggaacacgaacggccacgacggggctccgttggatgattcagatgccaatggcgacgagatcaaggtttccaccctgccacccaaaaaagtgtcccgcaaagagaagagcgtagataccgaagacgcggacgccaaattagctgccctccttcaagctgaggagaaccaacgtactcgcacaacacgcggaggaggtgccaagcctgccacgaagaagaagaagaagcccgcccccaaaaagaaaagcgaaaagagagggcggggagaagacaacagtgatgaagagggcagcgaagcatctagtcctaagaagcgaaaggctggcggaggatttcagaaacctttcaatctcagctaccctcttgctgaactctgtggggagtcccaactgtctcgtccccaggtcgtcaaaaaactgtgggaacatatcaaagacaaacaacttcaagaccccagcgacaagcgccagattcggtgcgatgagagcatgcatgccatcttcaaagtggccaaggtggacatgttccagatgaacaagctgattggccaacatctgtaccctgtgggcgaggaggaggcatag

SEQ ID NO: 4926 - protein, 296 aa, Muscodor strobelii
  misc_feature: SGI Peptide ID NO. 561347
  misc_feature (29)..(83): Pfam Id: PF08766 Pfam Desc: DEK C terminal domain
  misc_feature (214)..(289): Pfam Id: PF02201 Pfam Desc: SWIB/MDM2 domain
  misc_feature (25)..(293): NCBI GI: 46122793 Blast Desc: FG05774.1 [Gibberella zeae PH-1]
  misc_feature (25)..(295): NCBI GI: 256726623 Blast Desc: NECHADRAFT_33302 [Nectria haematococca mpVI 77-13-4]
  misc_feature (29)..(294): NCBI GI: 261353960 Blast Desc: conserved [Verticillium albo-atrum VaMs.102]
  misc_feature (22)..(294): NCBI GI: 39967417 Blast Desc: MGG_01988 [Magnaporthe grisea 70-15] gi|145012853|gb|EDJ97494.1| MGG_01988 [Magnaporthe grisea 70-15]
  misc_feature (22)..(293): NCBI GI: 171680064 Blast Desc: protein product [Podospora anserina] gi|170939658|emb|CAP64885.1| protein product [Podospora anserina]
  misc_feature (25)..(293): NCBI GI: 85092741 Blast Desc: NCU02204 [Neurospora crassa OR74A] gi|28920961|gb|EAA30287.1| conserved [Neurospora crassa OR74A]
  misc_feature (16)..(293): NCBI GI: 116200844 Blast Desc: CHGG_10967 [Chaetomium globosum CBS 148.51] gi|88175681|gb|EAQ83149.1| CHGG_10967 [Chaetomium globosum CBS 148.51]
  misc_feature (24)..(294): NCBI GI: 156058185 Blast Desc: SS1G_04824 [Sclerotinia sclerotiorum 1980] gi|154702609|gb|EDO02348.1| SS1G_04824 [Sclerotinia sclerotiorum 1980]
  misc_feature (24)..(294): NCBI GI: 154299113 Blast Desc: BC1G_11869 [Botryotinia fuckeliana B05.10] gi|150857572|gb|EDN32764.1| BC1G_11869 [Botryotinia fuckeliana B05.10]
  misc_feature (32)..(289): NCBI GI: 145229479 Blast Desc: An01g06240 [Aspergillus niger] gi|134055154|emb|CAK37099.1| protein product [Aspergillus niger]
  misc_feature: Useful for introducing or modulating the production of volatile compounds
MATPCFHQAATTLEGFETLNCSYSVTQEDQTRYTSIIDGILATADLETVTRKKIRSGLETALGGKDLSEQKVAIKALIEERFDAISSVAAPTETDDARHSANGNTNGHDGAPLDDSDANGDEIKVSTLPPKKVSRKEKSVDTEDADAKLAALLQAEENQRTRTTRGGGAKPATKKKKKPAPKKKSEKRGRGEDNSDEEGSEASSPKKRKAGGGFQKPFNLSYPLAELCGESQLSRPQVVKKLWEHIKDKQLQDPSDKRQIRCDESMHAIFKVAKVDMFQMNKLIGQHLYPVGEEEA

SEQ ID NO: 4927 - DNA, 2548 bp, Muscodor strobelii; identical to SEQ ID NO: 4924
  misc_feature: SGI EST ID NO. CUFF.12549.1
  misc_feature: Variant of the nucleotide sequence at SEQ ID NO 4925

SEQ ID NO: 4928 - DNA, 3591 bp, Muscodor strobelii
  misc_feature: SGI cDNA ID NO. 561348
  misc_feature: Reduced expression when VOC is produced
  misc_feature: Encodes the peptide sequence at SEQ ID NO 4929
atgccacagcggggttcgggtgagagacggcccaacgctgcacagcgcaggctgcttcttgccttcaccgtgttctgcctctcatggctcgtcgatgctcagcagcagcaacgacaagtactccagcagcatgcttctgcacagttgcacccctccatcaacctcgccaaagatgacgggattgcagtcgaggatcgaaatcgccccagcaccccacgctttcgacacgagtcacccttcgaaggcgaccgcatagcgggcaaactcgccgcgacgacgaacacacgaaacgccgcttcgcggagccgcagcagctccacggtggcacccaagaaacgctcccgtgatacacccatacccgacgatgcgagcgccctcgcaactttggctccggctcagtccgttcgagcaccaaactctccacagcacgtgcccagcctgcttgcaggcggtgggctgtcctcgctgcgatctgcgcggaacctggagaattgggaagtggaggattacattcttatggcgaccgtcgatggacatctttacgccgcggatcgtgcatccggcgacgagcgctggcatctcgaagtagaacagcccgtcgttgagaccattcattatcgacccaacgcaacattcgctgacgacgaaaagtcccggcatccactcgacgactatatttgggcaatcgagcctatccgcaacggcgccgtctatgtgtggacaccgtctcaatacggcagtggcctagtgaacacaggctacacaatgaaggagcttgttgatgattggggccattatgcctcctctgacccgcccgtcgtgtacaccggccacaaaaagaacactctcatcaccgtcgacgccgctaccgggagagtcttgaagtggtttgggcagacaggcgcccaagtggaccagagcgcgacgtgcttccctccaaatagtagatttgctgataccgacaacgaggagtgcagcaacagcggtactatcactttgagccggacagaatacacggtggatattcatcatcgcgaggatgggcgcgagatcgccaccctcaagtatgccgaatggggacctaacaacttcgacaacgatcttcaccagcagtaccgggccaccccggacaacctttactttaccagccagcacgacggcaaggtctatacccttgcagactccagcagcgtctcatctttaggtgtcgaattcccggtcccagtcgctcgtgtattcgacataggtagaccggaagatgcgccaactgggagtaatccggaacttgttctgcttccccagcccacgcccccttttggggataccgagtcaaccaatatccgacgccaaagcgcatttcttaatcaaacaaccacaggcaattggtatgtcatgtctggagcatcataccctctagtcatcaaaggacctagtgcgcaagttggtcggagcaaagcatgggacaatagaatgtggcttgacaatcaatatcctcctgcgggccttgtcggtgtccacaccattggcaatcagagaagcatgcctgattggccgttgagtgttcctccaagtctaccttcagaagcttttgactcggataaggtggatagttctccaggccaggaaactgttttaccagtggtccatgacggggagacggatctgcctccgattgtcgagacggtgttcacgctacctcgtcgagcggttgacagcacgatggatcttgtcactaacccggtatctttttttattgcgctctgcgcagcctattactactggcggatgaagccacgtacttcctctaaagagtacctcaacaccccggcatttgttcaacccacagatccttataaaggattacaggacgaggctcaatcaggagaagggagcggtgttcggagacaaaacacggacgaaaatgatgctccagctctcacaaatgatagatcagtacctgccggtgaaaccgcgaatgctacttccgaaccacagccgactgtcgtcgacgcattatcagagcagcggacaactgaaccagagtcaccggaggaaaagaagaaggcacgaagaggcagaagaggtggtgtgaagcatcgtaagggggccaagaagcagcgagacacgtcggaagctccgacgggaagcaggtcgcctgagccagatgatagcatcccggggctgcaaaacgtgggtgtgccgcccaagttggaacctaacgtgacgaccatgacaaatgaccccgaggatgtcagtgggcccatcgtcaagattggtggtatcgaggtcaaccaagattgccagcttggaatgggaagtaatggtacggtcgtcttcgaaggcaaattccacggccgtaaggtggcggtgaagcgtatgctgacgcaattttgggacattgctactcaagaaacgcagctcctcttggaaagtgaccatcatcagaatgtgattcgttattacgcaatgtcgaaaaacgacagctttctctacattgccctcgagctatgtcaagcgtccctgtctgatgtggtcgacaggcctcatctttttcctgagctagccaaagctggcgagctggatcttccgagagttctactgcaaatcgcccatggtctgagctttctacacgacttgcgcatcgtccaccgcgatctcaaaccccagaacattttagtgacgatgggccgtgacgacagaccccgactactcgtgtcagattttggcctttgcaaaaagcttgagggggggcaatcttcgtttggcgccacaactgcgcatgcggccggtacctccggatggcgggcaccggaactattactcgacgacgatgctcgtgatgggtcgacaatgtctttggccagtattcatagcgactcgagtcaactcgtgagccccgagctgatgcctaaccgacgagccactcgttcaatcgatatattttctctgggtcttgtcttcttctatgtgctcacgaaaggtttgcacccctttgactgtggagatagatatatgagagaggtcaacatccgaaagggccagttcaatctcaagccccttgagatgctcggcgatgtggcacatgaagccaaggcactcatcgagacgatgatccgtgccgacccgcagtctcgccctaccgctaaagacgtcatggctcaccctttcttctggtcagcgaaagagcagctatcgtttttgtgcgacgtctcagatcactttgagctggaacctcgggacccgatgtcacctgcattggcggagctggaatcccatgcccctcaggtctgtcgtggcgactttctcaaagtgctacccaaggaattcgtggaaagcctaggcaaacaacgcaaatacacgggatcgaggctgctcgacctgttgcgtgcgcttcgaaacaagcgattccattacggtgatctgaacgacaacctgaagaagttggttggcccagttcccgacggatatctcgggttttggacacgccggtttcccagcttgctgattgtgtgttgtaccgtgatatataaactgaacctcgaagagttggatacattccaggagtatttcaaagcaaggattcctgcataa

SEQ ID NO: 4929 - protein, 1196 aa, Muscodor strobelii
  misc_feature: SGI Peptide ID NO. 561348
  misc_feature (763)..(1057): Pfam Id: PF00069 Pfam Desc: Protein kinase domain
  misc_feature (1062)..(1192): Pfam Id: PF06479 Pfam Desc: Ribonuclease 2-5A
  misc_feature (763)..(914): Pfam Id: PF07714 Pfam Desc: Protein tyrosine kinase
  misc_feature (169)..(206): Pfam Id: PF01011 Pfam Desc: PQQ enzyme repeat
  misc_feature (1)..(1191): NCBI GI: 256727199 Blast Desc: NECHADRAFT_65991 [Nectria haematococca mpVI 77-13-4]
  misc_feature (1)..(1191): NCBI GI: 33087516 Blast Desc: serine/threonine kinase IREI [Hypocrea jecorina]
  misc_feature (1)..(1191): NCBI GI: 46122795 Blast Desc: FG05775.1 [Gibberella zeae PH-1]
  misc_feature (1)..(1191): NCBI GI: 261353958 Blast Desc: serine/threonine-protein kinase/endoribonuclease IRE1 [Verticillium albo-atrum VaMs.102]
  misc_feature (129)..(1190): NCBI GI: 116200852 Blast Desc: CHGG_10971 [Chaetomium globosum CBS 148.51] gi|88175685|gb|EAQ83153.1| CHGG_10971 [Chaetomium globosum CBS 148.51]
  misc_feature (15)..(1190): NCBI GI: 145604959 Blast Desc: MGG_01998 [Magnaporthe grisea 70-15] gi|145012865|gb|EDJ97506.1| MGG_01998 [Magnaporthe grisea 70-15]
  misc_feature (129)..(1191): NCBI GI: 85092737 Blast Desc: NCU02202 [Neurospora crassa OR74A] gi|28920959|gb|EAA30285.1| NCU02202 [Neurospora crassa OR74A]
  misc_feature (13)..(1190): NCBI GI: 156058183 Blast Desc: SS1G_04823 [Sclerotinia sclerotiorum 1980] gi|154702608|gb|EDO02347.1| SS1G_04823 [Sclerotinia sclerotiorum 1980]
  misc_feature (75)..(1194): NCBI GI: 171680060 Blast Desc: protein product [Podospora anserina] gi|170939656|emb|CAP64883.1| protein product [Podospora anserina]
  misc_feature (13)..(1191): NCBI GI: 154299111 Blast Desc: serine/threonine-protein kinase [Botryotinia fuckeliana B05.10] gi|150857571|gb|EDN32763.1| serine/threonine-protein kinase [Botryotinia fuckeliana B05.10]
  misc_feature: Useful for introducing or modulating the production of volatile compounds
MPQRGSGERRPNAAQRRLLLAFTVFCLSWLVDAQQQQRQVLQQHASAQLHPSINLAKDDGIAVEDRNRPSTPRFRHESPFEGDRIAGKLAATTNTRNAASRSRSSSTVAPKKRSRDTPIPDDASALATLAPAQSVRAPNSPQHVPSLLAGGGLSSLRSARNLENWEVEDYILMATVDGHLYAADRASGDERWHLEVEQPVVETIHYRPNATFADDEKSRHPLDDYIWAIEPIRNGAVYVWTPSQYGSGLVNTGYTMKELVDDWGHYASSDPPVVYTGHKKNTLITVDAATGRVLKWFGQTGAQVDQSATCFPPNSRFADTDNEECSNSGTITLSRTEYTVDIHHREDGREIATLKYAEWGPNNFDNDLHQQYRATPDNLYFTSQHDGKVYTLADSSSVSSLGVEFPVPVARVFDIGRPEDAPTGSNPELVLLPQPTPPFGDTESTNIRRQSAFLNQTTTGNWYVMSGASYPLVIKGPSAQVGRSKAWDNRMWLDNQYPPAGLVGVHTIGNQRSMPDWPLSVPPSLPSEAFDSDKVDSSPGQETVLPVVHDGETDLPPIVETVFTLPRRAVDSTMDLVTNPVSFFIALCAAYYYWRMKPRTSSKEYLNTPAFVQPTDPYKGLQDEAQSGEGSGVRRQNTDENDAPALTNDRSVPAGETANATSEPQPTVVDALSEQRTTEPESPEEKKKARRGRRGGVKHRKGAKKQRDTSEAPTGSRSPEPDDSIPGLQNVGVPPKLEPNVTTMTNDPEDVSGPIVKIGGIEVNQDCQLGMGSNGTVVFEGKFHGRKVAVKRMLTQFWDIATQETQLLLESDHHQNVIRYYAMSKNDSFLYIALELCQASLSDVVDRPHLFPELAKAGELDLPRVLLQIAHGLSFLHDLRIVHRDLKPQNILVTMGRDDRPRLLVSDFGLCKKLEGGQSSFGATTAHAAGTSGWRAPELLLDDDARDGSTMSLASIHSDSSQLVSPELMPNRRATRSIDIFSLGLVFFYVLTKGLHPFDCGDRYMREVNIRKGQFNLKPLEMLGDVAHEAKALIETMIRADPQSRPTAKDVMAHPFFWSAKEQLSFLCDVSDHFELEPRDPMSPALAELESHAPQVCRGDFLKVLPKEFVESLGKQRKYTGSRLLDLLRALRNKRFHYGDLNDNLKKLVGPVPDGYLGFWTRRFPSLLIVCCTVIYKLNLEELDTFQEYFKARIPA

SEQ ID NO: 4930 - DNA, 4901 bp, Muscodor strobelii
  misc_feature: SGI EST ID NO. CUFF.13102.0
  misc_feature: Variant of the nucleotide sequence at SEQ ID NO 4928
cgggtatctatctcactgcctagcccccttcgcccccaaagcgccgggcaatatttctaatccatccaaagtggtgcgcccatggcatcacgtattcctgatcacccccattacaaactccagcgttcaccagagtcgcagtcgtccgtccatcccgtcttcaatagccctatttccatcgtctctatctccatctccatcttcatctgtgactcgtagacaataagcctgttgctttttgaatttcgatctagccctcgctcatttcgttgcctgcccgcaacactatccgccgttattgtccgccttttactcttcgcacaattccggcgtaaccgaccgcgatacatttgataccgccatcccgcagctagacttcaatagtggtccgcttgtcatacttggcgggtgacataatactatccatcgcgattcgtatttcgccatcgatcctcggcggggtgaagtgttgaatcgaaccagaaaactgcatactgtgtgccacgtctgtcagcaaaatcgagacactactatagtaacagaggttcggctccatcgctgcgcaactcgctcgtgacaccgtttgcttttgtacgttgcagtctgatatcgagcagtatatttgtttgccaggctctctccgctggacgactgtcatacgaagattggcttaagaccgtggccgaaacgtagaccgcgccgaccagcctctcgaggaaaacctgctcacccagcgctgtgcggcctctgatccaatctgccgagcaattcgcaaccgtacgactgggacaatatggtcgctacccgtctatcgtcataaacgtctccataccgactgttcagcgaggcgctgactcccgcatcatgccacagcggggttcgggtgagagacggcccaacgctgcacagcgcaggctgcttcttgccttcaccgtgttctgcctctcatggctcgtcgatgctcagcagcagcaacgacaagtactccagcagcatgcttctgcacagttgcacccctccatcaacctcgccaaagatgacgggattgcagtcgaggatcgaaatcgccccagcaccccacgctttcgacacgagtcacccttcgaaggcgaccgcatagcgggcaaactcgccgcgacgacgaacacacgaaacgccgcttcgcggagccgcagcagctccacggtggcacccaagaaacgctcccgtgatacacccatacccgacgatgcgagcgccctcgcaactttggctccggctcagtccgttcgagcaccaaactctccacagcacgtgcccagcctgcttgcaggcggtgggctgtcctcgctgcgatctgcgcggaacctggagaattgggaagtggaggattacattcttatggcgaccgtcgatggacatctttacgccgcggatcgtgcatccggcgacgagcgctggcatctcgaagtagaacagcccgtcgttgagaccattcattatcgacccaacgcaacattcgctgacgacgaaaagtcccggcatccactcgacgactatatttgggcaatcgagcctatccgcaacggcgccgtctatgtgtggacaccgtctcaatacggcagtggcctagtgaacacaggctacacaatgaaggagcttgttgatgattggggccattatgcctcctctgacccgcccgtcgtgtacaccggccacaaaaagaacactctcatcaccgtcgacgccgctaccgggagagtcttgaagtggtttgggcagacaggcgcccaagtggaccagagcgcgacgtgcttccctccaaatagtagatttgctgataccgacaacgaggagtgcagcaacagcggtactatcactttgagccggacagaatacacggtggatattcatcatcgcgaggatgggcgcgagatcgccaccctcaagtatgccgaatggggacctaacaacttcgacaacgatcttcaccagcagtaccgggccaccccggacaacctttactttaccagccagcacgacggcaaggtctatacccttgcagactccagcagcgtctcatctttaggtgtcgaattcccggtcccagtcgctcgtgtattcgacataggtagaccggaagatgcgccaactgggagtaatccggaacttgttctgcttccccagcccacgcccccttttggggataccgagtcaaccaatatccgacgccaaagcgcatttcttaatcaaacaaccacaggcaattggtatgtcatgtctggagcatcataccctctagtcatcaaaggacctagtgcgcaagttggtcggagcaaagcatgggacaatagaatgtggcttgacaatcaatatcctcctgcgggccttgtcggtgtccacaccattggcaatcagagaagcatgcctgattggccgttgagtgttcctccaagtctaccttcagaagcttttgactcggataaggtggatagttctccaggccaggaaactgttttaccagtggtccatgacggggagacggatctgcctccgattgtcgagacggtgttcacgctacctcgtcgagcggttgacagcacgatggatcttgtcactaacccggtatctttttttattgcgctctgcgcagcctattactactggcggatgaagccacgtacttcctctaaagagtacctcaacaccccggcatttgttcaacccacagatccttataaaggattacaggacgaggctcaatcaggagaagggagcggtgttcggagacaaaacacggacgaaaatgatgctccagctctcacaaatgatagatcagtacctgccggtgaaaccgcgaatgctacttccgaaccacagccgactgtcgtcgacgcattatcagagcagcggacaactgaaccagagtcaccggaggaaaagaagaaggcacgaagaggcagaagaggtggtgtgaagcatcgtaagggggccaagaagcagcgagacacgtcggaagctccgacgggaagcaggtcgcctgagccagatgatagcatcccggggctgcaaaacgtgggtgtgccgcccaagttggaacctaacgtgacgaccatgacaaatgaccccgaggatgtcagtgggcccatcgtcaagattggtggtatcgaggtcaaccaagattgccagcttggaatgggaagtaatggtacggtcgtcttcgaaggcaaattccacggccgtaaggtggcggtgaagcgtatgctgacgcaattttgggacattgctactcaagaaacgcagctcctcttggaaagtgaccatcatcagaatgtgattcgttattacgcaatgtcgaaaaacgacagctttctctacattgccctcgagctatgtcaagcgtccctgtctgatgtggtcgacaggcctcatctttttcctgagctagccaaagctggcgagctggatcttccgagagttctactgcaaatcgcccatggtctgagctttctacacgacttgcgcatcgtccaccgcgatctcaaaccccagaacattttagtgacgatgggccgtgacgacagaccccgactactcgtgtcagattttggcctttgcaaaaagcttgagggggggcaatcttcgtttggcgccacaactgcgcatgcggccggtacctccggatggcgggcaccggaactattactcgacgacgatgctcgtgatgggtcgacaatgtctttggccagtattcatagcgactcgagtcaactcgtgagccccgagctgatgcctaaccgacgagccactcgttcaatcgatatattttctctgggtcttgtcttcttctatgtgctcacgaaaggtttgcacccctttgactgtggagatagatatatgagagaggtcaacatccgaaagggccagttcaatctcaagccccttgagatgctcggcgatgtggcacatgaagccaaggcactcatcgagacgatgatccgtgccgacccgcagtctcgccctaccgctaaagacgtcatggctcaccctttcttctggtcagcgaaagagcagctatcgtttttgtgcgacgtctcagatcactttgagctggaacctcgggacccgatgtcacctgcattggcggagctggaatcccatgcccctcaggtctgtcgtggcgactttctcaaagtgctacccaaggaattcgtggaaagcctaggcaaacaacgcaaatacacgggatcgaggctgctcgacctgttgcgtgcgcttcgaaacaagcgattccattacggtgatctgaacgacaacctgaagaagttggttggcccagttcccgacggatatctcgggttttggacacgccggtttcccagcttgctgattgtgtgttgtaccgtgatatataaactgaacctcgaagagttggatacattccaggagtatttcaaagcaaggattcctgcataagggaggtgttgttcagtcttgtcttattgagcaatatccgcgtaattaagacgtatgtgtaggtagctagcaaaatttcaatctagagcgatttatcttggtttaacctgttgttttgtaacattggcagcttcaacggctgactggcaacgtctggtgcgatgctgtggcttagcttcggccctataaacttcggttccaaacattgagcatgcccggaggcgtggaaattgcactgcttccatcgcgacatcgccaatatgtggttggaacgacttgactagcaagcaacctggtgatttcggtgcggatataagacatactgaattaacgtactacgacaaggaactagtgtgtgtgaacaacgacctagcgtacttgaacaatgtgcacttttcgagttgtaggttgagaggtagttgccttgtcggcggcaccaccacttg

SEQ ID NO: 4931 - DNA, 1767 bp, Muscodor strobelii
  misc_feature: SGI cDNA ID NO. 561349
  misc_feature: Encodes the peptide sequence at SEQ ID NO 4932
atgacaccgtccaggcgaaagacgccgagccgtacgagtgctcgccatttcgaatctctacttgcaggatcatctccgattgacgctatttgcgttgactccgaggacggcaatgatgaccatcaaatgctgacaccaacgccagcccgacgaaagggccagcaaaaggcaagcaatatcgcgtcatctcgcacggggactcgacttttcagggataagccatgtctcacagttgcgcgtactcctccaatttcaggtcaagggtgcgtatcccgctatgatgccaacgcgcaccgcggcaaagcgcatagcgccgcgtctctcatgctcgcacccggcgcgaatgctatgtatgactctacggctcacttggcggccgtgtcgctttccatgccgcaaagaatggaatacaatgacgatgtcatatttgtgaaagagtcacccagagcaaactcgcactcgatggggcaaatggaatctgcttcgccattgcatgtcgcagcatcaatccagtctaaatcacatcggacaatggcaaagttgcctctctcaatccacaatcacaacgagcctcattcaccacttacgtccagccataaactcgcccaccaagctaggaaggataggacccatcagatgcagtcttcgcctccaagttcgggtgtcaaatcatatatctcacttccctctctaacaacatccccgtccgtgaaatcgcccccttcagctactctcaaaacgattccttccacgccggctccgaagacacactctcgctgcactttcaagacgcccggttcgcgtggtagccgtcgagatccatacgagattccttcggacagcgactcggatgatagccagtcgcaacgtgctgcgctgcccaggagcttcgctaagatcagaagcgccacgtcgggaacgagtgaaaatgcgaaaccgtccacggcggaggacgcagaagaggaggaaaacatgagaagtgttctaaaggatgctcatacatggctgaaagtcagcccattactgccccctcgtcaactgccggcttctgcaccgcaatcgggaaggttttcgataagaaactgcccttcgcctgatgctagccctctgttaagaccttcccgacctgccaatcctcgcacttctgttccgtccacgtcgcctattgtgaaattgaaacaggagaagcgatacgatgacgaacaagtagaagatgatgcgacattggattatactgagtctcttgccactcgccgtcgtccgcgtattatatcacaagccacgaccgctaaagcacgacaccagaagcgcatcgatcagtacttcacaactgatgtttccgagcccaatgccacggtcaaaacctccagcgctgatgcgcttgcgcacaaaagcactgcaaaacagactcgtgacagatgtgacagcatcgacaccagagcccctgctccagtagggccagtgaaaccgaccagccagacgtcccagcgtccaagacctgcggagcatgaagctgcagcatcagttgcaggttcttcacccggccctcccgtattacagcggtctgatacagccgtcagtccacccaggaagcgtccacgagatgacgacgagattgacttctccatcgttgatgatccagttgcacgcatggccaagagactcggtatagatgtagacagccttgccggaactcagaagaagaagcaccgcaggaaaggtaggagatttaggaagcccaagtcgtgggatggtcttccgatgtaa

SEQ ID NO: 4932 - protein, 588 aa, Muscodor strobelii
  misc_feature: SGI Peptide ID NO. 561349
MTPSRRKTPSRTSARHFESLLAGSSPIDAICVDSEDGNDDHQMLTPTPARRKGQQKASNIASSRTGTRLFRDKPCLTVARTPPISGQGCVSRYDANAHRGKAHSAASLMLAPGANAMYDSTAHLAAVSLSMPQRMEYNDDVIFVKESPRANSHSMGQMESASPLHVAASIQSKSHRTMAKLPLSIHNHNEPHSPLTSSHKLAHQARKDRTHQMQSSPPSSGVKSYISLPSLTTSPSVKSPPSATLKTIPSTPAPKTHSRCTFKTPGSRGSRRDPYEIPSDSDSDDSQSQRAALPRSFAKIRSATSGTSENAKPSTAEDAEEEENMRSVLKDAHTWLKVSPLLPPRQLPASAPQSGRFSIRNCPSPDASPLLRPSRPANPRTSVPSTSPIVKLKQEKRYDDEQVEDDATLDYTESLATRRRPRIISQATTAKARHQKRIDQYFTTDVSEPNATVKTSSADALAHKSTAKQTRDRCDSIDTRAPAPVGPVKPTSQTSQRPRPAEHEAAASVAGSSPGPPVLQRSDTAVSPPRKRPRDDDEIDFSIVDDPVARMAKRLGIDVDSLAGTQKKKHRRKGRRFRKPKSWDGLPM

SEQ ID NO: 4933 - DNA, 1443 bp, Muscodor strobelii
  misc_feature: SGI cDNA ID NO. 561350
  misc_feature: Encodes the peptide sequence at SEQ ID NO 4934
atggcatcgaccaaggccagcggtgttgcgcggcagagtcccgctctgcgccgcaccgtcaccaccgacaccgacgtctcgtccccgtcgacggccgtcgcctctcctgtcgactctccccggccctcgccctcgacgacctcgctctcctcgctctcctctgtcgatgtcgccaacgacaagccctcgtacggcacgctcctcgacacgtacggcaacgagttcacccctcccgactacaccatcaaggagctccgcgatgccatccccaagcactgcttcgagcgctccgccgccaaggggctctactatgtcttccgcgacatcgccagcctggccaccaccttctacctcttccacacctacgtcacgcctgagaacgtgcccaacacggccgcccgcgtagtcctctggacgctgtacactgtcgtccagggcctcttcggcaccggcatgtgggttctggcccacgagtgcggccaccagtccttcagcacgtccaaggtgctcaacgacaccgtcggctggatcctgcactcgtcgctgctcgtcccctacttcagctggaagatctcccacggcaagcaccacaaggccaccggccacatggagcgcgacatggtcttcgtgcccaagacgcgccaggagagagccagccgcatcggcagactcgcccacgagctgtccgaggtcggcgaggagacgcccatcttcaccctgctgcacctgctcggccagcagctcatcggctggcccaactacctcataaccaacgtcaccggccacaactgccacgagcgccagctcgagggccgcggcaagggcaaggcgaacggctggttcggcggcgtcaaccacttcaaccccagcagccccctctacgaggccaaggacgccaagctcatcctgctcagcgacatgggcattgccatcaccgccagcgccctgacatatctcggcaacacctacggctggtcgaatctcctggtctggtacttcatcccgtatctctgggtcaaccactggctcgtcgccatcaccttcctgcagcacactgaccccacgctgccgcactacacccccgaggcttggaactacgtccgtggcgcggctgcgaccatcgaccgcgagtttggcttcgtcgggcgccagctgctgcacggaatcatcgagacgcacgtcctccaccactatgtctcgaccatccctttctacaatgctgacgaggcctccgaggccatcaagaaagtcatgggccgccactaccgttccgataccgagggcggctcccttggatttttgcgcgccatgtggcacagtgcgagatggtgccaatgggtcgagcctagcgaaggcgccgagggcgagggcaagggtgttctgttctttcgcaacaccaacggcctgggcaccaagcccttgaagacgagcccgacagcgtaa

SEQ ID NO: 4934 - protein, 480 aa, Muscodor strobelii
  misc_feature: SGI Peptide ID NO. 561350
  misc_feature (141)..(418): Pfam Id: PF00487 Pfam Desc: Fatty acid desaturase
  misc_feature (280)..(418): Pfam Id: PF00487 Pfam Desc: Fatty acid desaturase
  misc_feature (141)..(224): Pfam Id: PF00487 Pfam Desc: Fatty acid desaturase
  misc_feature (1)..(479): NCBI GI: 85092751 Blast Desc: NCU02209 [Neurospora crassa OR74A] gi|28920966|gb|EAA30292.1| NCU02209 [Neurospora crassa OR74A]
  misc_feature (1)..(477): NCBI GI: 169597371 Blast Desc: SNOG_01471 [Phaeosphaeria nodorum SN15] gi|111070000|gb|EAT91120.1| SNOG_01471 [Phaeosphaeria nodorum SN15]
  misc_feature (1)..(477): NCBI GI: 145604939 Blast Desc: MGG_01985 [Magnaporthe grisea 70-15] gi|145012848|gb|EDJ97489.1| MGG_01985 [Magnaporthe grisea 70-15]
  misc_feature (36)..(480): NCBI GI: 238838685 Blast Desc: Delta(12) fatty acid desaturase [Microsporum canis CBS 113480]
  misc_feature (65)..(478): NCBI GI: 240109766 Blast Desc: delta(12) fatty acid desaturase, [Coccidioides posadasii C735 delta SOWgp]
  misc_feature (67)..(478): NCBI GI: 119184023 Blast Desc: CIMG_06871 [Coccidioides immitis RS]
  misc_feature (1)..(475): NCBI GI: 159906226 Blast Desc: delta-12 desaturase [Aureobasidium pullulans]
  misc_feature (6)..(474): NCBI GI: 151935301 Blast Desc: delta12 fatty acid desaturase [Claviceps purpurea]
  misc_feature (15)..(475): NCBI GI: 212532281 Blast Desc: oleate delta-12 desaturase [Penicillium marneffei ATCC 18224] gi|210071661|gb|EEA25750.1| oleate delta-12 desaturase [Penicillium marneffei ATCC 18224]
  misc_feature (67)..(475): NCBI GI: 70995736 Blast Desc: oleate delta-12 desaturase [Aspergillus fumigatus Af293] gi|66850258|gb|EAL90585.1| oleate delta-12 desaturase [Aspergillus fumigatus Af293] gi|159131376|gb|EDP56489.1| oleate
  misc_feature (78)..(457): SWISSPROT Homolog: EC 1.14.99.33 Delta(12)-fatty acid dehydrogenase
MASTKASGVARQSPALRRTVTTDTDVSSPSTAVASPVDSPRPSPSTTSLSSLSSVDVANDKPSYGTLLDTYGNEFTPPDYTIKELRDAIPKHCFERSAAKGLYYVFRDIASLATTFYLFHTYVTPENVPNTAARVVLWTLYTVVQGLFGTGMWVLAHECGHQSFSTSKVLNDTVGWILHSSLLVPYFSWKISHGKHHKATGHMERDMVFVPKTRQERASRIGRLAHELSEVGEETPIFTLLHLLGQQLIGWPNYLITNVTGHNCHERQLEGRGKGKANGWFGGVNHFNPSSPLYEAKDAKLILLSDMGIAITASALTYLGNTYGWSNLLVWYFIPYLWVNHWLVAITFLQHTDPTLPHYTPEAWNYVRGAAATIDREFGFVGRQLLHGIIETHVLHHYVSTIPFYNADEASEAIKKVMGRHYRSDTEGGSLGFLRAMWHSARWCQWVEPSEGAEGEGKGVLFFRNTNGLGTKPLKTSPTA

SEQ ID NO: 4935 - DNA, 4065 bp, Muscodor strobelii
  misc_feature: SGI EST ID NO. CUFF.13109.0
  misc_feature: Variant of the nucleotide sequence at SEQ ID NO 4933
tgacaggatgaatgaagatagcaggctcgagggcaccggggtttggggaggacgtaagaaagacatcgaatcttttccatgtcgaagaagagggctgttccagctgccagagcccaggttcatgatcggtcgtccccacggtggaactgtgtgaggcggctagtaaccccaccgctcacctcctcgggctgccctgtacgagtactcaagccaggccgtactagatcaagttgagtctcactggtcgtaacatgtcaagacacctagatgccgagagtgcaacgagggacaatcccgactctcggcttgcaaggcgagatgagtggtggccaagaccagactgcctgcattgcctgcctcgcctggatgtctcgttcggaatccccacgccccacgagacggagaggcagagatttgttcatgcagtgccacttgacccgatcctgtttgttgcagtacttacatgtaaagtagaggagttgtagtggatcggtcgagaaataagagacgtccctcgcctcacttctccttccgggactttttctctctttaatttaaagttttcgtgggaacgcctcctacgacagatccatccaaaattactctctgtagtctctttaactcgcaactcctccgagagcatatatcttttcctcgagtctcgcaaggaggatagattgcgacatctcctataacctatttcgtctcatataacctgcagcacgaagccgcatattgtagaaaacaagcatatcgtcgctgctcctctcctacctatattcctcccggttgcccacgatggcatcgaccaaggccagcggtgttgcgcggcagagtcccgctctgcgccgcaccgtcaccaccgacaccgacgtctcgtccccgtcgacggccgtcgcctctcctgtcgactctccccggccctcgccctcgacgacctcgctctcctcgctctcctctgtcgatgtcgccaacgacaagccctcgtacggcacgctcctcgacacgtacggcaacgagttcacccctcccgactacaccatcaaggagctccgcgatgccatccccaagcactgcttcgagcgctccgccgccaaggggctctactatgtcttccgcgacatcgccagcctggccaccaccttctacctcttccacacctacgtcacgcctgagaacgtgcccaacacggccgcccgcgtagtcctctggacgctgtacactgtcgtccagggcctcttcggcaccggcatgtgggttctggcccacgagtgcggccaccagtccttcagcacgtccaaggtgctcaacgacaccgtcggctggatcctgcactcgtcgctgctcgtcccctacttcagctggaagatctcccacggcaagcaccacaaggccaccggccacatggagcgcgacatggtcttcgtgcccaagacgcgccaggagagagccagccgcatcggcagactcgcccacgagctgtccgaggtcggcgaggagacgcccatcttcaccctgctgcacctgctcggccagcagctcatcggctggcccaactacctcataaccaacgtcaccggccacaactgccacgagcgccagctcgagggccgcggcaagggcaaggcgaacggctggttcggcggcgtcaaccacttcaaccccagcagccccctctacgaggccaaggacgccaagctcatcctgctcagcgacatgggcattgccatcaccgccagcgccctgacatatctcggcaacacctacggctggtcgaatctcctggtctggtacttcatcccgtatctctgggtcaaccactggctcgtcgccatcaccttcctgcagcacactgaccccacgctgccgcactacacccccgaggcttggaactacgtccgtggcgcggctgcgaccatcgaccgcgagtttggcttcgtcgggcgccagctgctgcacggaatcatcgagacgcacgtcctccaccactatgtctcgaccatccctttctacaatgctgacgaggcctccgaggccatcaagaaagtcatgggccgccactaccgttccgataccgagggcggctcccttggatttttgcgcgccatgtggcacagtgcgagatggtgccaatgggtcgagcctagcgaaggcgccgagggcgagggcaagggtgttctgttctttcgcaacaccaacggcctgggcaccaagcccttgaagacgagcccgacagcgtaacaagcttcgcagcggctatggtaacgaatagtaatgacatgaggacgaaggcattggattgctaactcgaattattccttttttttctgggtaatgtggtgtatgctcggtgtccaatcaaagcgggcgaggcagctcaggccacccacaccatcgatggctgtctgcagggtgacatatagcacgagcagcacactagaggcttgtttcaacgagtagtacattttcatgttcaaaagcgatgaagcgcgaagttgcaggacgactaggcattatttttgcgcatgctagagatattacttagacgatagagaccgaaaagcacaatagacacacaataatcttccagcagcctccaaagccaagaatcttgattttcgtcgcatatccctaaatttggcatctttgtcctcaatccattcggtcacgatcagatagagtccggcgcaaatcctcgcccgacgaacttattttccttgcatcctcgcgttttccaacagcaattgaaaaacaccaattcttgacatctcgccttacatcggaagaccatcccacgacttgggcttcctaaatctcctacctttcctgcggtgcttcttcttctgagttccggcaaggctgtctacatctataccgagtctcttggccatgcgtgcaactggatcatcaacgatggagaagtcaatctcgtcgtcatctcgtggacgcttcctgggtggactgacggctgtatcagaccgctgtaatacgggagggccgggtgaagaacctgcaactgatgctgcagcttcatgctccgcaggtcttggacgctgggacgtctggctggtcggtttcactggccctactggagcaggggctctggtgtcgatgctgtcacatctgtcacgagtctgttttgcagtgcttttgtgcgcaagcgcatcagcgctggaggttttgaccgtggcattgggctcggaaacatcagttgtgaagtactgatcgatgcgcttctggtgtcgtgctttagcggtcgtggcttgtgatataatacgcggacgacggcgagtggcaagagactcagtataatccaatgtcgcatcatcttctacttgttcgtcatcgtatcgcttctcctgtttcaatttcacaataggcgacgtggacggaacagaagtgcgaggattggcaggtcgggaaggtcttaacagagggctagcatcaggcgaagggcagtttcttatcgaaaaccttcccgattgcggtgcagaagccggcagttgacgagggggcagtaatgggctgactttcagccatgtatgagcatcctttagaacacttctcatgttttcctcctcttctgcgtcctccgccgtggacggtttcgcattttcactcgttcccgacgtggcgcttctgatcttagcgaagctcctgggcagcgcagcacgttgcgactggctatcatccgagtcgctgtccgaaggaatctcgtatggatctcgacggctaccacgcgaaccgggcgtcttgaaagtgcagcgagagtgtgtcttcggagccggcgtggaaggaatcgttttgagagtagctgaagggggcgatttcacggacggggatgttgttagagagggaagtgagatatatgatttgacacccgaacttggaggcgaagactgcatctgatgggtcctatccttcctagcttggtgggcgagtttatggctggacgtaagtggtgaatgaggctcgttgtgattgtggattgagagaggcaactttgccattgtccgatgtgatttagactggattgatgctgcgacatgcaatggcgaagcagat

SEQ ID NO: 4936 - DNA, 2094 bp, Muscodor strobelii
  misc_feature: SGI cDNA ID NO. 561351
  misc_feature: Reduced expression when VOC is produced
  misc_feature: Encodes the peptide sequence at SEQ ID NO 4937
atgtcctcttcaagatcgtccaaggcctcttctcttcactcattcacctcggacattggcgatgacgccacggctggcatcggccattttgaggacatcggcctggaagacgacggcatcacctccgacacatcgcaataccctacttctcacaacaagtcgcgaccgaatccctacagtccgtcattcgccgccgatcttcgcgcagcctctaccagacacatcggccctcgcattcatccgcagccccgcgacctcgcccttcctcgactgcagcgccaaccgtcctctcctctagcgccgcagttccgggacacgagcactcagagcctcacactggacatcaaacgacaacgcccgccagtccatcgaaccctttctgcccgttccgcatcatcagtcagcgtgaaccgccgctaccgaagtcctagccccaatactctacctcgatccctcagcccgcgagacccgaatgtttcgttcccaccacgcagaagcagctggcagtctgggcgcgaggcgagatccactgccgatatagaaaaggagtgcgacgaagatgacgatgacgacatcccggatggcatttttctcgacaatgtaccgttatctccccgcccgccgagcgagcgatcggcgagtcgtcctgcctcggcctccacctcgcctgaacggagaccgaaagaccgggtgcgcagcgtgggcaacgggacccctcctgtagcggccgaccgagggtccctgaagtcgccaacatggaaatccgacaacgccagcgataccgcactcaagtcaggagcctcttctcccaccaaaggacgagccaaaagctggactgccgctatctcagggctgagtgccgaagccatggcgctcacggagaagctcgaggaacacgcggacgaactcgagaagcgtggcgagcagttcaagcgcgcacctgtgaagccccgtgtcaagtctgctctggcagagctgcccccaatccggaggtcgaacatcatgatcgatcccctgcccgtgtcgaaggagaaagaagctgttctctcccggacgcggccatcgtggcttccgcccaaaaacccagctgaagagaagaagcacctgaaggaatatcagaagatgatggcgaatagcatcgaggcagacaagaaaagagaagctgctcggcgtgagaaggagcaaagcaaagcaaatctgtcccgggtatgggaagaagacatactgaagaggtgggatgccgctatccaagaacaacgaacacgggacttatggtgggaaggcatagcgcctcgcagtcgtggcgaggtatgggttcgtgcgattgggaacagcctcgggctgacggagacctcgtaccaagctgcgttgtctcgcgcgtgcgaggtggaggagtgtgccaagaatggaaagctcacgccagaggacgaacgccgcctggcctggttcgctcagattcgaatagacgtcgagcagcgaacctgggttgatctcaagatattccaggctggtgcccccctccatcagcacgttgtcgatgtccttcgtgcgtatgccatgtatcgcagtgatattggctacgtctcgggatgtaacgccatcgccgcgcttctcctgctcaatattgacactcccgcatccgcctttatcgcacttgctaacgtgctcaatcgccctttaccattatcgttctactccaacgatccaggggctcgctcagcggtctcagagctggtgcacaagagactatctcggaaatctcaacaacttcacgagcacctcgaaaagccatcagtgggctctaattttgacctgcgcctgaacgatatcttcacaaccatgtttacccgacatctgaaccttgacgactgcaccagactctgggatgtctatgtattcgaaggagacaagatattgctcgtggccactgcggcattgttattggagaaagaaatggcgctcctcagtgccgaaagcgaagcggaagtgagagacatcattgaagctccgccacagcttgcgttgcaggataacgatggcgtcttcatttcacgcgtgaaagaagtagctggatttggcgtaccaacgaaatag

SEQ ID NO: 4937 - protein, 697 aa, Muscodor strobelii
  misc_feature: SGI Peptide ID NO. 561351
  misc_feature (427)..(657): Pfam Id: PF00566 Pfam Desc: TBC domain
  misc_feature (19)..(667): NCBI GI: 116200802 Blast Desc: CHGG_10946 [Chaetomium globosum CBS 148.51] gi|88175660|gb|EAQ83128.1| CHGG_10946 [Chaetomium globosum CBS 148.51]
  misc_feature (21)..(664): NCBI GI: 171680074 Blast Desc: protein product [Podospora anserina] gi|170939663|emb|CAP64890.1| protein product [Podospora anserina]
  misc_feature (15)..(667): NCBI GI: 46122805 Blast Desc: FG05780.1 [Gibberella zeae PH-1]
  misc_feature (21)..(667): NCBI GI: 256726627 Blast Desc: [Nectria haematococca mpVI 77-13-4]
  misc_feature (15)..(669): NCBI GI: 39967296 Blast Desc: MGG_01976 [Magnaporthe grisea 70-15] gi|145012839|gb|EDJ97480.1| MGG_01976 [Magnaporthe grisea 70-15]
  misc_feature (12)..(684): NCBI GI: 85092755 Blast Desc: NCU02211 [Neurospora crassa OR74A] gi|28920968|gb|EAA30294.1| conserved [Neurospora crassa OR74A]
  misc_feature (21)..(669): NCBI GI: 156036032 Blast Desc: SS1G_12702 [Sclerotinia sclerotiorum 1980] gi|154698110|gb|EDN97848.1| SS1G_12702 [Sclerotinia sclerotiorum 1980]
  misc_feature (8)..(671): NCBI GI: 261353952 Blast Desc: TBC1 domain family member 12 [Verticillium albo-atrum VaMs.102]
  misc_feature (21)..(656): NCBI GI: 240278375 Blast Desc: TBC1 domain family member 14 [Ajellomyces capsulatus H143]
  misc_feature (21)..(656): NCBI GI: 225556129 Blast Desc: TBC1 domain family member 14 [Ajellomyces capsulatus G186AR]
  misc_feature: Useful for introducing or modulating the production of volatile compounds
MSSSRSSKASSLHSFTSDIGDDATAGIGHFEDIGLEDDGITSDTSQYPTSHNKSRPNPYSPSFAADLRAASTRHIGPRIHPQPRDLALPRLQRQPSSPLAPQFRDTSTQSLTLDIKRQRPPVHRTLSARSASSVSVNRRYRSPSPNTLPRSLSPRDPNVSFPPRRSSWQSGREARSTADIEKECDEDDDDDIPDGIFLDNVPLSPRPPSERSASRPASASTSPERRPKDRVRSVGNGTPPVAADRGSLKSPTWKSDNASDTALKSGASSPTKGRAKSWTAAISGLSAEAMALTEKLEEHADELEKRGEQFKRAPVKPRVKSALAELPPIRRSNIMIDPLPVSKEKEAVLSRTRPSWLPPKNPAEEKKHLKEYQKMMANSIEADKKREAARREKEQSKANLSRVWEEDILKRWDAAIQEQRTRDLWWEGIAPRSRGEVWVRAIGNSLGLTETSYQAALSRACEVEECAKNGKLTPEDERRLAWFAQIRIDVEQRTWVDLKIFQAGAPLHQHVVDVLRAYAMYRSDIGYVSGCNAIAALLLLNIDTPASAFIALANVLNRPLPLSFYSNDPGARSAVSELVHKRLSRKSQQLHEHLEKPSVGSNFDLRLNDIFTTMFTRHLNLDDCTRLWDVYVFEGDKILLVATAALLLEKEMALLSAESEAEVRDIIEAPPQLALQDNDGVFISRVKEVAGFGVPTK

SEQ ID NO: 4938 - DNA, 4473 bp, Muscodor strobelii
  misc_feature: SGI EST ID NO. CUFF.12506.0
  misc_feature: Variant of the nucleotide sequence at SEQ ID NO 4936
tgcgttttcattaatccaggtcaggctgcagacaggaggcttggcaggcaccagcaggttcaaaatcaagaatcgtcgggagtttcgatcgatgaccgattcaaggatggagcctctacatcctgcccatgcatgctgtctttaaacatcaaagacgcctgttaacctcttgacttacagtcgctaccatccattcttgccgaccggagaccctcatagtctcgtcaaaatttctcttcttactctttcgcccgtcactgatgagacagctctcacgactgttgcatattgcaatcattacttagtactcctcctcttcattgccctgtatccacttgaccaggtgccttaatttgcttcgttcattcgtttatgctcaccgactgcatcgccttctctaacgcggcagtccgttcccattcccctgccagggttgaagcagtacgaaaagaaaatcgcaaggagaatcacagcgcactgttagcttcctccaccgaaatagcctgggttccgacggctcaatccatcgattgcttcagtagcgccgagggctgtgctacaccaacaccagcattactaacggcgccttgctgcgtggttcacgatatctccggccatcccgcagtgagcaatcccagagaggcgctcagcgagacgaaacgggtaggaatctgtagagaaacacacacagcttgtcagatcaacgccctgtgtcatcccgtcggctctgtctctcctcggccggggcattctccaagtattcttcacgccccgaaatcagtatcacgtttcatcccttgtttctcgacccctgtcggcgggcgcatctacgcgcccctgaccgtgcaagaccgagagaccctttccaattcggccgccgtccatttctaataatacactgctagctcgatagcatttcctcacggccgatcttcaattttcactagttacaagtgaacacacctgtgcctcgagacttttcgcactacttgcttcagttgcatgggaacgtgaagttcgaggccctgcgcaacagagacgggtgtttccaagataaacagcgcaggagacgatgatacgcagtggaaccttcgagtccttcgagtcgccgatctccaggcccggatcccctcccggaatgtcctcttcaagatcgtccaaggcctcttctcttcactcattcacctcggacattggcgatgacgccacggctggcatcggccattttgaggacatcggcctggaagacgacggcatcacctccgacacatcgcaataccctacttctcacaacaagtcgcgaccgaatccctacagtccgtcattcgccgccgatcttcgcgcagcctctaccagacacatcggccctcgcattcatccgcagccccgcgacctcgcccttcctcgactgcagcgccaaccgtcctctcctctagcgccgcagttccgggacacgagcactcagagcctcacactggacatcaaacgacaacgcccgccagtccatcgaaccctttctgcccgttccgcatcatcagtcagcgtgaaccgccgctaccgaagtcctagccccaatactctacctcgatccctcagcccgcgagacccgaatgtttcgttcccaccacgcagaagcagctggcagtctgggcgcgaggcgagatccactgccgatatagaaaaggagtgcgacgaagatgacgatgacgacatcccggatggcatttttctcgacaatgtaccgttatctccccgcccgccgagcgagcgatcggcgagtcgtcctgcctcggcctccacctcgcctgaacggagaccgaaagaccgggtgcgcagcgtgggcaacgggacccctcctgtagcggccgaccgagggtccctgaagtcgccaacatggaaatccgacaacgccagcgataccgcactcaagtcaggagcctcttctcccaccaaaggacgagccaaaagctggactgccgctatctcagggctgagtgccgaagccatggcgctcacggagaagctcgaggaacacgcggacgaactcgagaagcgtggcgagcagttcaagcgcgcacctgtgaagccccgtgtcaagtctgctctggcagagctgcccccaatccggaggtcgaacatcatgatcgatcccctgcccgtgtcgaaggagaaagaagctgttctctcccggacgcggccatcgtggcttccgcccaaaaacccagctgaagagaagaagcacctgaaggaatatcagaagatgatggcgaatagcatcgaggcagacaagaaaagagaagctgctcggcgtgagaaggagcaaagcaaagcaaatctgtcccgggtatgggaagaagacatactgaagaggtgggatgccgctatccaagaacaacgaacacgggacttatggtgggaaggcatagcgcctcgcagtcgtggcgaggtatgggttcgtgcgattgggaacagcctcgggctgacggagacctcgtaccaagctgcgttgtctcgcgcgtgcgaggtggaggagtgtgccaagaatggaaagctcacgccagaggacgaacgccgcctggcctggttcgctcagattcgaatagacgtcgagcagcgaacctgggttgatctcaagatattccaggctggtgcccccctccatcagcacgttgtcgatgtccttcgtgcgtatgccatgtatcgcagtgatattggctacgtctcgggatgtaacgccatcgccgcgcttctcctgctcaatattgacactcccgcatccgcctttatcgcacttgctaacgtgctcaatcgccctttaccattatcgttctactccaacgatccaggggctcgctcagcggtctcagagctggtgcacaagagactatctcggaaatctcaacaacttcacgagcacctcgaaaagccatcagtgggctctaattttgacctgcgcctgaacgatatcttcacaaccatgtttacccgacatctgaaccttgacgactgcaccagactctgggatgtctatgtattcgaaggagacaagatattgctcgtggccactgcggcattgttattggagaaagaaatggcgctcctcagtgccgaaagcgaagcggaagtgagagacatcattgaagctccgccacagcttgcgttgcaggataacgatggcgtcttcatttcacgcgtgaaagaagtagctggatttggcgtaccaacgaaatagacgtagagatgtattcatagcgagatgacttaatgttaatgtgccaagacacccatacaatctcacgtctccgttgacgctatttcgcgtgatacggggagaacaccatttgcattcttagaatgtggcgacactctctagtacgttctctgagttcgaagacgtcagccgcgggaaagtgtctctatatcgttcgaaagtaggccttcgtcagatgccccttcgtcaaggttcaatcatcaaggcaagggcatttaatcccgcgatgtcaattgcagtcgtccttggggtttacaataaaagtcgagaacatagaatgctatgcgattatcgggaaagcaccacggcggcagccttttcttgatgagacgagcgcgacaaatacattattactctagcaaactcatctaacgagaggttgggtgcggatcttatacttcggtgaatattctgaacccgtatagtcctacgcagcgaagaaagaaaaacctgattcctgaagattggcatgcgcatgtgttcatactatacatagcacacgacaagttctcgtttgaaggagccattgatactagattccgtcacgatgttgaaaaatataccctaatcaagttagtctctagagctgcgacagggtcatctattgatggcgacgatataatacgattgcgggttgcactcctagcgataagactatgcttgaaaatgatactgagggagaacactatgcagagaactgtaatcaagatactcatgcacattatgccagaattcgagacggggatagggtattgatatatgtatgcatcagagaatgatatagaagtggtctaaaagtaggatatatatctaatatgggatggagcgactagatagtcctccttctttcgctctcaatgatgacgagtcatgaagaggttgctagtttcgatacgccaaacctattccaccccacaaacaatgaaatttgactatgattcggtcttgggccttctcggccgtatttcaggaaagggatatattgccaagtataccatcgccagtaaatcaacatcaatatgtccatccatttggacatttcatagttacctcctagatcgtctttgaccgtagcttttcttacaccgataccgcccattcattctattctccaggtctttcacccgtgcacccagcgatttctccttcgttacttttgccccattctcgaagctctttcgttgtatggaagaagcttcgac

SEQ ID NO: 4939 - DNA, 2223 bp, Muscodor strobelii
  misc_feature: SGI cDNA ID NO. 561352
  misc_feature: Reduced expression when VOC is produced
  misc_feature: Encodes the peptide sequence at SEQ ID NO 4940
atggctccgtccttcgacaccctgcgcgacgccgacgtcgacgaggatgactacgacgaggatgagatcgacttgtccgacctgcgcgagaagtacgaggtccagctcgagtccggctacgatagcttcgtcgtcgtcgacggcctgcccgaagtcaacgaggaccagaagcccaagctcgtcaagttcctcctcaagaagatgaacggcgtcggcaagaccaaggaggactcggtctacatgcccatggaggatggcaagtctctcagattcgccttcatcgagtacagctcccccgccgaggctgccgccgccgtccgccagctcaacctcgtccccctcgacaagaagcacaccctccgagtcaataagatgagcgacatcgaccgctacggacgcgagggtcgtgtcgacgacaactacacgccccccaagatcgaggacttcaccgagaaagagcacctgcgctccttccttgccgatccctccggccgtggccgcgaccagtttgccatgtaccgcggcgactcggtcggcatcttctggaacaacgagaaggacaaccccgagaacatcgtcgaccgccagcactggaccgagagtttcattcagtggtcgccactcggcacctatctagtctcggtacaccagcagggtgttcagctgtggggtggtgcgtcgtggtcacgtcagaagcgatttgctcacccattcgtcaacatgctcgatttctcccccggcgagaagtacgtcgtcacctggtcgaaccgccccatctccatcccagaggaaggacacccacagttgtcgctcgacgaggatggaaagaactatgtcatttgggacgtggagaccggcaagcctctccgatctttcgccaacctggatgtcccagcgacagccgacggcccggccaaacctcaagccaagttcccctggcccgccttcaagtggtccgccgatgacaagtacgttgcacgactcacccaaggccagtccatctcggtctatgagctcccgcgcatgggtcttctggacaagacaaccgtcaagatagacggcgtcatggacttcgagtgggcccccgccactgctcagcgggagggggtcaagcagtacgagcagatggtctgcttctggacaccggaaatcggcagcaaccccgccaaggtcggcttgatgagcataccttctaaacaaatcgttcggacgttgaacctcttcagcgtgacggacgtcaagcttcattggcaatcagatgccacatatctatcggtcaaggtcgaccgtcactccaagtccaaaaagtcgcaggccacgacgctcgagatattcaggatcaaagagaagggtgtaccggtagaggttgtagataccatcaaagacacggtcatcaactttgcgtgggagcccaagggagaccgattcgtcatcatcaccacgtcagagccggcaggacctaccgccgtgccgcccaagacctcggtgtccttcttctgcccggagaaggccaagggatccacagttggcaacttcaagcacctaaggactctggagaagaagaacagcaacgccatctactggtcacccaagggtcggttcgttgtggtcgccaccgttgccaaccaacagaattcagacctcgagttctacgacctcgactttgagggtgaaaagcccgagagcgacaaggacttgacggccaacctccagttgatgaacacgggcgaccactacggcgtaactgacgtccagtgggatccgtcaggtcgctttgtcgccacgtgggcatcagcatggaagcattctatggaaaacggctatcacatttacgacttccgaggcgaacagctgcgcgaggagccccttgagaaatttcgccagtggtcctggcggccgcgacctccgactctcctctctaaggacgagcagaagcagattcgcaagaacctgcgagagtactcaaagacgttcgagcaagaggatgctgagcgcggcgcttctgcagatctggccgttgtagaggaacggagacgtcttctcagcgaatggctggcatggcgcgcctccatcgaggccgaagtcgaggaggacaggcaacactatggcctacctgccaaccctctcgcggatctggtccaagagactgaggaaggcgaggagcaggtcatcgaggagcttgtagaagaggtgctcgaggagacggaggagattgtgtcctaa

SEQ ID NO: 4940 - protein, 740 aa, Muscodor strobelii
  misc_feature: SGI Peptide ID NO. 561352
  misc_feature (405)..(629): Pfam Id: PF08662 Pfam Desc: Eukaryotic translation initiation factor eIF2A
  misc_feature (406)..(538): Pfam Id: PF08662 Pfam Desc: Eukaryotic translation initiation factor eIF2A
  misc_feature (567)..(629): Pfam Id: PF08662 Pfam Desc: Eukaryotic translation initiation factor eIF2A
  misc_feature (82)..(110): Pfam Id: PF00076 Pfam Desc: RNA recognition motif. (a.k.a. RRM, RBD, or RNP domain)
  misc_feature (1)..(724): NCBI GI: 171680683 Blast Desc: protein product [Podospora anserina] gi|170939969|emb|CAP65195.1| protein product [Podospora anserina]
  misc_feature (1)..(724): NCBI GI: 85092749 Blast Desc: eukaryotic translation initiation factor 3 [Neurospora crassa OR74A] gi|74696375|sp|Q7S464.1|EIF3B_NEUCR RecName: Full=Eukaryotic translation initiation factor 3 subunit B; factor
  misc_feature (1)..(714): NCBI GI: 256727202 Blast Desc: NECHADRAFT_99053 [Nectria haematococca mpVI 77-13-4]
  misc_feature (1)..(721): NCBI GI: 156058177 Blast Desc: SS1G_04820 [Sclerotinia sclerotiorum 1980] gi|229488261|sp|A7EHM8.1|EIF3B_SCLS1 RecName: Full=Eukaryotic translation initiation factor 3 subunit B; Short=eIF3b; AltName:
  misc_feature (1)..(721): NCBI GI: 154299107 Blast Desc: BC1G_11866 [Botryotinia fuckeliana B05.10] gi|229488238|sp|A6SFQ6.1|EIF3B_BOTFB RecName: Full=Eukaryotic translation initiation factor 3 subunit B; Short=eIF3b; AltName:
  misc_feature (1)..(715): NCBI GI: 116200812 Blast Desc: conserved [Chaetomium globosum CBS 148.51] gi|121922501|sp|Q2GM53.1|EIF3B_CHAGB RecName: Full=Eukaryotic translation initiation factor 3 subunit B; Short=eIF3b; AltName:
  misc_feature (1)..(714): NCBI GI: 46122799 Blast Desc: FG05777.1 [Gibberella zeae PH-1]
  misc_feature (1)..(714): NCBI GI: 39967318 Blast Desc: MGG_01978 [Magnaporthe grisea 70-15] gi|223635133|sp|A4QZL9.1|EIF3B_MAGGR RecName: Full=Eukaryotic translation initiation factor 3 subunit B; Short=eIF3b; AltName:
  misc_feature (1)..(713): NCBI GI: 261353953 Blast Desc: eukaryotic translation initiation factor 3 subunit B [Verticillium albo-atrum VaMs.102]
  misc_feature (1)..(704): NCBI GI: 154280753 Blast Desc: HCAG_03286 [Ajellomyces capsulatus NAm1] gi|150411368|gb|EDN06756.1| HCAG_03286 [Ajellomyces capsulatus NAm1]
  misc_feature: Useful for introducing or modulating the production of volatile compounds
MAPSFDTLRDADVDEDDYDEDEIDLSDLREKYEVQLESGYDSFVVVDGLPEVNEDQKPKLVKFLLKKMNGVGKTKEDSVYMPMEDGKSLRFAFIEYSSPAEAAAAVRQLNLVPLDKKHTLRVNKMSDIDRYGREGRVDDNYTPPKIEDFTEKEHLRSFLADPSGRGRDQFAMYRGDSVGIFWNNEKDNPENIVDRQHWTESFIQWSPLGTYLVSVHQQGVQLWGGASWSRQKRFAHPFVNMLDFSPGEKYVVTWSNRPISIPEEGHPQLSLDEDGKNYVIWDVETGKPLRSFANLDVPATADGPAKPQAKFPWPAFKWSADDKYVARLTQGQSISVYELPRMGLLDKTTVKIDGVMDFEWAPATAQREGVKQYEQMVCFWTPEIGSNPAKVGLMSIPSKQIVRTLNLFSVTDVKLHWQSDATYLSVKVDRHSKSKKSQATTLEIFRIKEKGVPVEVVDTIKDTVINFAWEPKGDRFVIITTSEPAGPTAVPPKTSVSFFCPEKAKGSTVGNFKHLRTLEKKNSNAIYWSPKGRFVVVATVANQQNSDLEFYDLDFEGEKPESDKDLTANLQLMNTGDHYGVTDVQWDPSGRFVATWASAWKHSMENGYHIYDFRGEQLREEPLEKFRQWSWRPRPPTLLSKDEQKQIRKNLREYSKTFEQEDAERGASADLAVVEERRRLLSEWLAWRASIEAEVEEDRQHYGLPANPLADLVQETEEGEEQVIEELVEEVLEETEEIVS

SEQ ID NO: 4941 - DNA, 3385 bp, Muscodor strobelii
  misc_feature: SGI EST ID NO. CUFF.12855.1
  misc_feature: Variant of the nucleotide sequence at SEQ ID NO 4939
aggggctacgtgctggagcatgttgcagggggtagagcaccccgcactagtagaccacacaatattttttctcgctttccacgcttttgcactcgccgggcctgttggcggccaaaattaccgattcccactaaaaccttgtgctgtgaacctgtgaacccgtgtgagaggctcccgtaccgtggatcccccttctgtgctgcatcccatcgatagcctccatcgtctccatcgcttcgcctgctctctcccccgtctccttcgccacgacaaaaggcagccacgaagccatcgtcaagtcgagagtcgagcatacacactcaggtactcgaccagctgtccatatcgcagacattccattactttcccaacccgaagctcgtccaccgcaccaccgcaccaccgcacttgaccgcgccgacatcccagcgcctgcccagcatggctccgtccttcgacaccctgcgcgacgccgacgtcgacgaggatgactacgacgaggatgagatcgacttgtccgacctgcgcgagaagtacgaggtccagctcgagtccggctacgatagcttcgtcgtcgtcgacggcctgcccgaagtcaacgaggaccagaagcccaagctcgtcaagttcctcctcaagaagatgaacggcgtcggcaagaccaaggaggactcggtctacatgcccatggaggatggcaagtctctcagattcgccttcatcgagtacagctcccccgccgaggctgccgccgccgtccgccagctcaacctcgtccccctcgacaagaagcacaccctccgagtcaataagatgagcgacatcgaccgctacggacgcgagggtcgtgtcgacgacaactacacgccccccaagatcgaggacttcaccgagaaagagcacctgcgctccttccttgccgatccctccggccgtggccgcgaccagtttgccatgtaccgcggcgactcggtcggcatcttctggaacaacgagaaggacaaccccgagaacatcgtcgaccgccagcactggaccgagagtttcattcagtggtcgccactcggcacctatctagtctcggtacaccagcagggtgttcagctgtggggtggtgcgtcgtggtcacgtcagaagcgatttgctcacccattcgtcaacatgctcgatttctcccccggcgagaagtacgtcgtcacctggtcgaaccgccccatctccatcccagaggaaggacacccacagttgtcgctcgacgaggatggaaagaactatgtcatttgggacgtggagaccggcaagcctctccgatctttcgccaacctggatgtcccagcgacagccgacggcccggccaaacctcaagccaagttcccctggcccgccttcaagtggtccgccgatgacaagtacgttgcacgactcacccaaggccagtccatctcggtctatgagctcccgcgcatgggtcttctggacaagacaaccgtcaagatagacggcgtcatggacttcgagtgggcccccgccactgctcagcgggagggggtcaagcagtacgagcagatggtctgcttctggacaccggaaatcggcagcaaccccgccaaggtcggcttgatgagcataccttctaaacaaatcgttcggacgttgaacctcttcagcgtgacggacgtcaagcttcattggcaatcagatgccacatatctatcggtcaaggtcgaccgtcactccaagtccaaaaagtcgcaggccacgacgctcgagatattcaggatcaaagagaagggtgtaccggtagaggttgtagataccatcaaagacacggtcatcaactttgcgtgggagcccaagggagaccgattcgtcatcatcaccacgtcagagccggcaggacctaccgccgtgccgcccaagacctcggtgtccttcttctgcccggagaaggccaagggatccacagttggcaacttcaagcacctaaggactctggagaagaagaacagcaacgccatctactggtcacccaagggtcggttcgttgtggtcgccaccgttgccaaccaacagaattcagacctcgagttctacgacctcgactttgagggtgaaaagcccgagagcgacaaggacttgacggccaacctccagttgatgaacacgggcgaccactacggcgtaactgacgtccagtgggatccgtcaggtcgctttgtcgccacgtgggcatcagcatggaagcattctatggaaaacggctatcacatttacgacttccgaggcgaacagctgcgcgaggagccccttgagaaatttcgccagtggtcctggcggccgcgacctccgactctcctctctaaggacgagcagaagcagattcgcaagaacctgcgagagtactcaaagacgttcgagcaagaggatgctgagcgcggcgcttctgcagatctggccgttgtagaggaacggagacgtcttctcagcgaatggctggcatggcgcgcctccatcgaggccgaagtcgaggaggacaggcaacactatggcctacctgccaaccctctcgcggatctggtccaagagactgaggaaggcgaggagcaggtcatcgaggagcttgtagaagaggtgctcgaggagacggaggagattgtgtcctaagcaagggtttgatattgttgagcatggcaaaacgcggcgttctgtgtatcactgaggggtagtacgcttgccgatatggtgggcttgatactttagtttcaggcattcgatctcgcaccaagcgatgaatccaggtcgaggcatgttttcaaggaatagttatctcatgttcaaacaacttctcgatgcatgagcacgatcatgtcagcgacgcccgccgtgcctgcgtacattaagaagatagaaaacgacgatcattgaagagtattagggtaccgtgacacaagaatgccatgaagtcatcgttcttccatacttaccgcaaatcacgcttccaactgacagttttcgaaactcattgccggaagctggcaaagttttcagctgtgtcgaggcgatgatgagaccaggcaagtagaaagatgtgacaggcgttcatcctattagccaagaaccaacacggccaaaaatgataaacattttgcctgcgttcggatgcacggcgatttctaaatctaaaatatactgcaggcaagtgtgtttattccttgactcgaaatgcgtgcaacatgcgtccgcacccatccctcctctcgtaaacagctggcaactcacaatacgggctgttggtgttagacagttgaaaacacataggtagtctgaacctaaacatactacagtcatacaacaaggtcacgtctcacaattccgagccttaaga

SEQ ID NO: 4942 - DNA, 1593 bp, Muscodor strobelii
  misc_feature: SGI cDNA ID NO. 561353
  misc_feature: Encodes the peptide sequence at SEQ ID NO 4943
atgtcgtctttcagtccgacacagatcttcgaggagggcacgaccgaggaaaagggcgagaatgcccgtctcgctgcctttgtgggcgccatcgccgtcggcgatctcgtcaagagcacactcggccccaagggcatggacaagatattgcagtccgcctccacctcggagatcatggtgaccaacgacggcgccaccatcctcaagtccatcgctctcgataacgctgcggccaaggtcctcgtcaacatatccaaggtccaggacgacgaagtaggagatggcacaacctccgtcgccgtcttggctgccgagctgctgcgcgaggccgagaagctcgtcgacaagaagatccacccccagaccatcatcgagggctaccggatagccagccacgctgccctctccgctctcgaaaactccgccatcaaccacagcaagaacccagaggctttcaagaaggacctcctcgccattgcgcgtaccaccctgagctccaaagtcttggcccaggatcgagatctcttctcccagctcgctgtcgaggctgtcctgcggctcaagggctcttcggatctcagccacatccagatcatcaagaaggccggcggcaagctgagcgactcctacctcgacgagggcttcattctcgacaagaagattggcgtcaaccagcccaagcgtctcgaaaaggccaagatattggtggccaacacccagatggacacagacaaggtcaagatctttggtgcccgcttccaggtcagctcgactagcaagctagctgaactcgagaaggcggagaaggagaagatgaaagccaaggtggagaagatcaaggcgcacggcatcaactgcttcataaatcgtcagctcatctacaactggcccgagcagctattcaccgacgccggcatcatgtccatcgagcacgccgacttcgacggcatcgagcgcctcgccctcgtcaccggcggcgagatcgcatcgacctttgatcatccagaccaggtcaagctaggccactgtgacctgatcgaggaagtcatcattggcgaagacactctgatccgattctcaggcgtggcagctggccaggcctgcaccatcgtccttcggggcgcaaccgaccagttgctggatgaggctgagcgctccttgcacgatgctcttgccgttctttcccagacagtcaaggagcccaggacgactctcggtggcggatgcgcagagatgctcatggccaaggcagtggagggtgccgctactcgagtcgagggcaagaagcagatggccgttgcctctttcgccattgccctgcggcagttgcccacaatcctcgccgacaatgctggtctagattcgagcgatcttattgctagattacggaaagctatctatgatgggatgtcgacttatggactggatctgatgaccccaggcggcggcatcgctgacatgcgtgatcttggggttattgagagctataagctgaagaaggctgttgtttcttccgcgagcgaggcagcagagctcctcttacgagtcgacgacatcatccgtgccgccccaagaagacgcgaacggatgtaa

SEQ ID NO: 4943 - protein, 530 aa, Muscodor strobelii
  misc_feature: SGI Peptide ID NO. 561353
  misc_feature (33)..(524): Pfam Id: PF00118 Pfam Desc: TCP-1/cpn60 chaperonin family
  misc_feature (1)..(530): NCBI GI: 115396914 Blast Desc: T-complex protein 1 subunit beta [Aspergillus terreus NIH2624] gi|114193665|gb|EAU35365.1| T-complex protein 1 subunit beta [Aspergillus terreus NIH2624]
  misc_feature (1)..(530): NCBI GI: 121703407 Blast Desc: t-complex protein 1, beta subunit, [Aspergillus clavatus NRRL 1] gi|119398111|gb|EAW08542.1| t-complex protein 1, beta subunit, [Aspergillus clavatus NRRL 1]
  misc_feature (1)..(530): NCBI GI: 67516199 Blast Desc: AN0381.2 [Aspergillus nidulans FGSC A4] gi|40747324|gb|EAA66480.1| conserved [Aspergillus nidulans FGSC A4] gi|259489376|tpe|CBF89596.1| TPA: t-complex protein 1, beta
  misc_feature (2)..(530): NCBI GI: 238483703 Blast Desc: t-complex protein 1, beta subunit, [Aspergillus flavus NRRL3357] gi|220701140|gb|EED57478.1| t-complex protein 1, beta subunit, [Aspergillus flavus NRRL3357]
  misc_feature (1)..(530): NCBI GI: 226287715 Blast Desc: T-complex protein 1 subunit beta [Paracoccidioides brasiliensis Pb18]
  misc_feature (1)..(530): NCBI GI: 226279455 Blast Desc: T-complex protein 1 subunit beta [Paracoccidioides brasiliensis Pb01]
  misc_feature (1)..(530): NCBI GI: 261199017 Blast Desc: T-complex protein 1 beta subunit [Ajellomyces dermatitidis SLH14081] gi|239595062|gb|EEQ77643.1| T-complex protein 1 beta subunit [Ajellomyces dermatitidis SLH14081] 1 beta
  misc_feature (2)..(529): NCBI GI: 238842996 Blast Desc: t-complex protein 1 [Microsporum canis CBS 113480]
  misc_feature (1)..(530): NCBI GI: 145229529 Blast Desc: An01g06480 [Aspergillus niger] gi|134055181|emb|CAK43768.1| protein product [Aspergillus niger]
  misc_feature (1)..(530): NCBI GI: 119497435 Blast Desc: t-complex protein 1, beta subunit, [Neosartorya fischeri NRRL 181] gi|119413638|gb|EAW23579.1| t-complex protein 1, beta subunit, [Neosartorya fischeri NRRL 181]
MSSFSPTQIFEEGTTEEKGENARLAAFVGAIAVGDLVKSTLGPKGMDKILQSASTSEIMVTNDGATILKSIALDNAAAKVLVNISKVQDDEVGDGTTSVAVLAAELLREAEKLVDKKIHPQTIIEGYRIASHAALSALENSAINHSKNPEAFKKDLLAIARTTLSSKVLAQDRDLFSQLAVEAVLRLKGSSDLSHIQIIKKAGGKLSDSYLDEGFILDKKIGVNQPKRLEKAKILVANTQMDTDKVKIFGARFQVSSTSKLAELEKAEKEKMKAKVEKIKAHGINCFINRQLIYNWPEQLFTDAGIMSIEHADFDGIERLALVTGGEIASTFDHPDQVKLGHCDLIEEVIIGEDTLIRFSGVAAGQACTIVLRGATDQLLDEAERSLHDALAVLSQTVKEPRTTLGGGCAEMLMAKAVEGAATRVEGKKQMAVASFAIALRQLPTILADNAGLDSSDLIARLRKAIYDGMSTYGLDLMTPGGGIADMRDLGVIESYKLKKAVVSSASEAAELLLRVDDIIRAAPRRRERM

SEQ ID NO: 4944 - DNA, 5938 bp, Muscodor strobelii
  misc_feature: SGI EST ID NO. CUFF.12813.0
  misc_feature: Variant of the nucleotide sequence at SEQ ID NO 4942
tgacaaggtaggtaggattatcgcggccgtagctggcggaatggaagcttgaataattatttttttgacgtcgtccgaccttgaccaacaaccccttctcgaccgatcccccgagccttgtgcagtcccagactgcggcaacatcttttgacctttcttttcttgtcattcccgctctttcgaccccgatctccccacattcaccatgtcgtctttcagtccgacacagatcttcgaggagggcacgaccgaggaaaagggcgagaatgcccgtctcgctgcctttgtgggcgccatcgccgtcggcgatctcgtcaagagcacactcggccccaagggcatggacaagatattgcagtccgcctccacctcggagatcatggtgaccaacgacggcgccaccatcctcaagtccatcgctctcgataacgctgcggccaaggtcctcgtcaacatatccaaggtccaggacgacgaagtaggagatggcacaacctccgtcgccgtcttggctgccgagctgctgcgcgaggccgagaagctcgtcgacaagaagatccacccccagaccatcatcgagggctaccggatagccagccacgctgccctctccgctctcgaaaactccgccatcaaccacagcaagaacccagaggctttcaagaaggacctcctcgccattgcgcgtaccaccctgagctccaaagtcttggcccaggatcgagatctcttctcccagctcgctgtcgaggctgtcctgcggctcaagggctcttcggatctcagccacatccagatcatcaagaaggccggcggcaagctgagcgactcctacctcgacgagggcttcattctcgacaagaagattggcgtcaaccagcccaagcgtctcgaaaaggccaagatattggtggccaacacccagatggacacagacaaggtcaagatctttggtgcccgcttccaggtcagctcgactagcaagctagctgaactcgagaaggcggagaaggagaagatgaaagccaaggtggagaagatcaaggcgcacggcatcaactgcttcataaatcgtcagctcatctacaactggcccgagcagctattcaccgacgccggcatcatgtccatcgagcacgccgacttcgacggcatcgagcgcctcgccctcgtcaccggcggcgagatcgcatcgacctttgatcatccagaccaggtcaagctaggccactgtgacctgatcgaggaagtcatcattggcgaagacactctgatccgattctcaggcgtggcagctggccaggcctgcaccatcgtccttcggggcgcaaccgaccagttgctggatgaggctgagcgctccttgcacgatgctcttgccgttctttcccagacagtcaaggagcccaggacgactctcggtggcggatgcgcagagatgctcatggccaaggcagtggagggtgccgctactcgagtcgagggcaagaagcagatggccgttgcctctttcgccattgccctgcggcagttgcccacaatcctcgccgacaatgctggtctagattcgagcgatcttattgctagattacggaaagctatctatgatgggatgtcgacttatggactggatctgatgaccccaggcggcggcatcgctgacatgcgtgatcttggggttattgagagctataagctgaagaaggctgttgtttcttccgcgagcgaggcagcagagctcctcttacgagtcgacgacatcatccgtgccgccccaagaagacgcgaacggatgtaaatggaaatcgcaaggtttgcatggacggtatatgaagatgaggtggccacagactcatagatctagcttcgtgatgctaataaggatggagagagcatcacggacgaagggaagtcgtagtgacttgagcagaatagtccatcgagggataagaaacctgctcgataacagatcttcaggcgggtacatgaatgtaatgtcaaatagagcatccgcagatgtgtgccttggagatgcatgaggaacactaagcaatagataccaccagacacgtattgtgagaatttggtgataagtctagcgactcatcgtcccacaagtctcaacctcattaggatctgtacataattacgtgtcctatgcgtccaggctgtgaagactgggacatagtgtatcctctcagcttgaagaacgatgttctggtctggaatcctgacgctcgttggttgaggacaagaatcatccccacatttggcaacgggatatgttaagagggtctcagttcgaggcagggtgcgatgcatgatacatcccttttggttgatttttgttcctcacagtccatgctctctccaggctgttctattgtgtctctggcaagttttcgctctgatcgtactggttgtcttcgcatatgtcatcttggatcgtggttcatcgcgtgagagcaatgaagctgtcaactatgccccccatttagcccaggctgcacaaccttgctagttttctgcgcgagaagttactcagcaccatggagaagaccatatgattacgccgacgagcagttgctgatatgaccctgaatgaaatcctgaatcaggccggagagtccaagcatccatggggtatatccgccgtgcatccaagaagataccttcatattctttgattatatcctgcgtctctcataaatttccacctagactgccaattacgggatatcatacagtcgtctattaacccaaacacaacgcactgcagtgcagcccagtatacaaaccatcaaactccatgttacagtgaaaacccaagctcttcccttttatcatctataatccgtccccattccagtaacagccggaacatgtaaatctgcatgtcttctttccgcaacgcttgtttcccccattgtgcgccggcctcggcgatgtctttagcctcgtttgagcccgggcctgcgaagtagcgcaagttggcccataagtccatgagtctgagatccaggggaacgaagtgcctccaggggtgaattcgctcttcccaccaagtgcggaaaaggctggcccggtatggcaatgatctggattcgaggaatggcactacaattattggtcagatggttatttacagatagagtttagatcttgtaggtacgaaatagatgatcggtagatttgatatccaataataggtagtgaagggagcgtgtagcataacttacaaaatcgcccgctgaaggcggcaccatccagatcaatcaggtggcgatgttgccaatgctcctgaaaatctacaccatctggcacgacatctggcggagtatcatagaaagtgcgatgctctgcttcacagtcccgaccatcacagcgcccaaaatgccctacaaatgagacgttgacttcgagctgccctttcaaggactggccgcgacgcgagggattagaagatacctcgtttgctttaccaatagggagaagtgatcgaagtcgatcatacgttgtgcgcaggcgggacgccatgtaaacgaatcgtgctcgtaagaacatctgccacgatccatgggtggcgaatccatccgaagaagcgcctcgccagaacacgctgtttcgcttgtcctcccaggacacatcgcgtgactcgtcatacgtgaccttgtcgatgaaattccatgggctagggtacaagatatcagcaaagttgttcaccttgctctggctgaaaaccggatataaatggtgagacgcagtaaaagcggatggcgaagtaagaaacccgtgtaagtaggcaagatcaggctgatggcagagatcgccagacaaggtccagttgcggatgaagccctgcaacatgtgaggcgaggcacagcttctacatctctctttccgattccaccaatggaggttgtttactggcgcgtctgctgggcatgctgacgatacccattcatccaggatggggctttttgaccacgtatggaaagaatcggatttttgttgccaaataccctcgcctgcatctaggaatccaaaagcccactgaggatcttgtgatgggctaaatggatggagtgtcttttgagagccgagggtggcctgcgaagcgaaccctttctcgacgtagtctcccatctcaacagcaggaaccgaaacacggcattcgtcgtccaaattgaacgcaagttgcatctccggtagccattgggcaaagggctttatcatatctgcggcagcgtctaccatccagcggtgagttccagggacatgcggcgacactgtgacttcaccatctttgataatcaacccgcccatggataatgtggggtgttcgagcagatacgttgtcgtctcacggacgagagatggggagattccccagaacggctgcaagtcggtgtggatttgatcgaaaatgtcgacgactggagatttattgtctgtcgcgaaagtataccacttatcgaagttgggcggtggaggtacaccataacgctggcgatattcacccaccgctgtttcgagtgatgtgcttttcgcagccagcgacatccattcatctgatcgcgctcggttttcagccatcacaacctttggcgagggcttatgatttaggctcccgcttatgtagaatgaatagaccaggaccacgaaaagcgcgacaagagagtatccactgtagcgagtggcggccaagatgtcctgccgatgaaaagtcactcccaagttcgagttcctgctgaagtggaacaagtatccaaatcccacaagagtagctatgaataataatccctctccaatgccggtctgagctggagtccatatgccgtgggaggcatgcatcaatgccaaaacatatatactggtggcgacgccaaggagaccgactaggctcggccgcaaggtgcgaagtagcacaagagcgcttattaccgacacggacacggttgtgctgtcgatggcaatatcacggaccaccagctgcgacatgaagacactccatctccagttgatattgtcaagcgacgtccacgaagccaagaacaatatgatgccagccgatgccaggaatatgaagcccagtgtctgccactgctgacctctctccgggtttccctgttgcagcttcgcaaactgagtgatgatgatggcgtctatgaggacagccgtcaactgcgcgagcgggacgagtcgttcgatgcaccatccggcaggacatatgactcccgtggtgtcctggttctggaggagactgctgacggcgagcccccaggccaaggccaacgcggcaagcttggcaagcgagacgtgtgtaggcggatcatcgtcggcatgcctgggaaggttgatggctcgggggaagagcgaggcggtctgcaaagagaggaacaacggaaggaatgcctaaatgcagccatgagtctatgatagtgcgaaattgttgagatggtcgcgagcgacatacgtagagaccgtcccaggagcagtggatagtgcgtatggttcgccatgtgaggatcgtccgcagaataatgcagagcaccagatggaccgaagcgttggatcggaggctcgagcagagccgccacaggaagccaacgaaggcgccagggaggctcttcagagggacggaggggagcttggtgaaggcatattcgcggcgcgccgagtcgagtcgggagagcgcaagcaggagagcgccggcgagagcgagggaggtgattgacagatggatggggcgttctgtgcggcacgcgacgtgttagaagctgcgggcgagcttgggagagctggcggtgcgacaagtctgtccgaccagacggtcatacgcgacggagaggcggaagcacataccgaaggcggcgctcttgttgaatcggagctggaggcagccaaaactcgagacgaaaagactggcgggcacaaa

SEQ ID NO: 4945 - DNA, 2859 bp, Muscodor strobelii
  misc_feature: SGI cDNA ID NO. 561354
  misc_feature: Encodes the peptide sequence at SEQ ID NO 4946
atgaccatatcgcagaggtcaaccaacctcgcggccatctgtcttttcgtctcgagttttggctgcctccagctccgattcaacaagagcgccgccttcgaacgccccatccatctgtcaatcacctccctcgctctcgccggcgctctcctgcttgcgctctcccgactcgactcggcgcgccgcgaatatgccttcaccaagctcccctccgtccctctgaagagcctccctggcgccttcgttggcttcctgtggcggctctgctcgagcctccgatccaacgcttcggtccatctggtgctctgcattattctgcggacgatcctcacatggcgaaccatacgcactatccactgctcctgggacggtctctacgcattccttccgttgttcctctctttgcagaccgcctcgctcttcccccgagccatcaaccttcccaggcatgccgacgatgatccgcctacacacgtctcgcttgccaagcttgccgcgttggccttggcctgggggctcgccgtcagcagtctcctccagaaccaggacaccacgggagtcatatgtcctgccggatggtgcatcgaacgactcgtcccgctcgcgcagttgacggctgtcctcatagacgccatcatcatcactcagtttgcgaagctgcaacagggaaacccggagagaggtcagcagtggcagacactgggcttcatattcctggcatcggctggcatcatattgttcttggcttcgtggacgtcgcttgacaatatcaactggagatggagtgtcttcatgtcgcagctggtggtccgtgatattgccatcgacagcacaaccgtgtccgtgtcggtaataagcgctcttgtgctacttcgcaccttgcggccgagcctagtcggtctccttggcgtcgccaccagtatatatgttttggcattgatgcatgcctcccacggcatatggactccagctcagaccggcattggagagggattattattcatagctactcttgtgggatttggatacttgttccacttcagcaggaactcgaacttgggagtgacttttcatcggcaggacatcttggccgccactcgctacagtggatactctcttgtcgcgcttttcgtggtcctggtctattcattctacataagcgggagcctaaatcataagccctcgccaaaggttgtgatggctgaaaaccgagcgcgatcagatgaatggatgtcgctggctgcgaaaagcacatcactcgaaacagcggtgggtgaatatcgccagcgttatggtgtacctccaccgcccaacttcgataagtggtatactttcgcgacagacaataaatctccagtcgtcgacattttcgatcaaatccacaccgacttgcagccgttctggggaatctccccatctctcgtccgtgagacgacaacgtatctgctcgaacaccccacattatccatgggcgggttgattatcaaagatggtgaagtcacagtgtcgccgcatgtccctggaactcaccgctggatggtagacgctgccgcagatatgataaagccctttgcccaatggctaccggagatgcaacttgcgttcaatttggacgacgaatgccgtgtttcggttcctgctgttgagatgggagactacgtcgagaaagggttcgcttcgcaggccaccctcggctctcaaaagacactccatccatttagcccatcacaagatcctcagtgggcttttggattcctagatgcaggcgagggtatttggcaacaaaaatccgattctttccatacgtggtcaaaaagccccatcctggatgaatgggtatcgtcagcatgcccagcagacgcgccagtaaacaacctccattggtggaatcggaaagagagatgtagaagctgtgcctcgcctcacatgttgcagggcttcatccgcaactggaccttgtctggcgatctctgccatcagcctgatcttgcctacttacacgggtttcttacttcgccatccgcttttactgcgtctcaccatttatatccggttttcagccagagcaaggtgaacaactttgctgatatcttgtaccctagcccatggaatttcatcgacaaggtcacgtatgacgagtcacgcgatgtgtcctgggaggacaagcgaaacagcgtgttctggcgaggcgcttcttcggatggattcgccacccatggatcgtggcagatgttcttacgagcacgattcgtttacatggcgtcccgcctgcgcacaacgtatgatcgacttcgatcacttctccctattggtaaagcaaacgaggtatcttctaatccctcgcgtcgcggccagtccttgaaagggcagctcgaagtcaacgtctcatttgtagggcattttgggcgctgtgatggtcgggactgtgaagcagagcatcgcactttctatgatactccgccagatgtcgtgccagatggtgtagattttcaggagcattggcaacatcgccacctgattgatctggatggtgccgccttcagcgggcgatttttgccattcctcgaatccagatcattgccataccgggccagccttttccgcacttggtgggaagagcgaattcacccctggaggcacttcgttcccctggatctcagactcatggacttatgggccaacttgcgctacttcgcaggcccgggctcaaacgaggctaaagacatcgccgaggccggcgcacaatgggggaaacaagcgttgcggaaagaagacatgcagatttacatgttccggctgttactggaatggggacggattatagatgataaaagggaagagcttgggttttcactgtaa

SEQ ID NO: 4946 - protein, 952 aa, Muscodor strobelii
  misc_feature: SGI Peptide ID NO. 561354
  misc_feature (349)..(950): NCBI GI: 145604935 Blast Desc: MGG_01982 [Magnaporthe grisea 70-15] gi|145012845|gb|EDJ97486.1| MGG_01982 [Magnaporthe grisea 70-15]
  misc_feature (165)..(950): NCBI GI: 238843445 Blast Desc: conserved [Microsporum canis CBS 113480]
  misc_feature (98)..(952): NCBI GI: 121702737 Blast Desc: conserved [Aspergillus clavatus NRRL 1] gi|119397776|gb|EAW08207.1| conserved [Aspergillus clavatus NRRL 1]
  misc_feature (14)..(952): NCBI GI: 70990860 Blast Desc: capsular associated protein [Aspergillus fumigatus Af293] gi|66847911|gb|EAL88241.1| capsular associated protein, [Aspergillus fumigatus Af293] gi|159130752|gb|EDP55865.1| A1163]
  misc_feature (396)..(950): NCBI GI: 258565961 Blast Desc: conserved [Uncinocarpus reesii 1704] gi|237907426|gb|EEP81827.1| conserved [Uncinocarpus reesii 1704]
  misc_feature (101)..(952): NCBI GI: 119189557 Blast Desc: CIMG_04826 [Coccidioides immitis RS]
  misc_feature (11)..(952): NCBI GI: 145229153 Blast Desc: An01g04570 [Aspergillus niger] gi|134054985|emb|CAK36993.1| protein product [Aspergillus niger]
  misc_feature (28)..(952): NCBI GI: 169618738 Blast Desc: SNOG_12561 [Phaeosphaeria nodorum SN15] gi|160703668|gb|EAT79859.2| SNOG_12561 [Phaeosphaeria nodorum SN15]
  misc_feature (372)..(952): NCBI GI: 240111189 Blast Desc: CPC735_070240 [Coccidioides posadasii C735 delta SOWgp]
  misc_feature (2)..(913): NCBI GI: 261188438 Blast Desc: capsular associated protein [Ajellomyces dermatitidis SLH14081] gi|239593234|gb|EEQ75815.1| capsular associated protein [Ajellomyces dermatitidis SLH14081]
MTISQRSTNLAAICLFVSSFGCLQLRFNKSAAFERPIHLSITSLALAGALLLALSRLDSARREYAFTKLPSVPLKSLPGAFVGFLWRLCSSLRSNASVHLVLCIILRTILTWRTIRTIHCSWDGLYAFLPLFLSLQTASLFPRAINLPRHADDDPPTHVSLAKLAALALAWGLAVSSLLQNQDTTGVICPAGWCIERLVPLAQLTAVLIDAIIITQFAKLQQGNPERGQQWQTLGFIFLASAGIILFLASWTSLDNINWRWSVFMSQLVVRDIAIDSTTVSVSVISALVLLRTLRPSLVGLLGVATSIYVLALMHASHGIWTPAQTGIGEGLLFIATLVGFGYLFHFSRNSNLGVTFHRQDILAATRYSGYSLVALFVVLVYSFYISGSLNHKPSPKVVMAENRARSDEWMSLAAKSTSLETAVGEYRQRYGVPPPPNFDKWYTFATDNKSPVVDIFDQIHTDLQPFWGISPSLVRETTTYLLEHPTLSMGGLIIKDGEVTVSPHVPGTHRWMVDAAADMIKPFAQWLPEMQLAFNLDDECRVSVPAVEMGDYVEKGFASQATLGSQKTLHPFSPSQDPQWAFGFLDAGEGIWQQKSDSFHTWSKSPILDEWVSSACPADAPVNNLHWWNRKERCRSCASPHMLQGFIRNWTLSGDLCHQPDLAYLHGFLTSPSAFTASHHLYPVFSQSKVNNFADILYPSPWNFIDKVTYDESRDVSWEDKRNSVFWRGASSDGFATHGSWQMFLRARFVYMASRLRTTYDRLRSLLPIGKANEVSSNPSRRGQSLKGQLEVNVSFVGHFGRCDGRDCEAEHRTFYDTPPDVVPDGVDFQEHWQHRHLIDLDGAAFSGRFLPFLESRSLPYRASLFRTWWEERIHPWRHFVPLDLRLMDLWANLRYFAGPGSNEAKDIAEAGAQWGKQALRKEDMQIYMFRLLLEWGRIIDDKREELGFSL

SEQ ID NO: 4947 - DNA, 6200 bp, Muscodor strobelii
  misc_feature: SGI EST ID NO. CUFF.12814.1
  misc_feature: Variant of the nucleotide sequence at SEQ ID NO 4945
atgggattaggagttgagaatccagaaagacagtcgacagtcaatggctgcccatggcctccgttgtgcgctgattccctacctaactttattttagtgcagtgtccatgaagttgaatcggtgcacgtattttgagtaccacccctgaatgggtacccaacatatgctgtcgcgctatctttggaagcgcaattgctgaattgctggctcggatttgctagcaagggcctgggaggcggcattcgccaaccgcatcttggctcgcaacatcgcaacatcgcaacatctcaccatgagaagccgccacgcgttggcagcaacatgaccatatcgcagaggtcaaccaacctcgcggccatctgtcttttcgtctcgagttttggctgcctccagctccgattcaacaagagcgccgccttcgaacgccccatccatctgtcaatcacctccctcgctctcgccggcgctctcctgcttgcgctctcccgactcgactcggcgcgccgcgaatatgccttcaccaagctcccctccgtccctctgaagagcctccctggcgccttcgttggcttcctgtggcggctctgctcgagcctccgatccaacgcttcggtccatctggtgctctgcattattctgcggacgatcctcacatggcgaaccatacgcactatccactgctcctgggacggtctctacgcattccttccgttgttcctctctttgcagaccgcctcgctcttcccccgagccatcaaccttcccaggcatgccgacgatgatccgcctacacacgtctcgcttgccaagcttgccgcgttggccttggcctgggggctcgccgtcagcagtctcctccagaaccaggacaccacgggagtcatatgtcctgccggatggtgcatcgaacgactcgtcccgctcgcgcagttgacggctgtcctcatagacgccatcatcatcactcagtttgcgaagctgcaacagggaaacccggagagaggtcagcagtggcagacactgggcttcatattcctggcatcggctggcatcatattgttcttggcttcgtggacgtcgcttgacaatatcaactggagatggagtgtcttcatgtcgcagctggtggtccgtgatattgccatcgacagcacaaccgtgtccgtgtcggtaataagcgctcttgtgctacttcgcaccttgcggccgagcctagtcggtctccttggcgtcgccaccagtatatatgttttggcattgatgcatgcctcccacggcatatggactccagctcagaccggcattggagagggattattattcatagctactcttgtgggatttggatacttgttccacttcagcaggaactcgaacttgggagtgacttttcatcggcaggacatcttggccgccactcgctacagtggatactctcttgtcgcgcttttcgtggtcctggtctattcattctacataagcgggagcctaaatcataagccctcgccaaaggttgtgatggctgaaaaccgagcgcgatcagatgaatggatgtcgctggctgcgaaaagcacatcactcgaaacagcggtgggtgaatatcgccagcgttatggtgtacctccaccgcccaacttcgataagtggtatactttcgcgacagacaataaatctccagtcgtcgacattttcgatcaaatccacaccgacttgcagccgttctggggaatctccccatctctcgtccgtgagacgacaacgtatctgctcgaacaccccacattatccatgggcgggttgattatcaaagatggtgaagtcacagtgtcgccgcatgtccctggaactcaccgctggatggtagacgctgccgcagatatgataaagccctttgcccaatggctaccggagatgcaacttgcgttcaatttggacgacgaatgccgtgtttcggttcctgctgttgagatgggagactacgtcgagaaagggttcgcttcgcaggccaccctcggctctcaaaagacactccatccatttagcccatcacaagatcctcagtgggcttttggattcctagatgcaggcgagggtatttggcaacaaaaatccgattctttccatacgtggtcaaaaagccccatcctggatgaatgggtatcgtcagcatgcccagcagacgcgccagtaaacaacctccattggtggaatcggaaagagagatgtagaagctgtgcctcgcctcacatgttgcagggcttcatccgcaactggaccttgtctggcgatctctgccatcagcctgatcttgcctacttacacgggtttcttacttcgccatccgcttttactgcgtctcaccatttatatccggttttcagccagagcaaggtgaacaactttgctgatatcttgtaccctagcccatggaatttcatcgacaaggtcacgtatgacgagtcacgcgatgtgtcctgggaggacaagcgaaacagcgtgttctggcgaggcgcttcttcggatggattcgccacccatggatcgtggcagatgttcttacgagcacgattcgtttacatggcgtcccgcctgcgcacaacgtatgatcgacttcgatcacttctccctattggtaaagcaaacgaggtatcttctaatccctcgcgtcgcggccagtccttgaaagggcagctcgaagtcaacgtctcatttgtagggcattttgggcgctgtgatggtcgggactgtgaagcagagcatcgcactttctatgatactccgccagatgtcgtgccagatggtgtagattttcaggagcattggcaacatcgccacctgattgatctggatggtgccgccttcagcgggcgatttttgccattcctcgaatccagatcattgccataccgggccagccttttccgcacttggtgggaagagcgaattcacccctggaggcacttcgttcccctggatctcagactcatggacttatgggccaacttgcgctacttcgcaggcccgggctcaaacgaggctaaagacatcgccgaggccggcgcacaatgggggaaacaagcgttgcggaaagaagacatgcagatttacatgttccggctgttactggaatggggacggattatagatgataaaagggaagagcttgggttttcactgtaacatggagtttgatggtttgtatactgggctgcactgcagtgcgttgtgtttgggttaatagacgactgtatgatatcccgtaattggcagtctaggtggaaatttatgagagacgcaggatataatcaaagaatatgaaggtatcttcttggatgcacggcggatataccccatggatgcttggactctccggcctgattcaggatttcattcagggtcatatcagcaactgctcgtcggcgtaatcatatggtcttctccatggtgctgagtaacttctcgcgcagaaaactagcaaggttgtgcagcctgggctaaatggggggcatagttgacagcttcattgctctcacgcgatgaaccacgatccaagatgacatatgcgaagacaaccagtacgatcagagcgaaaacttgccagagacacaatagaacagcctggagagagcatggactgtgaggaacaaaaatcaaccaaaagggatgtatcatgcatcgcaccctgcctcgaactgagaccctcttaacatatcccgttgccaaatgtggggatgattcttgtcctcaaccaacgagcgtcaggattccagaccagaacatcgttcttcaagctgagaggatacactatgtcccagtcttcacagcctggacgcataggacacgtaattatgtacagatcctaatgaggttgagacttgtgggacgatgagtcgctagacttatcaccaaattctcacaatacgtgtctggtggtatctattgcttagtgttcctcatgcatctccaaggcacacatctgcggatgctctatttgacattacattcatgtacccgcctgaagatctgttatcgagcaggtttcttatccctcgatggactattctgctcaagtcactacgacttcccttcgtccgtgatgctctctccatccttattagcatcacgaagctagatctatgagtctgtggccacctcatcttcatataccgtccatgcaaaccttgcgatttccatttacatccgttcgcgtcttcttggggcggcacggatgatgtcgtcgactcgtaagaggagctgttcatgctaattagtatgtaggcatggaataagaagagaatcgcgtacctctgctgcctcgctcgcggaagaaacaacagccttcttcagcttatagctctcaataaccccaagatcacgcatgtcagcgatgccgccgcctggggtcatcagatccagtccataagtcgacatcccatcatagatagctttccgtaatctagcaataagatcgctcgaatctagaccagcattgtcggcgaggattgtgggcaactgccgcagggcaatggcgaaagaggcaacggccatctgcttcttgccctcgactcgagtagcggcaccctccactgccttggccatgagcatctctgcgcatccgccaccgagagtcgtcctgggctccttgactgtctgggaaagaacggcaagagcatcgtgcaaggagcgctcagcctcatccagcaactggtcggttgcgccccgaaggacgatggtgcaggcctggccagctgccacgcctgagaatcggatcagagtgtcttcgccaatgatgacttcctcgatcaggtcacagtggcctagcttgacctggtctggatgatcaaaggtcgatgcgatctcgccgccggtgacgagggcgaggcgctcgatgccgtcgaagtcggcgtgctcgatggacatgatgccggcgtcggtgaatagctgctcgggccagttgtagatgagctgacgatttatgaagcagttgatgccgtgcgccttgatcttctccaccttggctttcatcttctccttctccgccttctcgagttcagctagcttgctagtcgagctgacctggaagcgggcaccaaagatcttgaccttgtctgtgtccatctgggtgttggccaccaatatcttggccttttcgagacgcttgggctggttgacgccaatcttcttgtcgagaatgaagccctcgtcgaggtaggagtcgctcagcttgccgccggccttcttgatgatctggatgtggctgagatccgaagagcccttgagccgcaggacagcctcgacagcgagctgggagaagagatctcgatcctgggccaagactttggagctcagggtggtacgcgcaatggcgaggaggtccttcttgaaagcctctgggttcttgctgtggttgatggcggagttttcgagagcggagagggcagcgtggctggctatccggtagccctcgatgatggtctgggggtggatcttcttgtcgacgagcttctcggcctcgcgcagcagctcggcagccaagacggcgacggaggttgtgccatctcctacttcgtcgtcctggaccttggatatgttgacgaggaccttggccgcagcgttatcgagagcgatggacttgaggatggtggcgccgtcgttggtcaccatgatctccgaggtggagctgtggcggcgcagagggagagaagtcagctagtggctgggcaagcagtgctagagaggaatgagagggcacatacgcggactgcaatatcttgtccatgcccttggggccgagtgtgctcttgacgagatcgccgacggcgatggcgcccacaaaggcagcgagacgggcattctcgcccttttcctcggtcgtgccctcctcgaagatctgtgtcggactgaaagacgactgtcgcgggggtggtcagcgaggccggaggcgttgtggaagaagggcaggtgtgctgcgctcgcggggcacgaacataccatggtgaatgtggggagatcggggtcgaaagagcgggaatgacaagaaaagaaaggtcaaaagatgttgccgcagtctgggactgcacaaggctcgggggatcggtcgagaaggggttgttggtcaaggtcggacgacgtcaaaaaaataattattcaagcttccattccgccagctacggccgcgataatcctacctaccttgtca

SEQ ID NO: 4948 - DNA, 1650 bp, Muscodor strobelii
  misc_feature: SGI cDNA ID NO. 561355
  misc_feature: Encodes the peptide sequence at SEQ ID NO 4949
atgactaaatatctatacgacaaaggttcatatttcgatactatcagttccgaattgacaattactgcagccccagaatcccctgtaattcggcacggtcgcccaatcgtttctgactggtctgtgccagaattgatagagacgaaagtaagagaagacagtcagacacccgccggtactcagatacccgaattatttgagaatactagcgatgaaagaacagagcaaggggctggcttcttagacgcttcgaactttgatgacgacataacgcacgagcttgtttcatcagcaaacatccacatccccaaccatgaagaactcagtctcagccagtcctcgtctcaacagacttcgacgacatggtctcatgacttggaggcacttgctcaaattggcgacacgctaggtctggcagatcaagtgttgtactaccgccgacggatcgcacccatcttctccgaccaagtcgcccgcgacgtagtcgtaaacatcactgaaccactactaggtcagggtatcgaactcgacttatccaatttttcggaagcccggctcgcagacttaaagccgatcagcctaacagtcccaaggtcatatgcagaccatgacttcagtcacttcatatttggcgtagcaactgacattgatcgcctccggagatctcgagattctttcgcattctggctatctcacactggtgcacaacttatcgccgttatcacggacggcggccggagaaaccctcaagatatgagcgacctagaaggggaattcgcaagcattggaatcaatgcaacattcttggagccgatcgatgaagcattcacggcgtctcagaatcactttgccgtattagttgacatgattgaatatagcacagccgatactacgtggtttgccatcttggatgacgatactttcttccctagtctccggcctctatctgaagcgttagctacatttgaccataccagagacgcctatgtcggtgcattatccgaggacttcgctgcagttagagcattcggtttcatggccttcggcggcgctgggatatacctttctcgtccccttgcaaaaaagctcggcgatcatgcactagactgcatatatgacggtatcaacctccagggtgacgtcctaatacgagactgcgtttacaagaactcaaaagccaagttggctgcgctctccggattatatcagcaagatatgcgcgacgatgtcagcggtttctttgagtcaggattgagaccgttgaatcttcatcactggaagagctggtacaaggagcctgtcacggagatggctaccgctgtaaaattgtgtggtgaatgttttctccagcgttggagatttggaaaagacactgtgctcgccaatggcttctccatcgccatatatcaagacggtcttgactctgtcgatttggaacttgtcgagggcacatggtctagagcagacagcgattatgacttcagcatagggcccctacgcaaaccgttctcatcacacaagaagaagacttacaagctcaagactgctaagctcacgggtagtgagctcaggcaattctacgtttggcgtgatccagcgaagacggataggcgcgacgaggtcgtcgagttgatatggaatagctcttga

SEQ ID NO: 4949 - protein, 549 aa, Muscodor strobelii
  misc_feature: SGI Peptide ID NO. 561355
  misc_feature (136)..(549): NCBI GI: 261353944 Blast Desc: conserved [Verticillium albo-atrum VaMs.102]
  misc_feature (136)..(548): NCBI GI: 39967306 Blast Desc: MGG_01977 [Magnaporthe grisea 70-15] gi|145012840|gb|EDJ97481.1| MGG_01977 [Magnaporthe grisea 70-15]
  misc_feature (137)..(546): NCBI GI: 46122785 Blast Desc: FG05770.1 [Gibberella zeae PH-1]
  misc_feature (135)..(542): NCBI GI: 256727197 Blast Desc: NECHADRAFT_105871 [Nectria haematococca mpVI 77-13-4]
  misc_feature (125)..(546): NCBI GI: 164426963 Blast Desc: NCU02213 [Neurospora crassa OR74A] gi|157071548|gb|EAA30192.2| [Neurospora crassa OR74A]
  misc_feature (208)..(549): NCBI GI: 156052761 Blast Desc: SS1G_06547 [Sclerotinia sclerotiorum 1980] gi|154704326|gb|EDO04065.1| SS1G_06547 [Sclerotinia sclerotiorum 1980]
  misc_feature (191)..(547): NCBI GI: 119500480 Blast Desc: NFIA_105880 [Neosartorya fischeri NRRL 181] gi|119415162|gb|EAW25100.1| conserved [Neosartorya fischeri NRRL 181]
  misc_feature (226)..(549): NCBI GI: 154314969 Blast Desc: BC1G_04826 [Botryotinia fuckeliana B05.10] gi|150848364|gb|EDN23557.1| BC1G_04826 [Botryotinia fuckeliana B05.10]
  misc_feature (191)..(547): NCBI GI: 70993924 Blast Desc: conserved [Aspergillus fumigatus Af293] gi|66849443|gb|EAL89771.1| conserved [Aspergillus fumigatus Af293] gi|159125274|gb|EDP50391.1| conserved [Aspergillus A1163]
  misc_feature (144)..(548): NCBI GI: 169771639 Blast Desc: [Aspergillus oryzae RIB40] gi|83768148|dbj|BAE58287.1| protein product [Aspergillus oryzae]
MTKYLYDKGSYFDTISSELTITAAPESPVIRHGRPIVSDWSVPELIETKVREDSQTPAGTQIPELFENTSDERTEQGAGFLDASNFDDDITHELVSSANIHIPNHEELSLSQSSSQQTSTTWSHDLEALAQIGDTLGLADQVLYYRRRIAPIFSDQVARDVVVNITEPLLGQGIELDLSNFSEARLADLKPISLTVPRSYADHDFSHFIFGVATDIDRLRRSRDSFAFWLSHTGAQLIAVITDGGRRNPQDMSDLEGEFASIGINATFLEPIDEAFTASQNHFAVLVDMIEYSTADTTWFAILDDDTFFPSLRPLSEALATFDHTRDAYVGALSEDFAAVRAFGFMAFGGAGIYLSRPLAKKLGDHALDCIYDGINLQGDVLIRDCVYKNSKAKLAALSGLYQQDMRDDVSGFFESGLRPLNLHHWKSWYKEPVTEMATAVKLCGECFLQRWRFGKDTVLANGFSIAIYQDGLDSVDLELVEGTWSRADSDYDFSIGPLRKPFSSHKKKTYKLKTAKLTGSELRQFYVWRDPAKTDRRDEVVELIWNSS

SEQ ID NO: 4950 - DNA, 2685 bp, Muscodor strobelii
  misc_feature: SGI EST ID NO. CUFF.12484.0
  misc_feature: Variant of the nucleotide sequence at SEQ ID NO 4948
aagactatcatgcctttattgggtacatgcttacccactatgttccacagcctacttgctggcgccatcaaggcaaaactatgaccttgactatcgggttcacaattatgattagtactatctgtctcacttcactcacagggctctgtcgcgactccctctcttcaatcaagtacaccaaggtacttttggcataattctaatcgcgaatggctccattgagttggttgccggacgcgcgatagaagagagaatgacgcgcggcggacccacgactttccacgcaagctggccatccgcctcgagagaccaaattcttcccgatgtttgatatatgacatctctcgggatcatgatcatatggtcatcgtccgttcggattgtccaacatatagtctcagcttaacagaaactaatatatgcatccgtcccttggctgactgagccgtctccgtctacacattcggcaaagtcatacgcagatcaacttgtacggcagaagcggcacatctcgctgcgattcgcacatattgttgttggggcacatctttacgcttcgacttcgatttagcaacgtgttgctccttctgaacctgttctttctatggactatttgttcgtttgggctagtttggtttgagtgttttgccatacacgttattcaactttcctcatcactatccatatttgcttcttctcaggctgctcaatccagattgttttctcttatcaagtaaaactgcaatgcgttgtgctatgacgactttcttctaggtcaatatcggtcatgttatatgggcggatttcttacacaaatgttctgtgcttagccatctcttcaggccttgtcgtgctttgcatgactaaatatctatacgacaaaggttcatatttcgatactatcagttccgaattgacaattactgcagccccagaatcccctgtaattcggcacggtcgcccaatcgtttctgactggtctgtgccagaattgatagagacgaaagtaagagaagacagtcagacacccgccggtactcagatacccgaattatttgagaatactagcgatgaaagaacagagcaaggggctggcttcttagacgcttcgaactttgatgacgacataacgcacgagcttgtttcatcagcaaacatccacatccccaaccatgaagaactcagtctcagccagtcctcgtctcaacagacttcgacgacatggtctcatgacttggaggcacttgctcaaattggcgacacgctaggtctggcagatcaagtgttgtactaccgccgacggatcgcacccatcttctccgaccaagtcgcccgcgacgtagtcgtaaacatcactgaaccactactaggtcagggtatcgaactcgacttatccaatttttcggaagcccggctcgcagacttaaagccgatcagcctaacagtcccaaggtcatatgcagaccatgacttcagtcacttcatatttggcgtagcaactgacattgatcgcctccggagatctcgagattctttcgcattctggctatctcacactggtgcacaacttatcgccgttatcacggacggcggccggagaaaccctcaagatatgagcgacctagaaggggaattcgcaagcattggaatcaatgcaacattcttggagccgatcgatgaagcattcacggcgtctcagaatcactttgccgtattagttgacatgattgaatatagcacagccgatactacgtggtttgccatcttggatgacgatactttcttccctagtctccggcctctatctgaagcgttagctacatttgaccataccagagacgcctatgtcggtgcattatccgaggacttcgctgcagttagagcattcggtttcatggccttcggcggcgctgggatatacctttctcgtccccttgcaaaaaagctcggcgatcatgcactagactgcatatatgacggtatcaacctccagggtgacgtcctaatacgagactgcgtttacaagaactcaaaagccaagttggctgcgctctccggattatatcagcaagatatgcgcgacgatgtcagcggtttctttgagtcaggattgagaccgttgaatcttcatcactggaagagctggtacaaggagcctgtcacggagatggctaccgctgtaaaattgtgtggtgaatgttttctccagcgttggagatttggaaaagacactgtgctcgccaatggcttctccatcgccatatatcaagacggtcttgactctgtcgatttggaacttgtcgagggcacatggtctagagcagacagcgattatgacttcagcatagggcccctacgcaaaccgttctcatcacacaagaagaagacttacaagctcaagactgctaagctcacgggtagtgagctcaggcaattctacgtttggcgtgatccagcgaagacggataggcgcgacgaggtcgtcgagttgatatggaatagctcttgaaagacatttcgaatttacggcaactctatgcatactgtcattgtcaggatatctatgcaagacagggcattcttctcaccacttaatggtatcaagcctagttggcaaagttagttgcactgttaattattttgcctcagttgacatgcctatactcgattccgatctactctatc

SEQ ID NO: 4951 - DNA, 813 bp, Muscodor strobelii
  misc_feature: SGI cDNA ID NO. 561356
  misc_feature: Encodes the peptide sequence at SEQ ID NO 4952
atgcctggctcgcttcatcttcgcattatttcgttcaatatccgttatgcgacttcttcaccctttacgaatgaaaggccttgggtagaacgcgagccgttgctcactaaccagataatccatgagcttcgcttcatgaacctgacgcaatcgccggaaattagttcatatgctcagtcaccatcttcatacggctcggccttcgtctgccttcaagaggtactgcataatcaattgatagatgtgctaggcgctttgaacggccttccgcctgataagcgaggcaaggatcctgctccagagcctcattgggactatatcggtgcaggtcgcgacgatggaaaaacaaagggagaatatagccccatcatttttcctgttcaaattttggattcgcttcaccatgagacagtttggctgagcccgaccccagaccggccgagcaagggctggggcgctggaagtattcgaatcctgacagtcggagtgttccagcacaagggaacgaaacggcagctcgtcgctgcaaacacgcatttggataatgtcagctcggagagtcgtcgcgagagcgtccagcttatcctcaagacacttcgtagaatccaccgggaatggtctcgagcgcaaccacttccagttttcttaaccggtgacttcaattcttttccagaccaggaggcttacctcgcgatgagaaacgatggttggttaacggatctgcatgaagccattttaccacggaatagatatggagaagacgtcacgttcaccggatttgagccagaaaaagacgcggacgagcgaggatga

SEQ ID NO: 4952 - protein, 270 aa, Muscodor strobelii
  misc_feature: SGI Peptide ID NO. 561356
  misc_feature (7)..(225): Pfam Id: PF03372 Pfam Desc: Endonuclease/Exonuclease/phosphatase family
  misc_feature (5)..(263): NCBI GI: 145259030 Blast Desc: An04g08900 [Aspergillus niger] gi|134074865|emb|CAK38977.1| protein product [Aspergillus niger]
  misc_feature (5)..(269): NCBI GI: 255956321 Blast Desc: Pc21g19220 [Penicillium chrysogenum Wisconsin 54-1255] gi|211590624|emb|CAP96819.1| Pc21g19220 [Penicillium chrysogenum Wisconsin 54-1255]
  misc_feature (5)..(269): NCBI GI: 71002678 Blast Desc: endonuclease/exonuclease/phosphatase family protein [Aspergillus fumigatus Af293] gi|66853658|gb|EAL93982.1| endonuclease/exonuclease/phosphatase family protein [Aspergillus
  misc_feature (1)..(263): NCBI GI: 115385633 Blast Desc: conserved [Aspergillus terreus NIH2624] gi|114187810|gb|EAU29510.1| conserved [Aspergillus terreus NIH2624]
  misc_feature (5)..(269): NCBI GI: 238502459 Blast Desc: endonuclease/exonuclease/phosphatase family protein [Aspergillus flavus NRRL3357] gi|220691273|gb|EED47621.1| endonuclease/exonuclease/phosphatase family protein [Aspergillus
  misc_feature (5)..(263): NCBI GI: 121716960 Blast Desc: endonuclease/exonuclease/phosphatase family protein [Aspergillus clavatus NRRL 1] gi|119404120|gb|EAW14537.1| endonuclease/exonuclease/phosphatase family protein [Aspergillus
  misc_feature (3)..(267): NCBI GI: 212530796 Blast Desc: endonuclease/exonuclease/phosphatase family protein [Penicillium marneffei ATCC 18224] gi|210074953|gb|EEA29040.1| endonuclease/exonuclease/phosphatase family protein [Penicillium
  misc_feature (5)..(263): NCBI GI: 119482243 Blast Desc: endonuclease/exonuclease/phosphatase family protein [Neosartorya fischeri NRRL 181] gi|119409304|gb|EAW19253.1| endonuclease/exonuclease/phosphatase family protein [Neosartorya
  misc_feature (5)..(269): NCBI GI: 240107021 Blast Desc: Endonuclease/Exonuclease/phosphatase family protein [Coccidioides posadasii C735 delta SOWgp]
  misc_feature (3)..(269): NCBI GI: 242817518 Blast Desc: endonuclease/exonuclease/phosphatase family protein [Talaromyces stipitatus ATCC 10500] gi|218713437|gb|EED12861.1| endonuclease/exonuclease/phosphatase family protein [Talaromyces
MPGSLHLRIISFNIRYATSSPFTNERPWVEREPLLTNQIIHELRFMNLTQSPEISSYAQSPSSYGSAFVCLQEVLHNQLIDVLGALNGLPPDKRGKDPAPEPHWDYIGAGRDDGKTKGEYSPIIFPVQILDSLHHETVWLSPTPDRPSKGWGAGSIRILTVGVFQHKGTKRQLVAANTHLDNVSSESRRESVQLILKTLRRIHREWSRAQPLPVFLTGDFNSFPDQEAYLAMRNDGWLTDLHEAILPRNRYGEDVTFTGFEPEKDADERG

SEQ ID NO: 4953 - DNA, 761 bp, Muscodor strobelii
  misc_feature: SGI EST ID NO. CUFF.12487.0
  misc_feature: Variant of the nucleotide sequence at SEQ ID NO 4951
ctcggagagtcgtcgcgagagcgtccagcttatcctcaagacacttcgtagaatccaccgggaatggtctcgagcgcaaccacttccagttttcttaaccggtgacttcaattcttttccagaccaggaggcttacctcgcgatgagaaacgatggttggttaacggatctgcatgaagccattttaccacggaatagatatggagaagacgtcacgttcaccggatttgagccagaaaaagacgcggacgagcgaggatgaatagattttatttggtttggtccacatggaaagccatcggtaaatctcgactcgaatgcatggtcgccgaatggatatgccgtactgccgaatgtgttcgacgacaagatatatctgagtgatcacagggctgttgttggtgacctgcagctggaaggcgacgcatacccttgatatgacaaagagatgatgtccacgaagcccacctccaaatacatgaagtatatcaattgcgtatcacgcggctcgacggcttggtagacaattcctttttttacatgagcgtctatagcacttccgtaagcttccacgatcaccagacttacctctataagagagccttataatttagctgcctcgtgtgcggcagaattgccaagtagaacagcaaaatatttcgcagtaaacagaccagcgaacatcatggcgtgcagaaaatccttccatcaaacttcgccaggagaaaaattgagggttgaatcaaataaaagcgtatggg

SEQ ID NO: 4954 - DNA, 1728 bp, Muscodor strobelii
  misc_feature: SGI cDNA ID NO. 561357
  misc_feature: Encodes the peptide sequence at SEQ ID NO 4955
atgacaacttgtgcatcggcaagctgggaattcggggctgccgctaagagagcggacacgctgaacaatattcgagatgagtggagactcagcactgcagatcttgcaaaagcgaaggagagcagagatcttacaggccctttcatcgaacagtttttgagacctaatgaaatttccatcatttccaaggatagcgttcgaatcgtcgaggacatcaaagccgccaaactgacagctgttgaggttacaaatgcattctgcaaaactgcagccatcgctcaccaaattaacaactgtcttcacgaggtatttttcgacgaagcgcttgatcgcgcagcatggctcgatgctcagttctcacgagacccaagctcagttggtccccttcatgggctccctgtcagtctgaaagaccaatttcacgttagaggcgtggataccaccatgggctatgtcggctggattggagggaatctaggcgtctctgatccggcgaaaacgcacaaagtcgaaagtcagataaccgccgagctcttatcacttggagcggtattatactgcaaaacgagcctccctcagactctactctttggtgagaccaaaaacaacataatcggcgaaacgttaaacccaatcaatcataacctctcatgtggcggctcttcgggcggggagggtgctctgcaggcacttcggggcagtactctagggcttggtacagacatcggcggctctgtaagaattcccgcagctttcaatggcatcttctctttaaagccaacgccagagagactttcgtaccgttgcgtcgcgaacaataaccctggagagaatacatatcgatctgcagtagggattctaagcaccacgctcgggggcttagatctgctgctacgggcggacctctttacaaaaccatggctcagagatcctgccgttatgcctatgccttttcgcgatcacataactaaagaaatcgaattgcgagcaaatcatgacggaaccgctactgctgccatgccattaaagcttggagtcttgtggacagacagggccgtgcaaccccatccacccgtcacgaggggactgaagattgtcgtagacgctattcgaaatgcgggacacaaagtggtcgattggaacccacctctacagacgaatgcaaaacggattcacatggcgtttctgaacgctgatggggcacatgatattcataatcaactcaacttgtctggcgagccacttctctccgacctgcgatcgtctttccaattgagagaaccgataaatgttctagaataccaggacttgacgcttcagggtatacagtacgagaatgactattccgattactggaactcgactgtcgatgaagacgggcaaattgtcgatgctgtcatcatgcctgttgcgccacatgctgctgttatccctggcaagtattatcacacagcatataccgaagccatcaacttgttaaactacagcgtcgtcgtaattccagtcacaagagcggataaagtgattgacacaattgacgagtcttatcaacctatcaacgacttagatcgaaggaattgggaagcctataaccccgagatttatcatggagggccagtaggaatacagattgtcggacgcaaattcgaggaagaaaagatccttgctattgcgaaaatcgttgtctccgttctcgatcaaggaaagacaaggaaatttataaattaa

SEQ ID NO: 4955 - protein, 575 aa, Muscodor strobelii
  misc_feature: SGI Peptide ID NO. 561357
  misc_feature (81)..(555): Pfam Id: PF01425 Pfam Desc: Amidase
  misc_feature (81)..(268): Pfam Id: PF01425 Pfam Desc: Amidase
  misc_feature (341)..(555): Pfam Id: PF01425 Pfam Desc: Amidase
  misc_feature (9)..(570): NCBI GI: 256726647 Blast Desc: NECHADRAFT_75861 [Nectria haematococca mpVI 77-13-4]
  misc_feature (1)..(565): NCBI GI: 85105556 Blast Desc: NCU10409 [Neurospora crassa OR74A] gi|28923580|gb|EAA32754.1| conserved [Neurospora crassa OR74A]
  misc_feature (8)..(567): NCBI GI: 46116242 Blast Desc: FG03963.1 [Gibberella zeae PH-1]
  misc_feature (8)..(569): NCBI GI: 238845319 Blast Desc: general amidase [Microsporum canis CBS 113480]
  misc_feature (5)..(571): NCBI GI: 67902632 Blast Desc: AN8303.2 [Aspergillus nidulans FGSC A4] gi|40747712|gb|EAA66868.1| AN8303.2 [Aspergillus nidulans FGSC A4] gi|259484227|tpe|CBF80268.1| TPA: conserved [Aspergillus FGSC
  misc_feature (7)..(565): NCBI GI: 154292614 Blast Desc: BC1G_14633 [Botryotinia fuckeliana B05.10] gi|150845847|gb|EDN21040.1| BC1G_14633 [Botryotinia fuckeliana B05.10]
  misc_feature (5)..(561): NCBI GI: 145243556 Blast Desc: An11g02980 [Aspergillus niger] gi|134078977|emb|CAK40630.1| protein product [Aspergillus niger]
  misc_feature (16)..(561): NCBI GI: 238487898 Blast Desc: general amidase GmdA, [Aspergillus flavus NRRL3357] gi|220700066|gb|EED56405.1| general amidase GmdA, [Aspergillus flavus NRRL3357]
  misc_feature (5)..(567): NCBI GI: 240105660 Blast Desc: Amidase family protein [Coccidioides posadasii C735 delta SOWgp]
  misc_feature (7)..(562): NCBI GI: 145241546 Blast Desc: An09g01020 [Aspergillus niger] gi|134077958|emb|CAK49023.1| protein product [Aspergillus niger]
  misc_feature (6)..(565): SWISSPROT Homolog: EC 3.5.1.4 Amidase
MTTCASASWEFGAAAKRADTLNNIRDEWRLSTADLAKAKESRDLTGPFIEQFLRPNEISIISKDSVRIVEDIKAAKLTAVEVTNAFCKTAAIAHQINNCLHEVFFDEALDRAAWLDAQFSRDPSSVGPLHGLPVSLKDQFHVRGVDTTMGYVGWIGGNLGVSDPAKTHKVESQITAELLSLGAVLYCKTSLPQTLLFGETKNNIIGETLNPINHNLSCGGSSGGEGALQALRGSTLGLGTDIGGSVRIPAAFNGIFSLKPTPERLSYRCVANNNPGENTYRSAVGILSTTLGGLDLLLRADLFTKPWLRDPAVMPMPFRDHITKEIELRANHDGTATAAMPLKLGVLWTDRAVQPHPPVTRGLKIVVDAIRNAGHKVVDWNPPLQTNAKRIHMAFLNADGAHDIHNQLNLSGEPLLSDLRSSFQLREPINVLEYQDLTLQGIQYENDYSDYWNSTVDEDGQIVDAVIMPVAPHAAVIPGKYYHTAYTEAINLLNYSVVVIPVTRADKVIDTIDESYQPINDLDRRNWEAYNPEIYHGGPVGIQIVGRKFEEEKILAIAKIVVSVLDQGKTRKFIN

SEQ ID NO: 4956 - DNA, 2842 bp, Muscodor strobelii
  misc_feature: SGI EST ID NO. CUFF.12490.1
  misc_feature: Variant of the nucleotide sequence at SEQ ID NO 4954
ccagcccttgctcggccggtctggggtcgggctcagccaaactgtctcatggtgaagcgaatccaaaatttgaacaggaaaaatgatggggctatattctccctttgtttttccatcgtcgcgacctgcaccgatatagtcccaatgaggctctggagcaggatccttgcctcgcttatcaggcggaaggccgttcaaagcgcctagcacatctatcaattgattatgcagtacctcttgaaggcagacgaaggccgagccgtatgaagatggtgactgagcatatgaactaatttccggcgattgcgtcaggttcatgaagcgaagctcatggattatctggttagtgagcaacggctcgcgttctacccaaggcctttcattcgtaaagggtgaagaagtcgcataacggatattgaacgaaataatgcgaagatgaagcgagccaggcatttcaagacttggttgttcaagactccacaattatgttaggtagccgcttgaggtagccgcatgcagtatcttcaatccaacactaggtgacgattctgcagattgcgtacccgtgttttcattcacagttcaagaggatgtgcgagggggttgcccagggacctacaatacattgtttccgttcatgcttcgggttatggatgccttgcctcttgagcttgagcacaaaagctggaagtcactgccagtatggtgcggggtatagtttggcaacatcggcaatgttattctacctccaacacaggatacccatgtatcgtctagttgccagcgacttttgtttctcgagatccgcgtcaactgaaatctgccccgacaatctcctgttgttcgtaaagaaaaggcgctagtgaacttgattatctagatcaggtattggtcatgacaacttgtgcatcggcaagctgggaattcggggctgccgctaagagagcggacacgctgaacaatattcgagatgagtggagactcagcactgcagatcttgcaaaagcgaaggagagcagagatcttacaggccctttcatcgaacagtttttgagacctaatgaaatttccatcatttccaaggatagcgttcgaatcgtcgaggacatcaaagccgccaaactgacagctgttgaggttacaaatgcattctgcaaaactgcagccatcgctcaccaaattaacaactgtcttcacgaggtatttttcgacgaagcgcttgatcgcgcagcatggctcgatgctcagttctcacgagacccaagctcagttggtccccttcatgggctccctgtcagtctgaaagaccaatttcacgttagaggcgtggataccaccatgggctatgtcggctggattggagggaatctaggcgtctctgatccggcgaaaacgcacaaagtcgaaagtcagataaccgccgagctcttatcacttggagcggtattatactgcaaaacgagcctccctcagactctactctttggtgagaccaaaaacaacataatcggcgaaacgttaaacccaatcaatcataacctctcatgtggcggctcttcgggcggggagggtgctctgcaggcacttcggggcagtactctagggcttggtacagacatcggcggctctgtaagaattcccgcagctttcaatggcatcttctctttaaagccaacgccagagagactttcgtaccgttgcgtcgcgaacaataaccctggagagaatacatatcgatctgcagtagggattctaagcaccacgctcgggggcttagatctgctgctacgggcggacctctttacaaaaccatggctcagagatcctgccgttatgcctatgccttttcgcgatcacataactaaagaaatcgaattgcgagcaaatcatgacggaaccgctactgctgccatgccattaaagcttggagtcttgtggacagacagggccgtgcaaccccatccacccgtcacgaggggactgaagattgtcgtagacgctattcgaaatgcgggacacaaagtggtcgattggaacccacctctacagacgaatgcaaaacggattcacatggcgtttctgaacgctgatggggcacatgatattcataatcaactcaacttgtctggcgagccacttctctccgacctgcgatcgtctttccaattgagagaaccgataaatgttctagaataccaggacttgacgcttcagggtatacagtacgagaatgactattccgattactggaactcgactgtcgatgaagacgggcaaattgtcgatgctgtcatcatgcctgttgcgccacatgctgctgttatccctggcaagtattatcacacagcatataccgaagccatcaacttgttaaactacagcgtcgtcgtaattccagtcacaagagcggataaagtgattgacacaattgacgagtcttatcaacctatcaacgacttagatcgaaggaattgggaagcctgtcagttgtcgctattcaagctaagtatcgaacccctatggcagcctatgctaactagctagataaccccgagatttatcatggagggccagtaggaatacagattgtcggacgcaaattcgaggaagaaaagatccttgctattgcgaaaatcgttgtctccgttctcgatcaaggaaagacaaggaaatttataaattaaacaacgacagcaagtgtatgagatacgtcactatgagcgcacatgttccgacggttctggtagctgtggcctggcagcagcacgtgaggttgttgggattgttgttatgaatagtacgtgagctactcttttcttttcttttcttttcttttctttct

SEQ ID NO: 4957 - DNA, 732 bp, Muscodor strobelii
  misc_feature: SGI cDNA ID NO. 561358
  misc_feature: Elevated expression when VOC is produced
  misc_feature: Encodes the peptide sequence at SEQ ID NO 4958
aagaagaagaagaagaagaagaagaagaagaagaagaagaagaagaagaagaagaagaagaagaagaagaagaagaagaagaagaagaagaacaagaagaagaacaagaagatacaagatggaacagagctgagactagcaagcgcacagctgaccgtggacgcccagttgcctgaatatcctttgaatagcaacaacccatgcgcacaccggaagaacatcatggaggacgaaagcgaagaatacaacagagagaatagagggaatagagagctccacgacccaagcgaagacctcgatagaggggtctttgagaaggcatctgctgctgatcctggtgtttaccataacggcatgatgctgtggataaactgcaaggccttttacagacagtccgggtcgaagaaatggattagcatgagggacacggggcaatggaggctggaaaatggctttgagaacccccctcagttctatgctgccgacgatatctactatgatgctgttgctgatggtacctgctgcggtttcgttgccaattctgagacagcgtcgggtactctccacttcgatatattcgccgttcttcagaaccatctcacgccgacgcacaacctggatatgaatgtcgaagagctccctagctacgtgttggatctctgttgcggagatgtcgagaacgaggcaagccttgtctggagtcggtggaaaagacaatacgacggaggctag

SEQ ID NO: 4958 - protein, 243 aa, Muscodor strobelii
  misc_feature: SGI Peptide ID NO. 561358
  misc_feature: Useful for introducing or modulating the production of volatile compounds
KKKKKKKKKKKKKKKKKKKKKKKKKKKKKKNKKKNKKIQDGTELRLASAQLTVDAQLPEYPLNSNNPCAHRKNIMEDESEEYNRENRGNRELHDPSEDLDRGVFEKASAADPGVYHNGMMLWINCKAFYRQSGSKKWISMRDTGQWRLENGFENPPQFYAADDIYYDAVADGTCCGFVANSETASGTLHFDIFAVLQNHLTPTHNLDMNVEELPSYVLDLCCGDVENEASLVWSRWKRQYDGG

SEQ ID NO: 4959 - DNA, 2080 bp, Muscodor strobelii
  misc_feature: SGI EST ID NO. CUFF.12493.0
  misc_feature: Variant of the nucleotide sequence at SEQ ID NO 4957
cccaactgtagagcactttcagagacaggtctgagggaggaccgccctttggctgagttgggtaccaattttctctcgcccaaagcgtcacgactatgttgagacaaagactcttagatggaacagagctgagactagcaagcgcacagctgaccgtggacgcccagttgcctgaatatcctttgaatagcaacaacccatgcgcgtgggcgagcgacgcgaggctttttccagaccataagctcgcgcgcgaccaaggacaatagacaccggaagaacatcatggaggacgaaagcgaagaatacaacagagagaatagagggaatagagagctccacgacccaagcgaagacctcgatagaggggtctttgagaaggcatctgctgctgatcctggtgtttaccataacggcatgatgctgtggataaactgcaaggccttttacagacagtccgggtcgaagaaatggattagcatgagggacacggggcaatggaggctggaaaatggctttgaggtctatttaactggaggagatatcaggaggaggaaatgaagttcgaatacgacgggtcatgtccctcccagagcgcacgctttatagagtctaatccaactgcttccacttccaggctgatccgagcaggactttccaccgtatcccagatcgtcatggacaatgaactcgaaggcatctcccctttgagaagctcggcaaatctttgagggctctggcgaaatgcgctgcccaccgttttcccaaacattttgaccacccccgcgtccagaacccccctcagttctatgctgccgacgatatctactatgatgctgttgctgatggtacctgctgcggtttcgttgccaattctgagacagcgtcgggtactctccacttcgatatattcgccgttcttcagaaccatctcacgccgacgcacaacctggatatgaatgtcgaagagctccctagctacgtgttggatctctgttgcggagatgtcgagaacgaggcaagccttgtctggagtcggtggaaaagacaatacgacggaggctagaccggtatcatcattcttctcaatcgcgctacaaatgtaactcggaaagacgaaggggaggttctttgccattggccaacaatgatcatatttcttgtcagattcaatctctgcccatttggatgacattccggacgtcaaatggcccgcagaatccgccgagttatcagacagtctcaaggggcggtcgatcaagccgctgtctggtgccgtaatgccagggtgcacaggagaggccctcggaatctgacgggtgcttgtgaaactcaatggtcgagaaggtccggttacttcagtgcgcgcccgttttgacggccggtgagggctctcagaagtgtctgtccgcgtagtctctagtcgtgggggtagtttgacgtgaagagactttaagatccctgaacagtcagttaaggatcgtttttcaaggcgaggatacgtactgcaacgcttctggctccgagaacaataaaggatacgctggatgtgctgatcgactgagctattggtttcaatccgagaaatatcttcgataaccgtttggagtgcgaaagttgatagtcgttttatatagtccttgattcgcccgtccacgtggaggaaagcataccaagccttaagtccaccattcactagaaaggatagggagacttcgtcaagcggtggactgcgagaaattgcgtccaaggcattgtcgaatccacgcggcgtcttcttctcaggagatatatctgccacaagacaatggcggagggcttctacaattgcactcgtatccctgtctgacaaatcggcagaccgactgccaatctcatcgatcatggccattgcttgcgcgaacaatgcatgtcctaggtgaacatgttcgcatagtccgacggggagatataggggtacttaaataagtatgcgcaaagatcgagtcaattatgcgttatgtatcaaagctcctcccgcctatttacacatcgtcaacgcgagtacttttcgactgattgaagaatgtcgcgcaaacttgag

SEQ ID NO: 4960 - DNA, 1257 bp, Muscodor strobelii
  misc_feature: SGI cDNA ID NO. 561359
  misc_feature: Encodes the peptide sequence at SEQ ID NO 4961
atggcagacaatgtggactacgatgggctgaccgcagagttcgtcactatgactggcgcacctgccgaggacgccgaacgatacctctctgcctgcggctgggaaatgactcccgctatccagtcctacctcgccgacgaagacgagagacgcgacaacgccgccgctgccggccccagcgatgccgcccccgatgactacaccggtccccgtaccctcgacggccgtcctgctccccaagctatccccaccactgccaacacatcccgtaaggtccagcctaagaagaagggcctggctacactgagctctctcggtggcggtggctctcatgaccacgatgacgacgacagcgactacgacgacgatgacgcccatagagacacctatgccggaggcgagaaaagtggccttgctgtccaggatcccagtcaacgctcctccgaccctaagcgcatcatcagtgatttgctgtccaaggccaagagcaatcagcagcgccccgaaggctcatcttccgctggtccctcgagctctgcttccttccgaggcaccggccagactcttggcggcgagggagctgagagccgagtcatccccgatccccgtggtcctccttctgcccgcgaacaagcacgagccaccgccgccgtccaggagcgcacacttcatctctggcaagacggcttcagtgtcgatgatggcgagcttcactccttcagcgatcccgagaatagcgaagcccttcgcatgatccagcagggtcgcgcaccccttcacctcatgaacgttcgctatgacgagcctatcgacgtgaagctgcagcaacatgccgagaactggcgtcaacttcccaaaatctacaagcccttcggcggcgagggccgacgtcttggcagccccgtacccggcgacggatccgctgcgccctcactcccaattctcagcacatccaacacggcggccgctgctccttccacgtctgccgcccctaccgtgcccgtggacgagtcgcagcccacgatcatgatccgcatccagatgctcgacggttcgagactccccgctcgcttcaacaccacccagactgtcaacgacatctacgagttcgtcagccgcgcatctcccggcataggagccggtggatgggttctagccaccacgttccccaataaggaacacaccgacaagtccttggttttgggcgacatggccgagtttaagaagggtggtacagctgttgtgaagaaaacctag

SEQ ID NO: 4961 - protein, 418 aa, Muscodor strobelii
  misc_feature: SGI Peptide ID NO. 561359
  misc_feature (223)..(296): Pfam Id: PF08059 Pfam Desc: SEP domain
  misc_feature (336)..(417): Pfam Id: PF00789 Pfam Desc: UBX domain
  misc_feature (336)..(396): Pfam Id: PF00789 Pfam Desc: UBX domain
  misc_feature (6)..(416): NCBI GI: 256731160 Blast Desc: NECHADRAFT_105396 [Nectria haematococca mpVI 77-13-4]
  misc_feature (6)..(418): NCBI GI: 46122973 Blast Desc: FG05864.1 [Gibberella zeae PH-1]
  misc_feature (1)..(416): NCBI GI: 171693307 Blast Desc: protein product [Podospora anserina] gi|170946602|emb|CAP73404.1| protein product [Podospora anserina]
  misc_feature (1)..(416): NCBI GI: 39940716 Blast Desc: MGG_04882 [Magnaporthe grisea 70-15] gi|145010891|gb|EDJ95547.1| MGG_04882 [Magnaporthe grisea 70-15]
  misc_feature (13)..(416): NCBI GI: 261359067 Blast Desc: UBX domain-containing protein [Verticillium albo-atrum VaMs.102]
  misc_feature (5)..(416): NCBI GI: 85104267 Blast Desc: NCU01100 [Neurospora crassa OR74A] gi|18376227|emb|CAD21342.1| related to potential regulatory subunit for Glc7p [Neurospora crassa] gi|28923260|gb|EAA32476.1|
  misc_feature (6)..(376): NCBI GI: 116198721 Blast Desc: CHGG_07516 [Chaetomium globosum CBS 148.51] gi|88178795|gb|EAQ86263.1| CHGG_07516 [Chaetomium globosum CBS 148.51]
  misc_feature (1)..(416): NCBI GI: 156052559 Blast Desc: SS1G_06445 [Sclerotinia sclerotiorum 1980] gi|154704225|gb|EDO03964.1| SS1G_06445 [Sclerotinia sclerotiorum 1980]
  misc_feature (1)..(416): NCBI GI: 154308870 Blast Desc: BC1G_07963 [Botryotinia fuckeliana B05.10] gi|150852589|gb|EDN27781.1| BC1G_07963 [Botryotinia fuckeliana B05.10]
  misc_feature (4)..(416): NCBI GI: 115433060 Blast Desc: conserved [Aspergillus terreus NIH2624] gi|114189519|gb|EAU31219.1| conserved [Aspergillus terreus NIH2624]
MADNVDYDGLTAEFVTMTGAPAEDAERYLSACGWEMTPAIQSYLADEDERRDNAAAAGPSDAAPDDYTGPRTLDGRPAPQAIPTTANTSRKVQPKKKGLATLSSLGGGGSHDHDDDDSDYDDDDAHRDTYAGGEKSGLAVQDPSQRSSDPKRIISDLLSKAKSNQQRPEGSSSAGPSSSASFRGTGQTLGGEGAESRVIPDPRGPPSAREQARATAAVQERTLHLWQDGFSVDDGELHSFSDPENSEALRMIQQGRAPLHLMNVRYDEPIDVKLQQHAENWRQLPKIYKPFGGEGRRLGSPVPGDGSAAPSLPILSTSNTAAAAPSTSAAPTVPVDESQPTIMIRIQMLDGSRLPARFNTTQTVNDIYEFVSRASPGIGAGGWVLATTFPNKEHTDKSLVLGDMAEFKKGGTAVVKKT

SEQ ID NO: 4962 - DNA, 2335 bp, Muscodor strobelii
  misc_feature: SGI EST ID NO. CUFF.12597.2
  misc_feature: Variant of the nucleotide sequence at SEQ ID NO 4960
cgacacagaagctgcctgcctgccgcttgcttagtagcaactgtacttgcccgccgtaacctgctcaacaacattcgacaacaaaacggcggataaccttaacttcaattttctgccatcccatcttactccccaccagtccgtcagtctcgtggcgcgtcggctcgtttccattcaccataggctcacatgcgctctaccagtattttcccctaatagtcccccgcatctgtcgacaaattccagtcgaatcctccgcaatcgcgtcgacttcgacgttgtgacaaacgttgccgacagtcagcgcactctacactttccatctacgcaccgccgtcaggcatccaacatggcagacaatgtggactacgatgggctgaccgcagagttcgtcactatgactggcgcacctgccgaggacgccgaacgatacctctctgcctgcggctgggaaatgactcccgctatccagtcctacctcgccgacgaagacgagagacgcgacaacgccgccgctgccggccccagcgatgccgcccccgatgactacaccggtccccgtaccctcgacggccgtcctgctccccaagctatccccaccactgccaacacatcccgtaaggtccagcctaagaagaagggcctggctacactgagctctctcggtggcggtggctctcatgaccacgatgacgacgacagcgactacgacgacgatgacgcccatagagacacctatgccggaggcgagaaaagtggccttgctgtccaggatcccagtcaacgctcctccgaccctaagcgcatcatcagtgatttgctgtccaaggccaagagcaatcagcagcgccccgaaggctcatcttccgctggtccctcgagctctgcttccttccgaggcaccggccagactcttggcggcgagggagctgagagccgagtcatccccgatccccgtggtcctccttctgcccgcgaacaagcacgagccaccgccgccgtccaggagcgcacacttcatctctggcaagacggcttcagtgtcgatgatggcgagcttcactccttcagcgatcccgagaatagcgaagcccttcgcatgatccagcagggtcgcgcaccccttcacctcatgaacgttcgctatgacgagcctatcgacgtgaagctgcagcaacatgccgagaactggcgtcaacttcccaaaatctacaagcccttcggcggcgagggccgacgtcttggcagccccgtacccggcgacggatccgctgcgccctcactcccaattctcagcacatccaacacggcggccgctgctccttccacgtctgccgcccctaccgtgcccgtggacgagtcgcagcccacgatcatgatccgcatccagatgctcgacggttcgagactccccgctcgcttcaacaccacccagactgtcaacgacatctacgagttcgtcagccgcgcatctcccggcataggagccggtggatgggttctagccaccacgttccccaataaggaacacaccgacaagtccttggttttgggcgacatggccgagtttaagaagggtggtacagctgttgtgaagaaaacctagggggtttcttcctgagctcccgaagatacccgatgaaggtgatctcgacgaagactatcatgaacgcgcagtggctggacagctttgccctgactgcgatcgtaataccgattgtttttttatgggattgtacgtagactctgcgagacgttacactttgcgatggtcgccgtttcagattagatacgaaaacgacggtatagataaccaacaaaaggttaataagagaacaaaatgatacaacatgatactacacgaataatgttagctataccgactgatggtgttacgtggttggccatgttgccttgttttcaaatgacctcgcctcacctaccttgcctaacgtctgacagttggatgcaattggtgatctatagtgttttgcacttggattttctcaagtgtccgtagcaactacggactaatctctcactgaaaaataatcacaaagaagaaaagtcggcggtcttcgatattgacctagatttgatatatgttgcaaatctattgctgtagttctcaagagtcccggaatggagctacttacggggatcttctcagtttgctttgagcgcatcccggattgcgggaatgacctgggttccaccctcttcccgtcgacctctaacatcaacttcatcaccctttacgaggttggaactggtacgtaagtgtgtaggtagatatgtctatctaaactgtatatcctcaattgtttaataccaa

SEQ ID NO: 4963 - DNA, 384 bp, Muscodor strobelii
  misc_feature: SGI cDNA ID NO. 561360
  misc_feature: Encodes the peptide sequence at SEQ ID NO 4964
atggattccgaagagcacaaccccatggccgagtcgggcgtcaccatccgctccgatagtgagcaatactcggctggcgaagacctatcctcctctccaccctcctcctcctcgcccgctatggttctctacgaatctccgacgccgtggtccatcctccgcggcgtcgccatcaaccttttcttgcccttcatcaacggcatgatgctgggctttggcgagctgttcgcccacgaggctgctttccggttaggctggagcggcaccagaatattcccgttgtcaagaagacaagcgcaccccatcggcccgggcatcgagatccgcgacaagccgacgaggccaagacctggaggcctcgatgatctgaccagccttgagtga

SEQ ID NO: 4964 - protein, 127 aa, Muscodor strobelii
  misc_feature: SGI Peptide ID NO. 561360
  misc_feature (13)..(97): Pfam Id: PF08219 Pfam Desc: Outer membrane protein TOM13
  misc_feature (1)..(127): NCBI GI: 171693305 Blast Desc: protein product [Podospora anserina] gi|170946601|emb|CAP73403.1| protein product [Podospora anserina]
  misc_feature (4)..(127): NCBI GI: 39940714 Blast Desc: MGG_04883 [Magnaporthe grisea 70-15] gi|145010890|gb|EDJ95546.1| MGG_04883 [Magnaporthe grisea 70-15]
  misc_feature (3)..(127): NCBI GI: 46122971 Blast Desc: FG05863.1 [Gibberella zeae PH-1]
  misc_feature (1)..(127): NCBI GI: 261359068 Blast Desc: mitochondrial import protein [Verticillium albo-atrum VaMs.102]
  misc_feature (1)..(127): NCBI GI: 256731563 Blast Desc: NECHADRAFT_85132 [Nectria haematococca mpVI 77-13-4]
  misc_feature (1)..(127): NCBI GI: 85104270 Blast Desc: NCU01101 [Neurospora crassa OR74A] gi|50401630|sp|Q8X0G8.1|MIM1_NEUCR RecName: Full=Mitochondrial import protein 1 gi|18376226|emb|CAD21341.1| conserved crassa]
  misc_feature (9)..(127): NCBI GI: 169776513 Blast Desc: [Aspergillus oryzae RIB40] gi|238503219|ref|XP_002382843.1| mitochondrial import protein, [Aspergillus flavus NRRL3357] gi|83771458|dbj|BAE61590.1| protein
  misc_feature (1)..(127): NCBI GI: 154308872 Blast Desc: BC1G_07964 [Botryotinia fuckeliana B05.10] gi|150852590|gb|EDN27782.1| BC1G_07964 [Botryotinia fuckeliana B05.10]
  misc_feature (1)..(127): NCBI GI: 115433062 Blast Desc: conserved [Aspergillus terreus NIH2624] gi|114189520|gb|EAU31220.1| conserved [Aspergillus terreus NIH2624]
  misc_feature (9)..(127): NCBI GI: 70984950 Blast Desc: conserved [Aspergillus fumigatus Af293] gi|66845609|gb|EAL85943.1| conserved [Aspergillus fumigatus Af293] gi|159126094|gb|EDP51210.1| conserved [Aspergillus A1163]
MDSEEHNPMAESGVTIRSDSEQYSAGEDLSSSPPSSSSPAMVLYESPTPWSILRGVAINLFLPFINGMMLGFGELFAHEAAFRLGWSGTRIFPLSRRQAHPIGPGIEIRDKPTRPRPGGLDDLTSLE

SEQ ID NO: 4965 - DNA, 915 bp, Muscodor strobelii
  misc_feature: SGI EST ID NO. CUFF.12500.0
  misc_feature: Variant of the nucleotide sequence at SEQ ID NO 4963
cccagatccaagctgcagcttcgactccagctcgacatttgtcgtcaacatctgccgaaatcgcttgtctcaacttccaagtgctttgatacagcaccgccctaatacggacatccaaatacgggaatgatcgaaaacaggtagcccagctcgaaccagccacatcgttgcctcatcattagcaaccaattttccacgtcatcggtccgctagacacgatggattccgaagagcacaaccccatggccgagtcgggcgtcaccatccgctccgatagtgagcaatactcggctggcgaagacctatcctcctctccaccctcctcctcctcgcccgctatggttctctacgaatctccgacgccgtggtccatcctccgcggcgtcgccatcaaccttttcttgcccttcatcaacggcatgatgctgggctttggcgagctgttcgcccacgaggctgctttccggttaggctggagcggcaccagaatattcccgttgtcaagaagacaagcgcaccccatcggcccgggcatcgagatccgcgacaagccgacgaggccaagacctggaggcctcgatgatctgaccagccttgagtgatggtacacatgagaggatatatagctatataacatcaacatgagcagctgaacgatggtgccgccaatgagcactacacaccattcgaaatttaggaagtgatgaccaaagcggcggcataagagatcatcgaactggccgtggcggatcgctctatcgtttgcttttcgtacgggctctgctagacatcttcactttcaatggacatatgagcacctcaatgtacatatcacatgcatagcacatagtgtcaataccgaactagagttctactcataagccagaaacccgcaattcatgtgctcgagcttgc

SEQ ID NO: 4966 - DNA, 1482 bp, Muscodor strobelii
  misc_feature: SGI cDNA ID NO. 561361
  misc_feature: Reduced expression when VOC is produced
  misc_feature: Encodes the peptide sequence at SEQ ID NO 4967
atgctccccagtagaggactgtcgagaaccagcgcggcctctgcgctgcggtattctttcaagtctgtccgaacgccatcgacacggcaattctcccaagcccggtcgcaaacacagtctcttctctcccagaccagctccttccgatcgacccagctacggaatgggttgataatacctgccgggtcgctgggactcgcctctggcgtattcgcccaacgatcgggagcggcgcgcaacctctccttctggggctacggctccaagtccgacacccctaaaccctcagagccatccggtgttgcctcatcacagccggcggtagagcaacttcaagctcaggctccgactcccgaggcaacagccgttgaaagtgctgccgctaccaccccatctccgccggtcgctacacccgagttcagcttcgataacatcaacttggagacggtattcaccgacatccccgagcgcatcggcttcctcaaggagtatggcctcgactacagctggggcccgacctcgtgcgtgcaatgggccctcgagcacatccacgtctacgggggactgccctggtggggatccatcgccgccatggccgtgctcttccgcgtcgcagccttctacccgacgctggtcggcaccaagcacgccgcccgcctgcagaaggtccagcgggaccccaagttcctcgccaagaaggccgagatggaccaggcccgcgccatgggcaacacccaggccgtcatggtcgcccagtcccagacccgcgccctcatgaaggagtccggcgccacgctctacaagtccgtcctcgggcccctgctcaccgtccccttcagtttcggtgcctttcgcctgatgcgaggcatggccaacctgcccgtccccagcttggaggccggcggcttctggtgggttcaggatctgaccttctccgacccctactacatcctgcccgccgtcagtggcgtcctgacctatttcatgttcaaggcaacgcaggccgccaccggcaaccagaccgagcaacaaaagaacatgatgagcataatgacgtatgttctgccgccattgacgttcgtctttaccgcatggctgccagccgccgtgcagtggtttctgctcgtcttctccggcgcaaccatcgtccagtcgaggctgcttctgaacccttccatccgcgccctcgccaacatcccccctctgaccaagccctccctttctacgctcgtgcccatgtaccaagcccccgactccaaacccgccacttctgcgccgtccgagagtattcaagacaaattatcaaaggggatgaagagcgctacgggcaagttaggtgagatgacgggcaacacagacgagaggctgcgctggaagaaggcccagaattacgaggagaagcgcgctgctgaagagagacagaagagacagaggagaattgaagacatgaggagaggtaaagaggagagaaaccgatactag

SEQ ID NO: 4967 - protein, 493 aa, Muscodor strobelii
  misc_feature: SGI Peptide ID NO. 561361
  misc_feature (190)..(388): Pfam Id: PF02096 Pfam Desc: 60Kd inner membrane protein
  misc_feature (1)..(487): NCBI GI: 261359069 Blast Desc: mitochondrial export translocase Oxa1 [Verticillium albo-atrum VaMs.102]
  misc_feature (1)..(493): NCBI GI: 256731562 Blast Desc: NECHADRAFT_48589 [Nectria haematococca mpVI 77-13-4]
  misc_feature (1)..(493): NCBI GI: 46122969 Blast Desc: FG05862.1 [Gibberella zeae PH-1]
  misc_feature (1)..(493): NCBI GI: 85104274 Blast Desc: NCU01102 [Neurospora crassa OR74A] gi|28923262|gb|EAA32478.1| [Neurospora crassa OR74A]
  misc_feature (1)..(493): NCBI GI: 18376225 Blast Desc: related to cytochrome oxidase processing protein OXA1 [Neurospora crassa]
  misc_feature (153)..(493): NCBI GI: 16904212 Blast Desc: AF435863_1 mitochondrial export translocase Oxa1 [Neurospora crassa]
  misc_feature (102)..(489): NCBI GI: 116198719 Blast Desc: CHGG_07515 [Chaetomium globosum CBS 148.51] gi|88178794|gb|EAQ86262.1| CHGG_07515 [Chaetomium globosum CBS 148.51]
  misc_feature (134)..(489): NCBI GI: 171693303 Blast Desc: protein product [Podospora anserina] gi|170946600|emb|CAP73402.1| protein product [Podospora anserina]
  misc_feature (1)..(492): NCBI GI: 39940712 Blast Desc: MGG_04884 [Magnaporthe grisea 70-15] gi|145010889|gb|EDJ95545.1| MGG_04884 [Magnaporthe grisea 70-15]
  misc_feature (121)..(493): NCBI GI: 156052557 Blast Desc: SS1G_06444 [Sclerotinia sclerotiorum 1980] gi|154704224|gb|EDO03963.1| SS1G_06444 [Sclerotinia sclerotiorum 1980]
  misc_feature: Useful for introducing or modulating the production of volatile compounds
MLPSRGLSRTSAASALRYSFKSVRTPSTRQFSQARSQTQSLLSQTSSFRSTQLRNGLIIPAGSLGLASGVFAQRSGAARNLSFWGYGSKSDTPKPSEPSGVASSQPAVEQLQAQAPTPEATAVESAAATTPSPPVATPEFSFDNINLETVFTDIPERIGFLKEYGLDYSWGPTSCVQWALEHIHVYGGLPWWGSIAAMAVLFRVAAFYPTLVGTKHAARLQKVQRDPKFLAKKAEMDQARAMGNTQAVMVAQSQTRALMKESGATLYKSVLGPLLTVPFSFGAFRLMRGMANLPVPSLEAGGFWWVQDLTFSDPYYILPAVSGVLTYFMFKATQAATGNQTEQQKNMMSIMTYVLPPLTFVFTAWLPAAVQWFLLVFSGATIVQSRLLLNPSIRALANIPPLTKPSLSTLVPMYQAPDSKPATSAPSESIQDKLSKGMKSATGKLGEMTGNTDERLRWKKAQNYEEKRAAEERQKRQRRIEDMRRGKEERNRY

SEQ ID NO: 4968 - DNA, 1771 bp, Muscodor strobelii
  misc_feature: SGI EST ID NO. CUFF.12509.0
  misc_feature: Variant of the nucleotide sequence at SEQ ID NO 4966
caaaaataatttgggcgccatctttcgattcgagtcgatggccgaattgatcgtggaacttggcgattggcgttgttgacgacgagcccatcggcgcaaaccacctcacacatcatgctccccagtagaggactgtcgagaaccagcgcggcctctgcgctgcggtattctttcaagtctgtccgaacgccatcgacacggcaattctcccaagcccggtcgcaaacacagtctcttctctcccagaccagctccttccgatcgacccagctacggaatgggttgataatacctgccgggtcgctgggactcgcctctggcgtattcgcccaacgatcgggagcggcgcgcaacctctccttctggggctacggctccaagtccgacacccctaaaccctcagagccatccggtgttgcctcatcacagccggcggtagagcaacttcaagctcaggctccgactcccgaggcaacagccgttgaaagtgctgccgctaccaccccatctccgccggtcgctacacccgagttcagcttcgataacatcaacttggagacggtattcaccgacatccccgagcgcatcggcttcctcaaggagtatggcctcgactacagctggggcccgacctcgtgcgtgcaatgggccctcgagcacatccacgtctacgggggactgccctggtggggatccatcgccgccatggccgtgctcttccgcgtcgcagccttctacccgacgctggtcggcaccaagcacgccgcccgcctgcagaaggtccagcgggaccccaagttcctcgccaagaaggccgagatggaccaggcccgcgccatgggcaacacccaggccgtcatggtcgcccagtcccagacccgcgccctcatgaaggagtccggcgccacgctctacaagtccgtcctcgggcccctgctcaccgtccccttcagtttcggtgcctttcgcctgatgcgaggcatggccaacctgcccgtccccagcttggaggccggcggcttctggtgggttcaggatctgaccttctccgacccctactacatcctgcccgccgtcagtggcgtcctgacctatttcatgttcaaggcaacgcaggccgccaccggcaaccagaccgagcaacaaaagaacatgatgagcataatgacgtatgttctgccgccattgacgttcgtctttaccgcatggctgccagccgccgtgcagtggtttctgctcgtcttctccggcgcaaccatcgtccagtcgaggctgcttctgaacccttccatccgcgccctcgccaacatcccccctctgaccaagccctccctttctacgctcgtgcccatgtaccaagcccccgactccaaacccgccacttctgcgccgtccgagagtattcaagacaaattatcaaaggggatgaagagcgctacgggcaagttaggtgagatgacgggcaacacagacgagaggctgcgctggaagaaggcccagaattacgaggagaagcgcgctgctgaagagagacagaagagacagaggagaattgaagacatgaggagaggtaaagaggagagaaaccgatactagatgacgagccgatgacgatgtcggctgttgtgtattatcaccacccccttatacataaatactgtacatttgtaagatagttgctggctgtataattaggtaagtctacagttggcacgatggatactgcatatagaagttaattgcatcaaattggtggctccttgccttttcg

SEQ ID NO: 4969 - DNA, 2364 bp, Muscodor strobelii
  misc_feature: SGI cDNA ID NO. 561362
  misc_feature: Encodes the peptide sequence at SEQ ID NO 4970
atggatcctctgacggcggtggccctggctggcaacatcttccaatttatctcatttgtaggcggactcctagacaagacgcacaagcttcacgtctcggctacaggcaccagccgcgaaagtgacgatatacaagacatctgtagttctctcatgaaactcagcactgatctggagaaaccgccaagctcgtcgagttcgtctccgaatgcattttctagaaagctttcgcgacatcagaaagaactcaccgagtgcgcggctgcgtgtagccgggattgcgaagatctacttcgcattctcgccaagctgaaggctaaagcgacaaacggtccacggttgtggaggagcttccgggcagctctggctgaaatacagaaagaagatgaaatcaatgacttgcgatcgcggattgctgaccgcgagcgacgcatgactttcctggtatgcatggtgtcaaataagagcatagaagaactcgaagctctagtcaagagcattggtcaggggatttggaaaatcaatgccgactcgaggttagacctactcataaaggaagtcagcattctcaaagagtcggtaactacatataagccggccgaggaccccacgacggcttcgttcaacaacttatgtgatggtttcttagagttttgggtttctggaaagccgggatctgggaaatcgacgttcatgaaatggatcgatgacaacgagaagacaaaagagtgcctaatgtcttgggctgggaagcagcatcgaccgctgattgtcagtcactatttcactgtgtacggaacaccgatacagcgatcgctcgaaggtctccttcggtcgcttatttttagtgtgttagtcgaagttccgaggttaatcccaaagttggtgccagaccgctggaacaggatcggcgagcagcctcgatggacacagcctgagctagagtccgttttgagactcctcgaggctgagactatgtcagtcaagatatgctacctaattgatggcttagacgagtacgacggagaccacctagacatctgccagacgcttaagcagatgtctcgaaatccttcaatcaaggtatgcgtctcaagtcgaccttggaatgtgttcgaggacgtacttggaaaccaggctgattcaaaactctacatgcatgatcttacacacggtgatatgtccagctacacggagacacgactaaaagagcatcctcggtggactgcacttgaacaagcagccgggtctatgttatctcggtctctcatcgatgaggttatcgagagatctaatggtgttttcctttgggttacactggtggtcaatctgcttcgcgaaggtctgaataacgacgatagtatttttgacctgcagagacggctgtccagctatcccgtagacctcgaaccattcttcaggcatatgattgaagctgtagatcctttctatagcgagaaaatggcggggatgctattaattgctaccgaagcaacgacgcctctgcgtttggaagtttacttgttccatgaaatggaatatgctgacgagaactatgcgttcgacggaccggaagaactcatgactaccgattccgcagaactcgacaagctctacggtactgtatcacggaggatcaacggactatgtaaagggcttttggagcgcaacgatactaaaattgatttcttgcaccgaacagtctacgacttcctccgcaccgaagacaccgaaactcgagtttggcttctcaatgaactgctgaaggatagcgacgatctgctgaggattccagtcacagatccattcagaacttggaaagcatttttcttgaatgagctattttacataccaaatgcaccgctagggaggcactcctatcatgcgctgagcgacactagttggctcaggtgggctgaaaggatgctggccttcaccgagaacaaggtcctgcttactcttctcaccaatggcatggatccaaatgccgtcaacaagatggagatcaacaagaacacttattatctgccgctgtggttagctttccttctcacagtcagctgcttgggcacatttgaacgcgttgatgtctacgaggtcacaatggtcgccatgatggatcaggtcaacactttgaatagatatttcgaagaccctaatagaacaactctcgacgtgtgggaggcgtgcaacgaccatttcccgtggcctacggcgacgaaactggtcgatgaaggattcctgatcagcatttttaccatggtcctgacaaaaatccaaggagattccgaagctctcatcggtgctaaggaatgggaccgcttggaagcagttcgagaaaaaggcaagcagacattgagctag

SEQ ID NO: 4970 - protein, 787 aa, Muscodor strobelii
  misc_feature: SGI Peptide ID NO. 561362
  misc_feature (1)..(574): NCBI GI: 256730922 Blast Desc: NECHADRAFT_84637 [Nectria haematococca mpVI 77-13-4]
  misc_feature (196)..(578): NCBI GI: 171678826 Blast Desc: protein product [Podospora anserina] gi|170937483|emb|CAP62141.1| protein product [Podospora anserina]
  misc_feature (1)..(579): NCBI GI: 256725921 Blast Desc: NECHADRAFT_82115 [Nectria haematococca mpVI 77-13-4]
  misc_feature (208)..(576): NCBI GI: 171687547 Blast Desc: protein product [Podospora anserina] gi|170943735|emb|CAP69387.1| protein product [Podospora anserina]
  misc_feature (257)..(567): NCBI GI: 256732148 Blast Desc: NECHADRAFT_93635 [Nectria haematococca mpVI 77-13-4]
  misc_feature (4)..(572): NCBI GI: 256728066 Blast Desc: NECHADRAFT_83494 [Nectria haematococca mpVI 77-13-4]
  misc_feature (2)..(685): NCBI GI: 169616506 Blast Desc: SNOG_11426 [Phaeosphaeria nodorum SN15] gi|160703200|gb|EAT81134.2| SNOG_11426 [Phaeosphaeria nodorum SN15]
  misc_feature (211)..(581): NCBI GI: 226293863 Blast Desc: conserved [Paracoccidioides brasiliensis Pb18]
  misc_feature (7)..(573): NCBI GI: 256730066 Blast Desc: NECHADRAFT_82694 [Nectria haematococca mpVI 77-13-4]
  misc_feature (211)..(581): NCBI GI: 225684243 Blast Desc: conserved [Paracoccidioides brasiliensis Pb03]
MDPLTAVALAGNIFQFISFVGGLLDKTHKLHVSATGTSRESDDIQDICSSLMKLSTDLEKPPSSSSSSPNAFSRKLSRHQKELTECAAACSRDCEDLLRILAKLKAKATNGPRLWRSFRAALAEIQKEDEINDLRSRIADRERRMTFLVCMVSNKSIEELEALVKSIGQGIWKINADSRLDLLIKEVSILKESVTTYKPAEDPTTASFNNLCDGFLEFWVSGKPGSGKSTFMKWIDDNEKTKECLMSWAGKQHRPLIVSHYFTVYGTPIQRSLEGLLRSLIFSVLVEVPRLIPKLVPDRWNRIGEQPRWTQPELESVLRLLEAETMSVKICYLIDGLDEYDGDHLDICQTLKQMSRNPSIKVCVSSRPWNVFEDVLGNQADSKLYMHDLTHGDMSSYTETRLKEHPRWTALEQAAGSMLSRSLIDEVIERSNGVFLWVTLVVNLLREGLNNDDSIFDLQRRLSSYPVDLEPFFRHMIEAVDPFYSEKMAGMLLIATEATTPLRLEVYLFHEMEYADENYAFDGPEELMTTDSAELDKLYGTVSRRINGLCKGLLERNDTKIDFLHRTVYDFLRTEDTETRVWLLNELLKDSDDLLRIPVTDPFRTWKAFFLNELFYIPNAPLGRHSYHALSDTSWLRWAERMLAFTENKVLLTLLTNGMDPNAVNKMEINKNTYYLPLWLAFLLTVSCLGTFERVDVYEVTMVAMMDQVNTLNRYFEDPNRTTLDVWEACNDHFPWPTATKLVDEGFLISIFTMVLTKIQGDSEALIGAKEWDRLEAVREKGKQTLS

SEQ ID NO: 4971 - DNA, 1057 bp, Muscodor strobelii
  misc_feature: SGI EST ID NO. CUFF.12512.0
  misc_feature: Variant of the nucleotide sequence at SEQ ID NO 4969
tcgaattgacactatgccgtattgggtacctaaactaccttctgctaaattacgttaggttggaacacgtttgcttgactgaaggcaacgacattctgcgatgtcttcgcaatgtataacttccttgctgctagaaacaggcaaaattggaaggagctactgtctgtgatggtagtcctgtcccaaatccccgaagaagcctgatgaatgcagagcactgtggctttggccattctacgatttttgcgcaaatacgacactgcctccaatatggtgattggtcatgccgcctggtaaggcattctcttgcgccccttcgtttttcgtcggggtagattcgtaggcgcctaggtaggctaataaaagtgtctgactcgcgccgacaagaggcgaaaggccaggtcgtcctttcattacgttggcctcgaccgccggtgttagttcaaagtcgccgcaagccctctgtccccatcccccaagagctggacattttctggaaatacgtccgtcgtactacgtcatggatcctctgacggcggtggccctggctggcaacatcttccaatttatctcatttgtaggcggactcctagacaagacgcacaagcttcacgtctcggctacaggcaccagccgcgaaagtgacgatatacaagacatctgtagttctctcatgaaactcagcactgatctggagaaaccgccaagctcgtcgagttcgtctccgaatgcattttctagaaagctttcgcgacatcagaaagaactcaccgagtgcgcggctgcgtgtagccgggattgcgaagatctacttcgcattctcgccaagctgaaggctaaagcgacaaacggtccacggttgtggaggagcttccgggcagctctggctgaaatacagaaagaagatgaaatcaatgacttgcgatcgcggattgctgaccgcgagcgacgcatgactttcctggtatgcatggtgtcaaataagagcatagaagaactcgaagctctagtcaagagcattggtcaggggatttggaaaatcaatgccgactcgagg

SEQ ID NO: 4972 - DNA, 1053 bp, Muscodor strobelii
  misc_feature: SGI cDNA ID NO. 561363
  misc_feature: Encodes the peptide sequence at SEQ ID NO 4973
atggcagatatagaagcttccacgagcctcggcacagcgtccgacctacgtagcgaggtgaagaagcccaagaagaagaaagtcttactgatgggcaagagcggatcgggcaagtcgagcatgaggagcatcatattcagtaactacatcgcgcgggatacgcgacgtttaggcgcaacgatagacatagacctctcccacgtgaaattcctcggcaacctcaccctcaacctctgggactgcggcggccaagaagcattcatggagaactacctgtcgcaacaacgcgtgcacgtattctccaacgtcggcgtcctaatctacgtcttcgacatcgaatcgcgcgacgtcgaccgagatcttgcgacctacgtgtccatcatttccgctttgtgtcaatacagtcctaccgctaaggtctatgtgcttatacataagatggatctcatcagtatgcaggcacgtgagcccgtgttcgttgatcgcgtgggattgatcacgaggaagacagctgagtttacgaatgcggctggtgttaaggaaggtctggatttgataccatttgctacgtcgatatgggatcaatcgctctacaaagcgtgggcgagtatcattcacgacctggtaccaaatctcgcagtcattgagtcacaactcggctcacttggaactctgatcgaggctgaagagatattgctgtttgagagaacgagtttcctggtagtgagcagttggaccagcgaagaagggcaagcgaatccgacgggtgatcggcaggagaggataagtaatatcctcaagcatttcaagcagagcatcagcagatttaccgggacgccgaggaatgccgagcagtttgtcttgatggaacacaaagcaggcgcccgtttctcaatgttcgcctgcaaattcacgacaaacacatatatcatggtagtcctgccaccaggtgaggcacgcttcaatgccgcgaagctcaattgccagattgccagggagagcttcaagttccttgatggacctgcggctggcagccacggacagggtggttga

SEQ ID NO: 4973 - protein, 350 aa, Muscodor strobelii
  misc_feature: SGI Peptide ID NO. 561363
  misc_feature (118)..(336): Pfam Id: PF04670 Pfam Desc: Gtr1/RagA G protein conserved region
  misc_feature (13)..(341): NCBI GI: 46122975 Blast Desc: FG05865.1 [Gibberella zeae PH-1]
  misc_feature (5)..(342): NCBI GI: 261359066 Blast Desc: GTP-binding protein GTR1 [Verticillium albo-atrum VaMs.102]
  misc_feature (21)..(350): NCBI GI: 154318648 Blast Desc: BC1G_02713 [Botryotinia fuckeliana B05.10] gi|150857843|gb|EDN33035.1| BC1G_02713 [Botryotinia fuckeliana B05.10]
  misc_feature (31)..(339): NCBI GI: 171693309 Blast Desc: protein product [Podospora anserina] gi|170946603|emb|CAP73405.1| protein product [Podospora anserina]
  misc_feature (34)..(341): NCBI GI: 39940718 Blast Desc: MGG_04881 [Magnaporthe grisea 70-15] gi|145010892|gb|EDJ95548.1| MGG_04881 [Magnaporthe grisea 70-15]
  misc_feature (5)..(350): NCBI GI: 156063768 Blast Desc: SS1G_02002 [Sclerotinia sclerotiorum 1980] gi|154697336|gb|EDN97074.1| SS1G_02002 [Sclerotinia sclerotiorum 1980]
  misc_feature (22)..(349): NCBI GI: 67903618 Blast Desc: AN8796.2 [Aspergillus nidulans FGSC A4] gi|40741399|gb|EAA60589.1| AN8796.2 [Aspergillus nidulans FGSC A4] gi|259482998|tpe|CBF78003.1| TPA: small monomeric GTPase FGSC
  misc_feature (22)..(349): NCBI GI: 212535366 Blast Desc: small monomeric GTPase (Gtr1), [Penicillium marneffei ATCC 18224] gi|210070238|gb|EEA24328.1| small monomeric GTPase (Gtr1), [Penicillium marneffei ATCC 18224]
  misc_feature (22)..(350): NCBI GI: 242792857 Blast Desc: small monomeric GTPase (Gtr1), [Talaromyces stipitatus ATCC 10500] gi|218718630|gb|EED18050.1| small monomeric GTPase (Gtr1), [Talaromyces stipitatus ATCC 10500]
  misc_feature (21)..(349): NCBI GI: 70997884 Blast Desc: small monomeric GTPase (Gtr1) [Aspergillus fumigatus Af293] gi|66851310|gb|EAL91636.1| small monomeric GTPase (Gtr1), [Aspergillus fumigatus Af293] gi|159126593|gb|EDP51709.1| small
MADIEASTSLGTASDLRSEVKKPKKKKVLLMGKSGSGKSSMRSIIFSNYIARDTRRLGATIDIDLSHVKFLGNLTLNLWDCGGQEAFMENYLSQQRVHVFSNVGVLIYVFDIESRDVDRDLATYVSIISALCQYSPTAKVYVLIHKMDLISMQAREPVFVDRVGLITRKTAEFTNAAGVKEGLDLIPFATSIWDQSLYKAWASIIHDLVPNLAVIESQLGSLGTLIEAEEILLFERTSFLVVSSWTSEEGQANPTGDRQERISNILKHFKQSISRFTGTPRNAEQFVLMEHKAGARFSMFACKFTTNTYIMVVLPPGEARFNAAKLNCQIARESFKFLDGPAAGSHGQGG

SEQ ID NO: 4974 - DNA, 4397 bp, Muscodor strobelii
  misc_feature: SGI EST ID NO. CUFF.12516.0
  misc_feature: Variant of the nucleotide sequence at SEQ ID NO 4972
aagcttcaatcaacaacaatcattcgcaatcacaccgataagagtcacgagacacgcgcgacaacacttctatagatcgaccacccgaccgaaatatcctgagaagaccaaatcggagatctgtcgtcgacttgccaccccagtcgcggtctacaatgtgtcatccgagctgaaccattcatgcactctcgcgcgctccgtggaagctagcgaacgagactggcgcaaccgaacgagcatcgcgagaatcgagaacgagaacaaaccgcgggacccagaagccaagagacgagcagactgtgcatccaaacatccacaatggcagatatagaagcttccacgagcctcggcacagcgtccgacctacgtagcgaggtgaagaagcccaagaagaagaaagtcttactgatgggcaagagcggatcgggcaagtcgagcatgaggagcatcatattcagtaactacatcgcgcgggatacgcgacgtttaggcgcaacgatagacatagacctctcccacgtgaaattcctcggcaacctcaccctcaacctctgggactgcggcggccaagaagcattcatggagaactacctgtcgcaacaacgcgtgcacgtattctccaacgtcggcgtcctaatctacgtcttcgacatcgaatcgcgcgacgtcgaccgagatcttgcgacctacgtgtccatcatttccgctttgtgtcaatacagtcctaccgctaaggtctatgtgcttatacataagatggatctcatcagtatgcaggcacgtgagcccgtgttcgttgatcgcgtgggattgatcacgaggaagacagctgagtttacgaatgcggctggtgttaaggaaggtctggatttgataccatttgctacgtcgatatgggatcaatcgctctacaaagcgtgggcgagtatcattcacgacctggtaccaaatctcgcagtcattgagtcacaactcggctcacttggaactctgatcgaggctgaagagatattgctgtttgagagaacgagtttcctggtagtgagcagttggaccagcgaagaagggcaagcgaatccgacgggtgatcggcaggagaggataagtaatatcctcaagcatttcaagcagagcatcagcagatttaccgggacgccgaggaatgccgagcagtttgtcttgatggaacacaaagcaggcgcccgtttctcaatgttcgcctgcaaattcacgacaaacacatatatcatggtagtcctgccaccaggtgaggcacgcttcaatgccgcgaagctcaattgccagattgccagggagagcttcaagttccttgatggacctgcggctggcagccacggacagggtggttgataaagttgtctatgtcaacaattaaagactgtcgcatgggaatcgagggaatacccgactgatgaggatcgggaaaagtatattgtaggagggaggaggatgaatgttcgcatggggatgatatacccttgatactagactatcaaaactcgcttgttctcgtctttatattccccgtccctcattaatgctatcacagttgttgattggtgactaattgccagcaagcgacagtgcaacccaagctaagacctcaagcgcctaaacagcaaacagagatcggttatagtacacaagcactagatcgtatctacatgagatgtacacatgttggttagtaataggcacagccaattgtaagtgcttgctcgtaatacagcccccttgcccccgagctgaagctcaatattcttcaacgcccgacgcctgagcgaattcttgttgccagattccctaagaaaggcgaggtcatgacgataatcgtgttgtcctaattgatagcgtcttcattctcttgtcaatccctactagctcaatgtctgcttgcctttttctcgaactgcttccaagcggtcctgagataaggcgagcttcaagcctattgaatcctatttccgatagaactggccttacccattccttagcaccgatgagagcttcggaatctccttggatttttgtcaggaccatggtaaaaatgctgatcaggaatccttcatcgaccagtttcgtcgccgtaggccacgggaaatggtcgttgcacgcctcccacacgtcgagagttgttctattagggtcttcgaaatatctattcaaagtgttgacctgatccatcatggcgaccattgtgacctcgtagacatcaacgcgttcaaatgtgcccaagcagctgactgtgagaaggaaagctaaccacagcggcagataataagtgttcttgttgatctccatcttgttgacggcatttggatccatgccattggtgagaagagtaagcaggaccttgttctcggtgaaggccagcatcctttcagcccacctgagccaactagtgtcgctcagcgcatgataggagtgcctccctagcggtgcatttggtatgtaaaatagctcattcaagaaaaatgctttccaagttctgaatggatctgtgactggaatcctcagcagatcgtcgctatccttcagcagttcattgagaagccaaactcgagtttcggtgtctaagttgcaatgtaatgtgagaaggtgtgaaagcggtgattccgcaaccgatgtataatgacggcccagaaaatggggacttgtggtgactttatttcgaatatacctgctaacgccggcttctagtatatgtacgcgaaacacgtccctcaggagaagagttcctttttcaatctggtttcgcgagagcatttggggtatgtacgaatccatgttatcaaggagcgctgcagtcactgccgccgaactttcaccctgagcctcagcgagacgggcgaatggcaaggcttgtcgaagttgtttgacaaaaggagcatttggaaacgcccgatgccagctcttaaatgtcgaccgcttggtccaggcaaagatggctttcaatatagacaagcttgagttactacgacttttagtcctgtccctgaggtatccagacataccttcggtgcggaggaagtcgtagactgttcggtgcaagaaatcaattttagtatcgttgcgctccaaaagccctttacatagtccgttgatcctccgtgatacagtaccgtagagcttgtcgagttctgcggaatcggtagtcatgagttcttccggtccgtcgaacgcatagttctcgtcagcatattccatttcatggaacaagtaaacttccaaacgcagaggcgtcgttgcttcggtagcaattaatagcatccccgccattttctcgctatagaaaggatctacagcttcaatcatatgcctgaagaatggttcgaggtctacgggatagctggacagccgtctctgcaggtcaaaaatactatcgtcgttattcagaccttcgcgaagcagattgaccaccagtgtaacccaaaggaaaacaccattagatctctcgataacctcatcgatgagagaccgagataacatagacccggctgcttgttcaagtgcagtccaccgaggatgctcttttagtcgtgtctccgtgtagctggacatatcaccgtgtgtaagatcatgccttgattgaaggatttcgagacatctgcttaagcgtctggcagatgtctaggtggtctccgtcgtactcgtctaagccatcaattaggtagcatatcttgactgacatagtctcagcctcgaggagtctcaaaacggactctagctcaggctgtgtccatcgaggctgctcgccgatcctgttccagcggtctggcaccaactttgggattaacctcggaacttcgactaacacactaaaaataagcgaccgaaggagaccttcgagcgatcgctgtatcggtgttccgtacacagtgaaatagtgactgacaatcagcggtcgatgctgcttcccagcccaagacattaggcactcttttgtcttctcgttgtcatcgatccatttcatgaacgtcgatttcccagatcccggctttccagaaacccaaaactgaagcattagatcatttcatgtcagtaagtgtaaacaagtagagaaggttatgctcactaactacatagcgttagcttgcctgtggcgatagcaatcaaattaatgatgttgcggggtttcagcttaccgagtccgtcgtcgctttggagccagcgtcgtagcttgttatatttgctaatcgtctcctttgtctcctgtaaactccacttgaaagttttcccatgagcatctgctatcctaacgtgtcggatctctcgatcgctataatcaagtgaagataatattcgggcttcctttttgaaatcctcagtatcaatagatacctctaagaaaccatcacataagttgttgaacgaag

SEQ ID NO: 4975 - DNA, 1020 bp, Muscodor strobelii
  misc_feature: SGI cDNA ID NO. 561364
  misc_feature: Encodes the peptide sequence at SEQ ID NO 4976
atgaagagtctctccctactagcgctggccagcatggctggagctgctgcttgtagcaagaaggtcgaatgctgcaccgcactggcgcgtagcccaggtttgaatggccaagtctactaccctaactcaacggcatatgaagaccgcattgagacctattggtctgtgaacgcagctcttgaaccctggtgtatggtcttgccatcgaacactgcggagacttcggaggtcattcaagtcattaccaaacaccagtgtccttttggcattcggagtggtggtcatgcgatttggactggttcgagcagtatccatgacggcgttactattgatttaggacatatcaacagcacaacttacgacccaagtaccaagctcgcatccttgggtcctgggcagaactgggcgtcagtctatgcaaccctcgatcccctaggtgtcacagtgacaggcgggcgcagtgcccaagtcggcgtgggtggcttcctactcggaggaggcaactctcttcacgcgcatgcgcatggacttggcgccaccaacgtggagaacttcgaagttgtcctcgggaacggatcagtcatcaatgcgaacaagaacgagaatgtagatctttgggtagggcttcgcggcggctcagggaatatgggcctcgttacgagattcgacatgcggaccatcgaatatgccgatccttcaaacccacagatctggggcggagggattcaatgggaggtcaataagacggacgaggtcctctcagctttgggggagttcgcggataatatcccgaatgaacctgactcgggcgcattttgtatctggggttggggaccaccgtacccgtaccctcagaacatcatcattgcatgtccgttagataacacgcgcaacattgtcgcgccgcttgtttatgataagttcttgggcatcggtgacgagattgcgaacacgctcagttcgaggaccatgctgaataggacagtggagggcaatgcggggggtgactatctctacagg

SEQ ID NO: 4976 - protein, 340 aa, Muscodor strobelii
  misc_feature: SGI Peptide ID NO. 561364
  misc_feature (62)..(198): Pfam Id: PF01565 Pfam Desc: FAD binding domain
  misc_feature (11)..(334): NCBI GI: 116198491 Blast Desc: CHGG_07401 [Chaetomium globosum CBS 148.51] gi|88178680|gb|EAQ86148.1| CHGG_07401 [Chaetomium globosum CBS 148.51]
  misc_feature (4)..(340): NCBI GI: 46128063 Blast Desc: FG08409.1 [Gibberella zeae PH-1]
  misc_feature (25)..(321): NCBI GI: 256723208 Blast Desc: NECHADRAFT_51832 [Nectria haematococca mpVI 77-13-4]
  misc_feature (6)..(311): NCBI GI: 261355751 Blast Desc: FAD binding domain-containing protein [Verticillium albo-atrum VaMs.102]
  misc_feature (25)..(330): NCBI GI: 46118786 Blast Desc: FG04732.1 [Gibberella zeae PH-1]
  misc_feature (25)..(340): NCBI GI: 256734055 Blast Desc: NECHADRAFT_35620 [Nectria haematococca mpVI 77-13-4]
  misc_feature (17)..(311): NCBI GI: 169609567 Blast Desc: SNOG_07875 [Phaeosphaeria nodorum SN15] gi|111063031|gb|EAT84151.1| SNOG_07875 [Phaeosphaeria nodorum SN15]
  misc_feature (25)..(330): NCBI GI: 189198724 Blast Desc: conserved [Pyrenophora tritici-repentis Pt-1C-BFP] gi|187982798|gb|EDU48286.1| conserved [Pyrenophora tritici-repentis Pt-1C-BFP]
  misc_feature (14)..(226): NCBI GI: 261358119 Blast Desc: conserved [Verticillium albo-atrum VaMs.102]
  misc_feature (23)..(337): NCBI GI: 115401312 Blast Desc: conserved [Aspergillus terreus NIH2624] gi|114190185|gb|EAU31885.1| conserved [Aspergillus terreus NIH2624]
  misc_feature (26)..(263): SWISSPROT Homolog: EC 1.5.3.6 (R)-6-hydroxynicotine oxidase
MKSLSLLALASMAGAAACSKKVECCTALARSPGLNGQVYYPNSTAYEDRIETYWSVNAALEPWCMVLPSNTAETSEVIQVITKHQCPFGIRSGGHAIWTGSSSIHDGVTIDLGHINSTTYDPSTKLASLGPGQNWASVYATLDPLGVTVTGGRSAQVGVGGFLLGGGNSLHAHAHGLGATNVENFEVVLGNGSVINANKNENVDLWVGLRGGSGNMGLVTRFDMRTIEYADPSNPQIWGGGIQWEVNKTDEVLSALGEFADNIPNEPDSGAFCIWGWGPPYPYPQNIIIACPLDNTRNIVAPLVYDKFLGIGDEIANTLSSRTMLNRTVEGNAGGDYLYR

SEQ ID NO: 4977 - DNA, 1373 bp, Muscodor strobelii
  misc_feature: SGI EST ID NO. CUFF.12521.0
  misc_feature: Variant of the nucleotide sequence at SEQ ID NO 4975
ctcagatgtattcaaagggtataaacgacggcgcccagcctctcctcataagcagtctacccgcagtgtcaacccgtgtaacgcttaagcaagctacaaacttcgatgccggttcgccggatacgccgtgtttcttagctgccttccccagattgctgtggaggtccccatacgaatgagtacgcgttaccctgtcatcaggattcggaacgtggggatgcagtcatcatggaagagatttccggtcgtcgcaatgtctaactgcaaggctgagagcagacgattctcgttcttccgttctgactttctgagccacctgttgcgggaaagggtttacacaaatagtttggcaaaatgaagagtctctccctactagcgctggccagcatggctggagctgctgcttgtagcaagaaggtcgaatgctgcaccgcactggcgcgtagcccaggtttgaatggccaagtctactaccctaactcaacggcatatgaagaccgcattgagacctattggtctgtgaacgcagctcttgaaccctggtgtatggtcttgccatcgaacactgcggagacttcggaggtcattcaagtcattaccaaacaccagtgtccttttggcattcggagtggtggtcatgcgatttggactggttcgagcagtatccatgacggcgttactattgatttaggacatatcaacagcacaacttacgacccaagtaccaagctcgcatccttgggtcctgggcagaactgggcgtcagtctatgcaaccctcgatcccctaggtgtcacagtgacaggcgggcgcagtgcccaagtcggcgtgggtggcttcctactcggaggaggcaactctcttcacgcgcatgcgcatggacttggcgccaccaacgtggagaacttcgaagttgtcctcgggaacggatcagtcatcaatgcgaacaagaacgagaatgtagatctttgggtagggcttcgcggcggctcagggaatatgggcctcgttacgagattcgacatgcggaccatcgaatatgccgatccttcaaacccacagatctggggcggagggattcaatgggaggtcaataagacggacgaggtcctctcagctttgggggagttcgcggataatatcccgaatgaacctgactcgggcgcattttgtatctggggttggggaccaccgtacccgtaccctcagaacatcatcattgcatgtccgttagataacacgcgcaacattgtcgcgccgcttgtttatgataagttcttgggcatcggtgacgagattgcgaacacgctcagttcgaggaccatgctgaataggacagtggagggcaatgcggggggtgactatctctacag

SEQ ID NO: 4978 - DNA, 618 bp, Muscodor strobelii
  misc_feature: SGI cDNA ID NO. 561365
  misc_feature: Encodes the peptide sequence at SEQ ID NO 4979
atgcgcctgttaaatgcccaaagccggaaattagaggagttttttggacgcctgccgcctgcatatgtgatcctgtcccatacttggggctccgaggaactatcttttcaagagtttgtgcaaggaaacggtactaacaaggctggataccagaagattgaacgcttctgtcagtatctcgtgaagcatggatataactacgggtggattgacaccatctgcatcgacaagacaagcagcgcagaactgtctgaagcgattaattccatgttccaatggtacatgctctcacttcactgcgtggtgtttctaagcgacgtgctcaggagccaagtgtccgtctccggtgagggccgagtatttgcacagagccgttggtttaaacgaggatggactcttcaggagcttctggcgccgcataacttgatattcgttgattcggagtgggtgatcttcggaaacagagcggtgttttcttcggcaatcagcagaatcactggtattggatgccgttatttgacaccacgcgctgatgacgcattcagccatgcgactactagggaagaggatgcggcctatagcttgttgggcttgtgtggcgtcaacatgccactgtaa

SEQ ID NO: 4979 - protein, 205 aa, Muscodor strobelii
  misc_feature: SGI Peptide ID NO. 561365
  misc_feature (22)..(135): Pfam Id: PF06985 Pfam Desc: Heterokaryon incompatibility protein (HET)
  misc_feature (22)..(105): Pfam Id: PF06985 Pfam Desc: Heterokaryon incompatibility protein (HET)
  misc_feature (121)..(135): Pfam Id: PF06985 Pfam Desc: Heterokaryon incompatibility protein (HET)
  misc_feature (1)..(205): NCBI GI: 145228631 Blast Desc: An01g01850 [Aspergillus niger] gi|134054715|emb|CAK43556.1| protein product [Aspergillus niger]
  misc_feature (1)..(205): NCBI GI: 261354085 Blast Desc: HET domain-containing protein [Verticillium albo-atrum VaMs.102]
  misc_feature (1)..(205): NCBI GI: 46139565 Blast Desc: FG11297.1 [Gibberella zeae PH-1]
  misc_feature (1)..(205): NCBI GI: 156035539 Blast Desc: SS1G_12973 [Sclerotinia sclerotiorum 1980] gi|154698378|gb|EDN98116.1| SS1G_12973 [Sclerotinia sclerotiorum 1980]
  misc_feature (1)..(205): NCBI GI: 256722255 Blast Desc: NECHADRAFT_52327 [Nectria haematococca mpVI 77-13-4]
  misc_feature (1)..(205): NCBI GI: 169776259 Blast Desc: [Aspergillus oryzae RIB40] gi|83771331|dbj|BAE61463.1| protein product [Aspergillus oryzae]
  misc_feature (1)..(205): NCBI GI: 256731212 Blast Desc: NECHADRAFT_101749 [Nectria haematococca mpVI 77-13-4]
  misc_feature (1)..(205): NCBI GI: 256720502 Blast Desc: NECHADRAFT_55867 [Nectria haematococca mpVI 77-13-4]
  misc_feature (1)..(204): NCBI GI: 238485594 Blast Desc: ankyrin repeat-containing protein, [Aspergillus flavus NRRL3357] gi|220698914|gb|EED55253.1| ankyrin repeat-containing protein, [Aspergillus flavus NRRL3357]
  misc_feature (1)..(205): NCBI GI: 171688186 Blast Desc: protein product [Podospora anserina] gi|170944055|emb|CAP70165.1| protein product [Podospora anserina]
MRLLNAQSRKLEEFFGRLPPAYVILSHTWGSEELSFQEFVQGNGTNKAGYQKIERFCQYLVKHGYNYGWIDTICIDKTSSAELSEAINSMFQWYMLSLHCVVFLSDVLRSQVSVSGEGRVFAQSRWFKRGWTLQELLAPHNLIFVDSEWVIFGNRAVFSSAISRITGIGCRYLTPRADDAFSHATTREEDAAYSLLGLCGVNMPL

SEQ ID NO: 4980 - DNA, 2815 bp, Muscodor strobelii
  misc_feature: SGI EST ID NO. CUFF.12524.0
  misc_feature: Variant of the nucleotide sequence at SEQ ID NO 4978
cgtcatcctcggcaataatgcgcctgttaaatgcccaaagccggaaattagaggagttttttggacgcctgccgcctgcatatgtgatcctgtcccatacttggggctccgaggaactatcttttcaagagtttgtgcaaggaaacggtactaacaaggctggataccagaagattgaacgcttctgtcagtatctcgtgaagcatggatataactacgggtggattgacaccatctgcatcgacaagacaagcagcgcagaactgtctgaagcgattaattccatgttccaatggtacatgctctcacttcactgcgtggtgtttctaagcgacgtgctcaggagccaagtgtccgtctccggtgagggccgagtatttgcacagagccgttggtttaaacgaggatggactcttcaggagcttctggcgccgcataacttgatattcgttgattcggagtgggtgatcttcggaaacagagcggtgttttcttcggcaatcagcagaatcactggtattggatgccgttatttgacaccacgcgctgatgacgcattcagccatgcggtgcgcataaaccgtatacgaagcactactatcgctgaaaaatttagctgggctgcttcgcgtcagactactagggaagaggatgcggcctatagcttgttgggcttgtgtggcgtcaacatgccactgtaagtaatctgaactatcagatattagaaaccagtcctttgtcttaaagtcccgggccgcgcggcgaaatatcgtgaaaaataactaacgcgacgcctctctggctaacagactgtatggcgagggtcacgctgccttcgtccggttgcaagaaatatccatgcgccatacttttgacccaacgatacttgcatggaatgtcatagataaagagtcacctggggggaaaacattatggccaaagaagtcggcccgttcatcgaagtggtattcaatttacaagaccatcttggggcttgagagcccttggtgccacccttgccatcctggttatacgccaattgacggggggtttttagcgacaacgccgaagtgttttgcacgctgcgaccagtatgttaacatacaaacgacattggactgggacgtgactagcaaaggaatctcaaccactcttcctacctctgaaaaaaaacccttacattctgcttccgtgccacagaaaggacgaccaatcgagaattgttgcaattcctatagttggctacgaaccagaaaaactgcttcttggccgcgtaagcaactcattggagctgattgaccgccagaaatggcagctatggcaacgacgcaagatattattacctatttctgcgcctatggcagaattgccccgccaagcaatatacccatcaaattatgctctgatgcgaatccacctaaatccggatcttgatattctggatctagcagcatcaagcaaggttttctgtacttccgacgagttggcttgtgcttggaataggtacgcacctcaccaacctctggtccggctattagtcatgtcccatgggatgggacatacagaaagtttcgttgtggatattgagtacacttcaatgttaatggcgctccaagcgtacctcccgtggtgcgacatgcagcggatccgttcctcggtccatcttgcacctggccatagcacgaaactggaacctgtcaactgggaagagtggacgcgaaatggcaaactcaagccaactagagagaatctgcctttgtcaataatgattcgaagagtcacctgcgctgaaggcgatgagtttgagctacacattacggagccctataacacagcatatccagttcaacatatatccagtcttatagtcaccaaatacgagaaatttggtctgataattcgtcaagtttgcgacagcatcttcgaacggtgtcgaattgttatttctcagctctcatacggtgaatatctggcggtcctgataaatcccattgcgactctggttatcatcaaggtcggacagaagctcaattcgaagcccgttgcagcgacagaatctgcagcgtcggaatccacagtctgtagtttatggctttggttgttatgtcctagggcgtacatcatgttttcttgggcaggcctacagttccttttcgcgtatcaccggattcttcccgtattctgttacctggcgcctagtaattcgaagttcattgcaaagtataggttatggctagccgctttgtttactctagacacattttcggacatcatagcattgccgcgaatcttgatcggattggcaacaacccaaatgctaattttgttactgacgaaatcaagaagactatctgtcctgagcctcatctcggtgtacatatacgaatggctctatgacgcttttgtcgatagctcatcagccatcccctctataagtacaagaacaatgatgtacgccgtagcggtatcacagttcgtgttgagggaggaagtgttcagggaggaaaaattcgttttactgagcgtagtactttggttacacatgggacttttcgcctttcgaggactactcttcacaggcctggatgagcatccagattgtcgcttgaatcccttgaggctgcttcttgaggacagtcttcagcgtttgtcttcttttgtatatgaggcgcctgcgtccaagcggcatttctgcgtgaattagagctaatagcagccgtgaataacttactctacaatgctaaccctatctcaacacttgttgaaataatacgcagaggaacgttcatatcattgctagtatttagaagaaaac

SEQ ID NO: 4981 - DNA, 915 bp, Muscodor strobelii
  misc_feature: SGI cDNA ID NO. 561366
  misc_feature: Encodes the peptide sequence at SEQ ID NO 4982
atggacttgcccttgacaggtcggctaagtccactggttgctacggctgcggagatagaggaggaaggtgataagatcatcgttgtatatggccatcgctatgagcagtttctcaggcctcgcaaagaggctaacttgcagcgggctttgatgcttcgcgtcataatgggccaagtagaggactttccccgaaggttgatcaagggaagcaaattaccgcctttcatccacccgcagtgtgccttagagaacaggctcccccgcgaatgtatcgcgaaaactggttcacatcaatgcttgcctgaaccgttagcgatttgtgctagtttgacgcagctgttctttggccgcaatgggagtcaatcctctccctatgtctggaaactgatatatgcagagcagaaaaggctatattctgaagaaatggcgaaaagactgcaccaacatcaagagtctgggccgtacttagaagacatttataaactacctcaattgaactacaaactatgggccttttacgaaggtatcagaagatcttccaatcttttccgcgtggttggtaccgtcttgaacgttctcatcggcaatccaaacctctctccagactctggcaagattctgtcaattccgttgatctcccatggctacctcttcgataccgacacggcggagagctgggccgagcggctgcataagtatcagagcttgcgggcttgccaggagcgtgttctggttattggcgatctagtgggtctgcaagctggtacggcgagctcaaatggcgaaatcaaccatcatcccttgtcgaatccctcattacagaaggatcttgctgcatggtgtgacaatcttgatgagttcggcacactcatctggatggcctctctgctgaatagtggtcatattgcatgttaa

SEQ ID NO: 4982 - protein, 304 aa, Muscodor strobelii
  misc_feature: SGI Peptide ID NO. 561366
  misc_feature (40)..(294): NCBI GI: 212540766 Blast Desc: conserved [Penicillium marneffei ATCC 18224] gi|210067837|gb|EEA21929.1| conserved [Penicillium marneffei ATCC 18224]
  misc_feature (40)..(293): NCBI GI: 242800744 Blast Desc: TSTA_015050 [Talaromyces stipitatus ATCC 10500] gi|218716995|gb|EED16416.1| TSTA_015050 [Talaromyces stipitatus ATCC 10500]
  misc_feature (30)..(140): NCBI GI: 242802207 Blast Desc: TSTA_017670 [Talaromyces stipitatus ATCC 10500] gi|218717272|gb|EED16693.1| TSTA_017670 [Talaromyces stipitatus ATCC 10500]
  misc_feature (53)..(226): NCBI GI: 46115252 Blast Desc: FG03468.1 [Gibberella zeae PH-1]
  misc_feature (33)..(295): NCBI GI: 242777077 Blast Desc: conserved [Talaromyces stipitatus ATCC 10500] gi|218722578|gb|EED21996.1| conserved [Talaromyces stipitatus ATCC 10500]
  misc_feature (40)..(148): NCBI GI: 242770448 Blast Desc: TSTA_079500 [Talaromyces stipitatus ATCC 10500] gi|218725178|gb|EED24595.1| TSTA_079500 [Talaromyces stipitatus ATCC 10500]
MDLPLTGRLSPLVATAAEIEEEGDKIIVVYGHRYEQFLRPRKEANLQRALMLRVIMGQVEDFPRRLIKGSKLPPFIHPQCALENRLPRECIAKTGSHQCLPEPLAICASLTQLFFGRNGSQSSPYVWKLIYAEQKRLYSEEMAKRLHQHQESGPYLEDIYKLPQLNYKLWAFYEGIRRSSNLFRVVGTVLNVLIGNPNLSPDSGKILSIPLISHGYLFDTDTAESWAERLHKYQSLRACQERVLVIGDLVGLQAGTASSNGEINHHPLSNPSLQKDLAAWCDNLDEFGTLIWMASLLNSGHIAC

SEQ ID NO: 4983 - DNA, 1152 bp, Muscodor strobelii
  misc_feature: SGI cDNA ID NO. 561367
  misc_feature: Encodes the peptide sequence at SEQ ID NO 4984
atggttcccactcgtgtcggtattgtagggcttaagcccagacctgaaggtttcaccgatgctcaactgtcacaaatgcctggtttctgggctggcaacgctcatctacctgctctccgccatttgcccaaggacttcgaggtaatggcagtttgcaactcaaatatcgagtcggccaagaaagcgatcgaaacgcacggtttgaacaaatccgtgaaagcatacgcaaacccggaagatcttgcgaacgaccctaatgtagatcttgtggtgatcgctgttaatgtgggcaaacacctacagctcgcaaagcccgcccttctaaagaagaaggacgtctttgtcgaatggccactgggcgcgaccatcgctgaagcagaagagatgactcgattggcccagagcgccggcgtgaggacatcagtaggggttcaggcacgcgcggatcccttagttgtcaaggtcaaggaacttatagagtctggcaagattggacaggtacgcaattcttctgccctggtcggcgccagcctcttacccgtctcggtctggatggaaggaggagaatattatttagactggaagtctgggggtaatgaatttactatctggcttggacatttccttgatagcttcatccacgttttaggcaactttaccgaggttcaagccatcatgaaatcaattgtcactaaggtttcggttctcaaccaaaagggcgaggtcattaatcctgcctatcccaggacggctccggagcatgtcctagtccaaggtatacttgagagtggtgcgttggcatccatatcctcgaggcattcacaaaacgaaatcgacgatgttagcttccgctggattatttcaggcacggagggtgagattgaggtacttgttcccaagtttgcttggcagatgggcaatccagcgcgcactctgaagctgaggattggaacaaacgatccagagacaattgattttatgaagggcgaccagttcgagtccaatgtccccctcctcgcggctaatattggtcgccagtacgctgcattcgcgaaggatgacaagaatgcatatgccgatttcaattcggctctgaagacgcatgttcttcttgaccgcattacaaaagctgctggctgggaatcagtttga

SEQ ID NO: 4984 - protein, 383 aa, Muscodor strobelii
  misc_feature: SGI Peptide ID NO. 561367
  misc_feature (28)..(144): Pfam Id: PF01408 Pfam Desc: Oxidoreductase family, NAD-binding Rossmann fold
  misc_feature (1)..(379): NCBI GI: 242802212 Blast Desc: oxidoreductase, [Talaromyces stipitatus ATCC 10500] gi|218717273|gb|EED16694.1| oxidoreductase, [Talaromyces stipitatus ATCC 10500]
  misc_feature (1)..(377): NCBI GI: 212540350 Blast Desc: conserved [Penicillium marneffei ATCC 18224] gi|210067629|gb|EEA21721.1| conserved [Penicillium marneffei ATCC 18224]
  misc_feature (1)..(380): NCBI GI: 242800748 Blast Desc: oxidoreductase, [Talaromyces stipitatus ATCC 10500] gi|218716996|gb|EED16417.1| oxidoreductase, [Talaromyces stipitatus ATCC 10500]
  misc_feature (1)..(380): NCBI GI: 212540764 Blast Desc: oxidoreductase, [Penicillium marneffei ATCC 18224] gi|210067836|gb|EEA21928.1| oxidoreductase, [Penicillium marneffei ATCC 18224]
  misc_feature (1)..(374): NCBI GI: 119485256 Blast Desc: NAD-binding Rossmann fold oxidoreductase family protein [Neosartorya fischeri NRRL 181] gi|119410316|gb|EAW20263.1| NAD-binding Rossmann fold family NRRL
  misc_feature (1)..(382): NCBI GI: 238494794 Blast Desc: oxidoreductase, [Aspergillus flavus NRRL3357] gi|220695283|gb|EED51626.1| oxidoreductase, [Aspergillus flavus NRRL3357]
  misc_feature (1)..(382): NCBI GI: 169777615 Blast Desc: [Aspergillus oryzae RIB40] gi|83772010|dbj|BAE62140.1| protein product [Aspergillus oryzae]
  misc_feature (1)..(376): NCBI GI: 119489970 Blast Desc: oxidoreductase [Neosartorya fischeri NRRL 181] gi|119411101|gb|EAW21044.1| oxidoreductase [Neosartorya fischeri NRRL 181]
  misc_feature (1)..(376): NCBI GI: 121706350 Blast Desc: oxidoreductase [Aspergillus clavatus NRRL 1] gi|119399584|gb|EAW10012.1| oxidoreductase [Aspergillus clavatus NRRL 1]
  misc_feature (3)..(376): NCBI GI: 145609886 Blast Desc: MGG_02902 [Magnaporthe grisea 70-15] gi|145017273|gb|EDK01636.1| MGG_02902 [Magnaporthe grisea 70-15]
MVPTRVGIVGLKPRPEGFTDAQLSQMPGFWAGNAHLPALRHLPKDFEVMAVCNSNIESAKKAIETHGLNKSVKAYANPEDLANDPNVDLVVIAVNVGKHLQLAKPALLKKKDVFVEWPLGATIAEAEEMTRLAQSAGVRTSVGVQARADPLVVKVKELIESGKIGQVRNSSALVGASLLPVSVWMEGGEYYLDWKSGGNEFTIWLGHFLDSFIHVLGNFTEVQAIMKSIVTKVSVLNQKGEVINPAYPRTAPEHVLVQGILESGALASISSRHSQNEIDDVSFRWIISGTEGEIEVLVPKFAWQMGNPARTLKLRIGTNDPETIDFMKGDQFESNVPLLAANIGRQYAAFAKDDKNAYADFNSALKTHVLLDRITKAAGWESV

SEQ ID NO: 4985 - DNA, 2250 bp, Muscodor strobelii
  misc_feature: SGI cDNA ID NO. 561368
  misc_feature: Reduced expression when VOC is produced
  misc_feature: Encodes the peptide sequence at SEQ ID NO 4986
atggcaccatcactgagacctatgaagcacatcgaccggaaagacctatacaccaatctcgaaatcaggatacaatatcttcattcttttctagacttcagctcgagggatattgaagcactagtcttaggagccaagtatataaaggctctgattccggcgctggtgaacatcgtctaccataagctattacagtacgacatcacagccagagcatttcaaacgcgaagcacaagctatgaaggcccaatcgatgagaccttgacggacaatagtcctattatccttcatcgcaagacgtttctcagagcatacttgaacaagctctgtgccgatccatcaactatggagttttggtattatctagataaagtcggaatgatgcacgtcgggcgaggccgcgagcacccccttcacatcgaatacgtgcatatcggagtgtgcctatcgttcattcaagatacgcttactgaggcgctcttatcacatccgcgtctggcaatgaacaaaaaagtcgccctagtgaaggcgcttggcaaagtcatatggatccaaaatgatctgtttgcaaagtggtgtatgtcgatgagtcaaaacatgacctttgcattgccattaacgacgtgcttctgggacgattggctaactccttacagatccgctttcgccagacaaccaccccttgatagcctgtcttctccacaagcaagctgtgttgacctctcatttacgtacccgggctggcagctgcatgatgttatacgtcacggagacgatgtagagttctatctcgacagtcttgtggaccccggaatggacttattctgctcaggtcattcacatgaagctagaaggaaactaagccccagcgagaactgcatgagcctctcagaaaccgatatcagccactctatagaggctgtcttttctttcgatcttaataccaatgtcgtaacgatcaaccagacgtggtcttgcgatgacagaggatctcctttcttattcaccggcacgggcacaacatcgatgcagaatgaatgcataggtgacgatgcgatcgctgtcgaagcgactggtgaatgcgcggatcagcgtataatggcgtctctcctagtcccggcacgcataactccgcgagcgccaactccgcctacaggacataataatacgggctgtcgcaagcgttcagaatcgaggttccccttcatccttcaagatatatcttacacgtattccgtgtctgcccctccgagcccgtaccccatggtcctgtattccaggatagtcagttatgacttgacgaatcaggcgacgatgcagactcaacgatgctcaaacggcgcatcgaatgcagttggtggtatagacgatccagacgggtggtttccatgtgtgtcaggttttggcctttccgacagcgacgataatggcaactacgacataatcaccacccacatttggagtaacgagacccaatccctcagaatcaatcagacttggtactgcgacgatgagaattcacgaaagccgctccaatacacagcacatggggtcgccaacaacgtgccagttcaatgcacagagaccagtacaatgttcgggtcagtgaatgaatgcaagatgtcggacgtcaatatgacgatagtggcactcgacgtgctcgaattgccgcccgatgctctcaacagaccaaaaccaattgagcatagctgtacggtggcatccttcgtcgatatgtcctttgagatctccgatttccagtttcccgaacgttattggtctaattcttgggactatgtcaacaacacgcctattgtgatccatatcgacaataaagggctgggaggtggtactacgacggctcggaatggccattacccactatccttgaatgggccaagcactccgcaagatgagtcgtggctagactgcgacgcactgcgttacccagccggtattactgattgcagtctcagtttcaaccgagtgacgggaatactacaagtgaatcagacttggcaatgttcagatttggatcctcaaaacccaatatctttcaatgcagtaggaattggcaaggtcccttaccgcgagtgcgactgtaatgatagtgaggagaactgtccgcgggatgcgccattctgcctgcgggctgataacttcactctatcgttgtcagagcatacgtggtggcagaacacatcaatttcgtcagccagaaacccgctcaaccattgtcttaccatttga

SEQ ID NO: 4986 - protein, 749 aa, Muscodor strobelii
  misc_feature: SGI Peptide ID NO. 561368
  misc_feature (6)..(192): NCBI GI: 46127095 Blast Desc: FG07925.1 [Gibberella zeae PH-1]
  misc_feature (6)..(192): NCBI GI: 212540396 Blast Desc: conserved [Penicillium marneffei ATCC 18224] gi|212540398|ref|XP_002150354.1| conserved [Penicillium marneffei ATCC 18224] gi|210067652|gb|EEA21744.1| conserved [Penicillium
  misc_feature (6)..(192): NCBI GI: 242802105 Blast Desc: conserved [Talaromyces stipitatus ATCC 10500] gi|218717251|gb|EED16672.1| conserved [Talaromyces stipitatus ATCC 10500]
  misc_feature (6)..(192): NCBI GI: 119179965 Blast Desc: CIMG_08653 [Coccidioides immitis RS] gi|240110224|gb|EER28383.1| CPC735_062560 [Coccidioides posadasii C735 delta SOWgp]
  misc_feature (6)..(192): NCBI GI: 154296745 Blast Desc: BC1G_12400 [Botryotinia fuckeliana B05.10] gi|150843239|gb|EDN18432.1| BC1G_12400 [Botryotinia fuckeliana B05.10]
  misc_feature (10)..(192): NCBI GI: 39942732 Blast Desc: MGG_03446 [Magnaporthe grisea 70-15] gi|145010006|gb|EDJ94662.1| MGG_03446 [Magnaporthe grisea 70-15]
  misc_feature (6)..(192): NCBI GI: 156050985 Blast Desc: SS1G_08081 [Sclerotinia sclerotiorum 1980] gi|154692480|gb|EDN92218.1| SS1G_08081 [Sclerotinia sclerotiorum 1980]
  misc_feature (2)..(242): NCBI GI: 116192549 Blast Desc: CHGG_05992 [Chaetomium globosum CBS 148.51] gi|88181905|gb|EAQ89373.1| CHGG_05992 [Chaetomium globosum CBS 148.51]
  misc_feature (6)..(192): NCBI GI: 258577895 Blast Desc: conserved [Uncinocarpus reesii 1704] gi|237903395|gb|EEP77796.1| conserved [Uncinocarpus reesii 1704]
  misc_feature (1)..(192): NCBI GI: 189195792 Blast Desc: conserved [Pyrenophora tritici-repentis Pt-1C-BFP] gi|187980113|gb|EDU46739.1| conserved [Pyrenophora tritici-repentis Pt-1C-BFP]
  misc_feature: Useful for introducing or modulating the production of volatile compounds
MAPSLRPMKHIDRKDLYTNLEIRIQYLHSFLDFSSRDIEALVLGAKYIKALIPALVNIVYHKLLQYDITARAFQTRSTSYEGPIDETLTDNSPIILHRKTFLRAYLNKLCADPSTMEFWYYLDKVGMMHVGRGREHPLHIEYVHIGVCLSFIQDTLTEALLSHPRLAMNKKVALVKALGKVIWIQNDLFAKWCMSMSQNMTFALPLTTCFWDDWLTPYRSAFARQPPLDSLSSPQASCVDLSFTYPGWQLHDVIRHGDDVEFYLDSLVDPGMDLFCSGHSHEARRKLSPSENCMSLSETDISHSIEAVFSFDLNTNVVTINQTWSCDDRGSPFLFTGTGTTSMQNECIGDDAIAVEATGECADQRIMASLLVPARITPRAPTPPTGHNNTGCRKRSESRFPFILQDISYTYSVSAPPSPYPMVLYSRIVSYDLTNQATMQTQRCSNGASNAVGGIDDPDGWFPCVSGFGLSDSDDNGNYDIITTHIWSNETQSLRINQTWYCDDENSRKPLQYTAHGVANNVPVQCTETSTMFGSVNECKMSDVNMTIVALDVLELPPDALNRPKPIEHSCTVASFVDMSFEISDFQFPERYWSNSWDYVNNTPIVIHIDNKGLGGGTTTARNGHYPLSLNGPSTPQDESWLDCDALRYPAGITDCSLSFNRVTGILQVNQTWQCSDLDPQNPISFNAVGIGKVPYRECDCNDSEENCPRDAPFCLRADNFTLSLSEHTWWQNTSISSARNPLNHCLTI

SEQ ID NO: 4987 - DNA, 1489 bp, Muscodor strobelii
  misc_feature: SGI EST ID NO. CUFF.12720.1
  misc_feature: Variant of the nucleotide sequence at SEQ ID NO 4985
aaaacgggtcgaactcaataacttacaagttaacgaaaattcagtattaatgttgagtattcccagtttctcggtgtcggatgttagagatcatctgcaatacagtaactgagagctgcgctggcggggcacacgctaactgaccatggcaccatcactgagacctatgaagcacatcgaccggaaagacctatacaccaatctcgaaatcaggatacaatatcttcattcttttctagacttcagctcgagggatattgaagcactagtcttaggagccaagtatataaaggctctgattccggcgctggtgaacatcgtctaccataagctattacagtacgacatcacagccagagcatttcaaacgcgaagcacaagctatgaaggcccaatcgatgagaccttgacggacaatagtcctattatccttcatcgcaagacgtttctcagagcatacttgaacaagctctgtgccgatccatcaactatggagttttggtattatctagataaagtcgggtcagtactagagttaaggatttcaagttgtgtgttccaagtcgttgacatcgatacggcagaatgatgcacgtcgggcgaggccgcgagcacccccttcacatcgaatacgtgcatatcggagtgtgcctatcgttcattcaagatacgcttactgaggcgctcttatcacatccgcgtctggcaatgaacaaaaaagtcgccctagtgaaggcgcttggcaaagtcatatggatccaaaatgatctgtttgcaaagtggtgtatgtcgatgagtcaaaacatgacctttgcattgccattaacgacgtgcttctgggacgattggctaactccttacagatgtgcgcgatggtgatgagtacttggatgaagccgaggcacctagcgtagaagaagaaggatacttgtttgggaaaagagtgcttgatgacctagatgaaacctctgccggtcataacggagcgccgtcatgtccattctctggaattccgacacacgtgagtccggccagtcttgatatagaggacactgcgagcattaatacgtgcatgggagagaatgcggagggaccccgttgtccgcatcaaacttcaacgacgccgcacaagaatacgcaggagtagagcttagaagatctctgcacggtcattgggtcaggtcgcgataaaagcgacgttaaagcgacaatgaagcgtggaagtgcggttcaatgcattgtatgaatatatccgaaaatgtaacatgcactcgagaatgtgtattcttgtatagaactacatatgtaccacgtgtatccggttaaagtggaatgttggggcgatcgttcttcgtatgtctacaccaacctgagagtttgtattattctcgacacaacacaaagatatcttgttttggcaacagacaaatgatctcgaaactactttcatcgtctttagaatgattgacataacaagatcttcagccgc

SEQ ID NO: 4988 - DNA, 1125 bp, Muscodor strobelii
  misc_feature: SGI cDNA ID NO. 561369
  misc_feature: Encodes the peptide sequence at SEQ ID NO 4989
atggagtcagaattagaacagttggtcggtctgataatcgatcgcaaccctcaggttcgagttcttgcgactgagaatcttgtcccgttctccatatcacagcctagcattttcaaggccgataacctcaagcctgtacaaaacttgaaacttcttattaaagacgacccgcaaatcgccgcacatgttgtcaccatactggtcaacctttccgccgaccaggaaatcttagaagacctagcaaaggacgagaaattcttgtctgaaatattcagacaaatcattgtcccaacagagccaaacgccaatcttctggcgatgctcctggcaaacttagcaaaatcagactctctaaagtcgatattatccaaaaagcaacccgcaccagaagagcttaagtccgacgacggcatcattaaccaacttctcgacctcttcgtcaagggtgcagaagggacctacaacaaagaagccgatttcgaccacctctcctacctctttgctgatcttacgaagcatgccgagtttaggcagtactttatacaacgacagggatacgatggagtgattccaattacaaagcttaaggtctttacggaacacaagtccgacgtccggcgcaaaggcgtagcatcaacaataaagaacgtcgcgttcgacgtcccgtcgcacccacttttcatatcagaggatgacatagatatcctgccgtacatattattaccgattgtagggaatgaggagtacgacctcgaggagaccatggcaatgctcccagatctacagctcctgcccccggataagatgagagattcagatccgaatatcatacaaacacacgtcgagactctcctcctactatgtacgacgagagaggcgagagagagactaagagaaatcaaagtctacccattaatcagagaaacgcattccagggtgaataacgaaggtgttcaggatgcttgtgagagattagtgcagatgttggcacgggatgaggaggatgagaagaaagacactccgagggtgcaggaaattaaggatgagggtgagtcaaaaggcgctgagaaggctaagaatggtgtagaggaagaggatgatgatgaccagatagttgaagtctga

SEQ ID NO: 4989 - protein, 374 aa, Muscodor strobelii
  misc_feature: SGI Peptide ID NO. 561369
  misc_feature (91)..(279): Pfam Id: PF04063 Pfam Desc: Domain of function (DUF383)
  misc_feature (280)..(340): Pfam Id: PF04064 Pfam Desc: Domain of function (DUF384)
  misc_feature (1)..(374): NCBI GI: 46121703 Blast Desc: FG05230.1 [Gibberella zeae PH-1]
  misc_feature (1)..(374): NCBI GI: 256726851 Blast Desc: [Nectria haematococca mpVI 77-13-4]
  misc_feature (1)..(374): NCBI GI: 171690448 Blast Desc: protein product [Podospora anserina] gi|170945172|emb|CAP71283.1| protein product [Podospora anserina]
  misc_feature (1)..(351): NCBI GI: 261352529 Blast Desc: HGH1 [Verticillium albo-atrum VaMs.102]
  misc_feature (1)..(332): NCBI GI: 85108238 Blast Desc: NCU08324 [Neurospora crassa OR74A] gi|28924145|gb|EAA33301.1| NCU08324 [Neurospora crassa OR74A]
  misc_feature (59)..(338): NCBI GI: 156056949 Blast Desc: SS1G_04205 [Sclerotinia sclerotiorum 1980] gi|154701991|gb|EDO01730.1| SS1G_04205 [Sclerotinia sclerotiorum 1980]
  misc_feature (1)..(343): NCBI GI: 145228293 Blast Desc: An01g00030 [Aspergillus niger] gi|134054540|emb|CAK36848.1| protein product [Aspergillus niger]
  misc_feature (1)..(374): NCBI GI: 169778606 Blast Desc: [Aspergillus oryzae RIB40] gi|238498999|ref|XP_002380734.1| DNA-binding protein HGH1, [Aspergillus flavus NRRL3357] gi|83772506|dbj|BAE62635.1| protein
  misc_feature (1)..(374): NCBI GI: 119474617 Blast Desc: DNA-binding protein HGH1, [Neosartorya fischeri NRRL 181] gi|119407337|gb|EAW17287.1| DNA-binding protein HGH1, [Neosartorya fischeri NRRL 181]
  misc_feature (22)..(374): NCBI GI: 121711824 Blast Desc: DNA-binding protein HGH1, [Aspergillus clavatus NRRL 1] gi|119401679|gb|EAW12101.1| DNA-binding protein HGH1, [Aspergillus clavatus NRRL 1]
MESELEQLVGLIIDRNPQVRVLATENLVPFSISQPSIFKADNLKPVQNLKLLIKDDPQIAAHVVTILVNLSADQEILEDLAKDEKFLSEIFRQIIVPTEPNANLLAMLLANLAKSDSLKSILSKKQPAPEELKSDDGIINQLLDLFVKGAEGTYNKEADFDHLSYLFADLTKHAEFRQYFIQRQGYDGVIPITKLKVFTEHKSDVRRKGVASTIKNVAFDVPSHPLFISEDDIDILPYILLPIVGNEEYDLEETMAMLPDLQLLPPDKMRDSDPNIIQTHVETLLLLCTTREARERLREIKVYPLIRETHSRVNNEGVQDACERLVQMLARDEEDEKKDTPRVQEIKDEGESKGAEKAKNGVEEEDDDDQIVEV

SEQ ID NO: 4990 - DNA, 1301 bp, Muscodor strobelii
  misc_feature: SGI EST ID NO. CUFF.12557.0
  misc_feature: Variant of the nucleotide sequence at SEQ ID NO 4988
aaaacgttgccagcgacgcgagtgttgcgaaagagttgtcgatctatcgtttggcaatatggagtcagaattagaacagttggtcggtctgataatcgatcgcaaccctcaggttcgagttcttgcgactgagaatcttgtcccgttctccatatcacagcctagcattttcaaggccgataacctcaagcctgtacaaaacttgaaacttcttattaaagacgacccgcaaatcgccgcacatgttgtcaccatactggtcaacctttccgccgaccaggaaatcttagaagacctagcaaaggacgagaaattcttgtctgaaatattcagacaaatcattgtcccaacagagccaaacgccaatcttctggcgatgctcctggcaaacttagcaaaatcagactctctaaagtcgatattatccaaaaagcaacccgcaccagaagagcttaagtccgacgacggcatcattaaccaacttctcgacctcttcgtcaagggtgcagaagggacctacaacaaagaagccgatttcgaccacctctcctacctctttgctgatcttacgaagcatgccgagtttaggcagtactttatacaacgacagggatacgatggagtgattccaattacaaagcttaaggtctttacggaacacaagtccgacgtccggcgcaaaggcgtagcatcaacaataaagaacgtcgcgttcgacgtcccgtcgcacccacttttcatatcagaggatgacatagatatcctgccgtacatattattaccgattgtagggaatgaggagtacgacctcgaggagaccatggcaatgctcccagatctacagctcctgcccccggataagatgagagattcagatccgaatatcatacaaacacacgtcgagactctcctcctactatgtacgacgagagaggcgagagagagactaagagaaatcaaagtctacccattaatcagagaaacgcattccagggtgaataacgaaggtgttcaggatgcttgtgagagattagtgcagatgttggcacgggatgaggaggatgagaagaaagacactccgagggtgcaggaaattaaggatgagggtgagtcaaaaggcgctgagaaggctaagaatggtgtagaggaagaggatgatgatgaccagatagttgaagtctgaggtagccttgttgttgcaatatacccttgctctctgtactggagaatattcacatttcaatcgcgattaacgatgtgtttggactggaacgatacagacttgtgacgatacgctcgag

SEQ ID NO: 4991 - DNA, 1125 bp, Muscodor strobelii
  misc_feature: SGI cDNA ID NO. 561370
  misc_feature: Elevated expression when VOC is produced
  misc_feature: Encodes the peptide sequence at SEQ ID NO 4992
atggagtcagaattagaacagttggtcggtctgataatcgatcgcaaccctcaggttcgagttcttgcgactgagaatcttgtcccgttctccatatcacagcctagcattttcaaggccgataacctcaagcctgtacaaaacttgaaacttcttattaaagacgacccgcaaatcgccgcacatgttgtcaccatactggtcaacctttccgccgaccaggaaatcttagaagacctagcaaaggacgagaaattcttgtctgaaatattcagacaaatcattgtacgttccgagccaaacgccaatcttctggcgatgctcctggcaaacttagcaaaatcagactctctaaagtcgatattatccaaaaagcaacccgcaccagaagagcttaagtccgacgacggcatcattaaccaacttctcgacctcttcgtcaagggtgcagaagggacctacaacaaagaagccgatttcgaccacctctcctacctctttgctgatcttacgaagcatgccgagtttaggcagtactttatacaacgacagggatacgatggagtgattccaattacaaagcttaaggtctttacggaacacaagtccgacgtccggcgcaaaggcgtagcatcaacaataaagaacgtcgcgttcgacgtcccgtcgcacccacttttcatatcagaggatgacatagatatcctgccgtacatattattaccgattgtagggaatgaggagtacgacctcgaggagaccatggcaatgctcccagatctacagctcctgcccccggataagatgagagattcagatccgaatatcatacaaacacacgtcgagactctcctcctactatgtacgacgagagaggcgagagagagactaagagaaatcaaagtctacccattaatcagagaaacgcattccagggtgaataacgaaggtgttcaggatgcttgtgagagattagtgcagatgttggcacgggatgaggaggatgagaagaaagacactccgagggtgcaggaaattaaggatgagggtgagtcaaaaggcgctgagaaggctaagaatggtgtagaggaagaggatgatgatgaccagatagttgaagtctga

SEQ ID NO: 4992 - protein, 374 aa, Muscodor strobelii
  misc_feature: SGI Peptide ID NO. 561370
  misc_feature (91)..(279): Pfam Id: PF04063 Pfam Desc: Domain of function (DUF383)
  misc_feature (280)..(340): Pfam Id: PF04064 Pfam Desc: Domain of function (DUF384)
  misc_feature (1)..(374): NCBI GI: 46121703 Blast Desc: FG05230.1 [Gibberella zeae PH-1]
  misc_feature (1)..(374): NCBI GI: 256726851 Blast Desc: [Nectria haematococca mpVI 77-13-4]
  misc_feature (1)..(374): NCBI GI: 171690448 Blast Desc: protein product [Podospora anserina] gi|170945172|emb|CAP71283.1| protein product [Podospora anserina]
  misc_feature (1)..(351): NCBI GI: 261352529 Blast Desc: HGH1 [Verticillium albo-atrum VaMs.102]
  misc_feature (1)..(332): NCBI GI: 85108238 Blast Desc: NCU08324 [Neurospora crassa OR74A] gi|28924145|gb|EAA33301.1| NCU08324 [Neurospora crassa OR74A]
  misc_feature (59)..(338): NCBI GI: 156056949 Blast Desc: SS1G_04205 [Sclerotinia sclerotiorum 1980] gi|154701991|gb|EDO01730.1| SS1G_04205 [Sclerotinia sclerotiorum 1980]
  misc_feature (1)..(343): NCBI GI: 145228293 Blast Desc: An01g00030 [Aspergillus niger] gi|134054540|emb|CAK36848.1| protein product [Aspergillus niger]
  misc_feature (1)..(374): NCBI GI: 169778606 Blast Desc: [Aspergillus oryzae RIB40] gi|238498999|ref|XP_002380734.1| DNA-binding protein HGH1, [Aspergillus flavus NRRL3357] gi|83772506|dbj|BAE62635.1| protein
  misc_feature (1)..(374): NCBI GI: 119474617 Blast Desc: DNA-binding protein HGH1, [Neosartorya fischeri NRRL 181] gi|119407337|gb|EAW17287.1| DNA-binding protein HGH1, [Neosartorya fischeri NRRL 181]
  misc_feature (1)..(374): NCBI GI: 240281337 Blast Desc: HGH1 protein [Ajellomyces capsulatus H143]
  misc_feature: Useful for introducing or modulating the production of volatile compounds
MESELEQLVGLIIDRNPQVRVLATENLVPFSISQPSIFKADNLKPVQNLKLLIKDDPQIAAHVVTILVNLSADQEILEDLAKDEKFLSEIFRQIIVRSEPNANLLAMLLANLAKSDSLKSILSKKQPAPEELKSDDGIINQLLDLFVKGAEGTYNKEADFDHLSYLFADLTKHAEFRQYFIQRQGYDGVIPITKLKVFTEHKSDVRRKGVASTIKNVAFDVPSHPLFISEDDIDILPYILLPIVGNEEYDLEETMAMLPDLQLLPPDKMRDSDPNIIQTHVETLLLLCTTREARERLREIKVYPLIRETHSRVNNEGVQDACERLVQMLARDEEDEKKDTPRVQEIKDEGESKGAEKAKNGVEEEDDDDQIVEV

SEQ ID NO: 4993 - DNA, 1301 bp, Muscodor strobelii; identical to SEQ ID NO: 4990
  misc_feature: SGI EST ID NO. CUFF.12557.0
  misc_feature: Variant of the nucleotide sequence at SEQ ID NO 4991

SEQ ID NO: 4994 - DNA, 1197 bp, Muscodor strobelii
  misc_feature: SGI cDNA ID NO. 561371
  misc_feature: Encodes the peptide sequence at SEQ ID NO 4995
atgggtggtagcagtcagaaaattatcatgccaaactcagacgacgagaacctccatctcactcgtcccaccgacgatgagcttgtcaaaatatggtcgaacacattcacatcttggaaagatcactacgagacattgcccgagtatttgaacgagtcacaatatctaacatcggcgccgcttgctgaaaatggcggtatgatgacatggattctggtagacaagacactcgacgcagatcatcgtccaattctctgctcctgtgagagcatatcgaaacgtgctctgatgagtgacgaaaaaggtaacatcgaggaagcaattgtttacggtatagcaagtgtcttctgccctgccgaatatcgcggccgtggctatgcgaaacgccacatgaaagaaattggcaacgtccttcgtcattggcaaacacaacgaggaagaaagataatcgggagcgttctgtactctgatattggaaagtcgttctatgccaagttagggtggaaaccaaataatacgaactcccatattgaattttcgtcatttcgaagccccaaaccagattcagttcgagatattctcgaagatgaccttgcggcactttgtaaaaaagacgaagaacttattcgcgaagccatggcagctccagaagcgagtagaacaaagcgcgttgtcatcttgcctgatttagatcacatgttgtggcatatacgcaaagcggactacgctacaaaacacatctttaagaaggtaccacaggccaaaggcgcggttacaggacgacctggcaagcaagtttgggcagtctggactcatcgttactatggtcgtcatgacgcgaaagccacagataacgtgctctatatactacgcctcgttgttgaaggcgacccgagtgcgaatcggccacaactgagcaatgagtgcgagggtccacacttgtctgaggaacaggctacgagcttggaagctgttatctgtgctgctcagtcagaagctgccgagtggcatttagatacggtcaagctttgggatccttctctctgtgtgtatgaggcaatttccagtagtaaaatcctgcacactgtggttgagcgtgaagaaagtagtattgctagtttcatgtggtatgacgagggcgaaaatgaacagtggactcctgctgtcattaataatgagcattatgcgtggtgttag

SEQ ID NO: 4995 - protein, 398 aa, Muscodor strobelii
  misc_feature: SGI Peptide ID NO. 561371
  misc_feature (17)..(398): NCBI GI: 169611811 Blast Desc: SNOG_09020 [Phaeosphaeria nodorum SN15] gi|111062092|gb|EAT83212.1| SNOG_09020 [Phaeosphaeria nodorum SN15]
  misc_feature (18)..(397): NCBI GI: 189209698 Blast Desc: conserved [Pyrenophora tritici-repentis Pt-1C-BFP] gi|187977274|gb|EDU43900.1| conserved [Pyrenophora tritici-repentis Pt-1C-BFP]
  misc_feature (8)..(398): NCBI GI: 258573449 Blast Desc: [Uncinocarpus reesii 1704] gi|237901172|gb|EEP75573.1| [Uncinocarpus reesii 1704]
  misc_feature (9)..(398): NCBI GI: 239613871 Blast Desc: conserved [Ajellomyces dermatitidis ER-3]
  misc_feature (10)..(398): NCBI GI: 240106281 Blast Desc: CPC735_058440 [Coccidioides posadasii C735 delta SOWgp]
  misc_feature (9)..(398): NCBI GI: 261193589 Blast Desc: conserved [Ajellomyces dermatitidis SLH14081] gi|239588805|gb|EEQ71448.1| conserved [Ajellomyces dermatitidis SLH14081]
  misc_feature (10)..(398): NCBI GI: 119191958 Blast Desc: CIMG_00356 [Coccidioides immitis RS]
  misc_feature (9)..(398): NCBI GI: 240275148 Blast Desc: conserved [Ajellomyces capsulatus H143]
  misc_feature (18)..(398): NCBI GI: 225558754 Blast Desc: conserved [Ajellomyces capsulatus G186AR]
  misc_feature (18)..(398): NCBI GI: 171691302 Blast Desc: protein product [Podospora anserina] gi|170945599|emb|CAP71712.1| protein product [Podospora anserina]
  misc_feature (85)..(277): SWISSPROT Homolog: EC 2.3.1.32 Lysine N-acetyltransferase
MGGSSQKIIMPNSDDENLHLTRPTDDELVKIWSNTFTSWKDHYETLPEYLNESQYLTSAPLAENGGMMTWILVDKTLDADHRPILCSCESISKRALMSDEKGNIEEAIVYGIASVFCPAEYRGRGYAKRHMKEIGNVLRHWQTQRGRKIIGSVLYSDIGKSFYAKLGWKPNNTNSHIEFSSFRSPKPDSVRDILEDDLAALCKKDEELIREAMAAPEASRTKRVVILPDLDHMLWHIRKADYATKHIFKKVPQAKGAVTGRPGKQVWAVWTHRYYGRHDAKATDNVLYILRLVVEGDPSANRPQLSNECEGPHLSEEQATSLEAVICAAQSEAAEWHLDTVKLWDPSLCVYEAISSSKILHTVVEREESSIASFMWYDEGENEQWTPAVINNEHYAWC

SEQ ID NO: 4996 - DNA, 793 bp, Muscodor strobelii
  misc_feature: SGI EST ID NO. CUFF.12569.0
  misc_feature: Variant of the nucleotide sequence at SEQ ID NO 4994
ggataccctacgaaggtctgtcgtcttggatcatggacccaagcgccagccgagttctggtgtacgtaattgccaaataggtaagtattagtcaccattattggtgacattcgtaacccccatatcaactatttctgcgctcaaataactctctattcaatatgggactctcacaagtcgaacagggtggtttttatgcgcgtatcatagtgcaatgttgttgctgcatctgtcataatgggtggtagcagtcagaaaattatcatgccaaactcagacgacgagaacctccatctcactcgtcccaccgacgatgagcttgtcaaaatatggtcgaacacattcacatcttggaaagatcactacgagacattgcccgagtatttgaacgagtcacaatatctaacatcggcgccgcttgctgaaaatggcggtatgatgacatggattctggtagacaagacactcgacgcagatcatcgtccaattctctgctcctgtgagagcatatcgaaacgtgctctgatgagtgacgaaaaaggtaacatcgaggaagcaattgtttacggtatagcaagtgtcttctgccctgccgaatatcgcggccgtggctatgcgaaacgccacatgaaagaaattggcaacgtccttcgtcattggcaaacacaacgaggaagaaagataatcgggagcgttctgtactctgatattggaaagtcgttctatgccaagttagggtggaaaccaaataatacgaactcccatattgaattttcgtcatttcgaagcccca

SEQ ID NO: 4997 - DNA, 1695 bp, Muscodor strobelii
  misc_feature: SGI cDNA ID NO. 561372
  misc_feature: Elevated expression when VOC is produced
  misc_feature: Encodes the peptide sequence at SEQ ID NO 4998
atggcccaagaatcttctgcccccgtccatgcgacggctggaggcaatgcggcttatcacaacttccacaatgactttcttcatgttcaagatcccaatgaacgtcgtcgcctggcccttgcggagattgacaaagcacccttcggctggtaccatgtcagagctgtgattgttgccggtgttggtttcttcaccgattcttacgacatctttgttgtcagtctgcttaatatcatgctgggtatcgtgtattatccggagaacaaggcagtcctttacactagttccgacactgcaatcaagctcgcaacttccgccggcaccgttattggtcagcttggtttcggataccttgccgatcgcctcggtcgaaagaagatgtatggtctcgagctcattctcattatttttgcgacaatcgggcaagctcttgcgtctggctcaccttcagtcaatatcgtcggtcttctaatcttctggcgtgtcttgatgggagtgggtattggaggcgactaccccctttcttctatcattacatccgagttcgctactacaaaatggcgaggcgccatgatgggtgctgtgtttgcccaacagggtctaggccagcttaccggagccttcgttatgttgttccttactctgggtttcaagcaggctctttcccaatcaccgggtatcacccagtgtgatggatactgcgttattgcggtggacaagatgtggagggcccttgttggcttcggcgcagtgccagcagccattgctctttattaccgattgacaatccctgaaactccgcgctacacgttcgacgttggccgtgatattgagaaaggctcggaagatgtcaaggcctatatgagtggcaggaatgaaggcgaacccgacgatctcgcccgtcttcaaacgcgccaagctgctcaggagcaattgcaaattcctaaggcaagctggggtgattttttccgtcactactcgaagcgcccaaatgcactcctgcttttgggtaccgccggctcttggttcgctctggatgtcgcatattacggtattaatctcaataacgcggtcgtcttgcaagttattggatactccactaaagatgcccattccacctacgacttcttgtacaggaccgcggtcggtaacctcatcgttattcttgccggcgccgtcccaggttattgggtctctgtcgctacgctcgacacgcttggccgcaaaccaattcagttcatgggcttcagtattctgaccatcctcttcattgtttggggctttgcgtacaattcaatctcaaataatgctaagctggccatcttcgtcctcgcccagtttttcttcaacttcggtcccaacatgacaaccttcatcgtgccaggagaggtatttccaacacgctatcggtccacgtctcacggtatctcggcagcttctggcaagatcggatctatcatcggtcagggtgccatcgctccgctccggacccgggctcccaacaacggatggctcaatcatgtgttggagatctatgctctattcatgttgcttggtgtcggaaccacgttcctcattccagagaccaagcgtaagactcttgaggagctttgcggcgaggaccagcctataccttcctcggccgcagctggaagtgagcaagacaagtctgcttctgctcgtgaatcgctatga

SEQ ID NO: 4998 - protein, 564 aa, Muscodor strobelii
  misc_feature: SGI Peptide ID NO. 561372
  misc_feature (70)..(489): Pfam Id: PF07690 Pfam Desc: Major Facilitator Superfamily
  misc_feature (55)..(541): Pfam Id: PF00083 Pfam Desc: Sugar (and other) transporter
  misc_feature (70)..(217): Pfam Id: PF07690 Pfam Desc: Major Facilitator Superfamily
  misc_feature (242)..(489): Pfam Id: PF07690 Pfam Desc: Major Facilitator Superfamily
  misc_feature (55)..(213): Pfam Id: PF00083 Pfam Desc: Sugar (and other) transporter
  misc_feature (398)..(541): Pfam Id: PF00083 Pfam Desc: Sugar (and other) transporter
  misc_feature (242)..(324): Pfam Id: PF00083 Pfam Desc: Sugar (and other) transporter
  misc_feature (1)..(557): NCBI GI: 46127033 Blast Desc: FG07894.1 [Gibberella zeae PH-1]
  misc_feature (1)..(557): NCBI GI: 3724291 Blast Desc: phosphate permease [Gibberella zeae]
  misc_feature (10)..(540): NCBI GI: 164423518 Blast Desc: inorganic phosphate transporter PHO84 [Neurospora crassa OR74A] gi|157070128|gb|EAA33302.2| inorganic phosphate transporter PHO84 [Neurospora crassa OR74A]
  misc_feature (12)..(542): NCBI GI: 116196170 Blast Desc: CHGG_04683 [Chaetomium globosum CBS 148.51] gi|88180596|gb|EAQ88064.1| CHGG_04683 [Chaetomium globosum CBS 148.51]
  misc_feature (12)..(557): NCBI GI: 171690446 Blast Desc: protein product [Podospora anserina] gi|170945171|emb|CAP71282.1| protein product [Podospora anserina]
  misc_feature (9)..(541): NCBI GI: 156059470 Blast Desc: SS1G_03747 [Sclerotinia sclerotiorum 1980] gi|154701534|gb|EDO01273.1| SS1G_03747 [Sclerotinia sclerotiorum 1980]
  misc_feature (7)..(541): NCBI GI: 154316390 Blast Desc: BC1G_04126 [Botryotinia fuckeliana B05.10] gi|150845926|gb|EDN21119.1| BC1G_04126 [Botryotinia fuckeliana B05.10]
  misc_feature (9)..(546): NCBI GI: 154305146 Blast Desc: BC1G_08663 [Botryotinia fuckeliana B05.10] gi|150853826|gb|EDN29018.1| BC1G_08663 [Botryotinia fuckeliana B05.10]
  misc_feature (12)..(546): NCBI GI: 119191924 Blast Desc: CIMG_00339 [Coccidioides immitis RS]
  misc_feature (12)..(546): NCBI GI: 240106293 Blast Desc: Inorganic phosphate transporter, [Coccidioides posadasii C735 delta SOWgp]
  misc_feature: Useful for introducing or modulating the production of volatile compounds
MAQESSAPVHATAGGNAAYHNFHNDFLHVQDPNERRRLALAEIDKAPFGWYHVRAVIVAGVGFFTDSYDIFVVSLLNIMLGIVYYPENKAVLYTSSDTAIKLATSAGTVIGQLGFGYLADRLGRKKMYGLELILIIFATIGQALASGSPSVNIVGLLIFWRVLMGVGIGGDYPLSSIITSEFATTKWRGAMMGAVFAQQGLGQLTGAFVMLFLTLGFKQALSQSPGITQCDGYCVIAVDKMWRALVGFGAVPAAIALYYRLTIPETPRYTFDVGRDIEKGSEDVKAYMSGRNEGEPDDLARLQTRQAAQEQLQIPKASWGDFFRHYSKRPNALLLLGTAGSWFALDVAYYGINLNNAVVLQVIGYSTKDAHSTYDFLYRTAVGNLIVILAGAVPGYWVSVATLDTLGRKPIQFMGFSILTILFIVWGFAYNSISNNAKLAIFVLAQFFFNFGPNMTTFIVPGEVFPTRYRSTSHGISAASGKIGSIIGQGAIAPLRTRAPNNGWLNHVLEIYALFMLLGVGTTFLIPETKRKTLEELCGEDQPIPSSAAAGSEQDKSASARESL

SEQ ID NO: 4999 - DNA, 2166 bp, Muscodor strobelii
  misc_feature: SGI EST ID NO. CUFF.12635.0
  misc_feature: Variant of the nucleotide sequence at SEQ ID NO 4997
gcaaggttgacagcagttacgctgcatgtcgattaagtctatatagacgcggtacacccttatcgcctttcaccctcgtcctcttcgtgcttctgtgcgagaatcatccatctgcgagcctccattgtgaggtctagtgatcaccttcttgtcatcacgtcttcgtcgacggtaagactgtgttgacgatatatcttgtatctctcctttgcaacaccacggtcgataacgcgatggcccaagaatcttctgcccccgtccatgcgacggctggaggcaatgcggcttatcacaacttccacaatgactttcttcatgttcaagatcccaatgaacgtcgtcgcctggcccttgcggagattgacaaagcacccttcggctggtaccatgtcagagctgtgattgttgccggtgttggtttcttcaccgattcttacgacatctttgttgtcagtctgcttaatatcatgctgggtatcgtgtattatccggagaacaaggcagtcctttacactagttccgacactgcaatcaagctcgcaacttccgccggcaccgttattggtcagcttggtttcggataccttgccgatcgcctcggtcgaaagaagatgtatggtctcgagctcattctcattatttttgcgacaatcgggcaagctcttgcgtctggctcaccttcagtcaatatcgtcggtcttctaatcttctggcgtgtcttgatgggagtgggtattggaggcgactaccccctttcttctatcattacatccgagttcgctactacaaaatggcgaggcgccatgatgggtgctgtgtttgcccaacagggtctaggccagcttaccggagccttcgttatgttgttccttactctgggtttcaagcaggctctttcccaatcaccgggtatcacccagtgtgatggatactgcgttattgcggtggacaagatgtggagggcccttgttggcttcggcgcagtgccagcagccattgctctttattaccgattgacaatccctgaaactccgcgctacacgttcgacgttggccgtgatattgagaaaggctcggaagatgtcaaggcctatatgagtggcaggaatgaaggcgaacccgacgatctcgcccgtcttcaaacgcgccaagctgctcaggagcaattgcaaattcctaaggcaagctggggtgattttttccgtcactactcgaagcgcccaaatgcactcctgcttttgggtaccgccggctcttggttcgctctggatgtcgcatattacggtattaatctcaataacgcggtcgtcttgcaagttattggatactccactaaagatgcccattccacctacgacttcttgtacaggaccgcggtcggtaacctcatcgttattcttgccggcgccgtcccaggttattgggtctctgtcgctacgctcgacacgcttggccgcaaaccaattcagttcatgggcttcagtattctgaccatcctcttcattgtttggggctttgcgtacaattcaatctcaaataatgctaagctggccatcttcgtcctcgcccagtttttcttcaacttcggtcccaacatgacaaccttcatcgtgccaggagaggtatttccaacacgctatcggtccacgtctcacggtatctcggcagcttctggcaagatcggatctatcatcggtcagggtgccatcgctccgctccggacccgggctcccaacaacggatggctcaatcatgtgttggagatctatgctctattcatgttgcttggtgtcggaaccacgttcctcattccagagaccaagcgtaagactcttgaggagctttgcggcgaggaccagcctataccttcctcggccgcagctggaagtgagcaagacaagtctgcttctgctcgtgaatcgctatgagcagtccgcgtaggcaattgtaaaaatttctccagacatgtaacccgtcatgtacaaattggatctcgccagctgtgtgacgcgtgtcataaactgcgagaagtgatactttgggggatgattctcgtcggggatgagaatggatgttgtattaacgcagatatacccgttccttcattagattttctaaatacacttacgtactttaatcatcccctgccgagttcttaatccctaa

SEQ ID NO: 5000 - DNA, 1479 bp, Muscodor strobelii
  misc_feature: SGI cDNA ID NO. 561373
  misc_feature: Reduced expression when VOC is produced
  misc_feature: Encodes the peptide sequence at SEQ ID NO 5001
atgacgttatctgggcttgaagtcgctacacacgacaacaaggattcttgttgggttgtcattcatggcaaagcatacgatgttacagagtttcttccagagcaccctggtgggatgaagatcattttgaaatatgcaggcaaagatgcaacagcagagttcgacccaattcaccctccagacacgctggacaagtacctggacaagtcaaaacacctcggcgatgtagacatgaaaactgtgagaacagtaaaggaggtcgaggatccagacgagacggcgcgacagcagcgcattgcggacaagccccagctcgcgcaatgctataacctgctcgattttgaggccgtcgccaagaacgtgatgaagaaatctgcatgggcgtactactcaagcgcagctgatgacgagataacaatgcgtgaaaaccacgaggcataccaccgaatatggttccgccccaagatcctcgtaaatgtaaagaacgtctcattcaacaccacaatgctcggcacgccctgctcaatgcccttctacgtgaccgcaacagcactcggtaaactaggccatccagaaggcgaagtagtcctcacgcgcgcagcgcacaagcacaacgtcgtgcagatgatcccgacgctagcttcttgctccttcgacgagatcgtcgacgccagacagggcgaccaggtccaatggcttcagctctacgtaaacgccgatcgtaagatcacggagaagatcgtgcgacatgccgaagcgcgggggtgcaagggtctgttcattacggttgatgcgccgcaactgggacgccgagagaaggacatgcgatccaagttcgtggaccaagggtctaacgtccagagtggtcaagacacggataactcccagggagcagctcgcgccatctcgtcattcatcgatcccgcactttcttgggacgacatcccctggttcaagagcataacgaagatgcctatagtcctcaagggcgtgcagcgcgtcgaagacgtcgtgaaagccgccgagctcggctgcgatggcgtggtcctctccaaccacggtggtcgacaactcgacttcgcgcgctccggtattgaagttctcgccgagaccatgccagtgcttcgctccatgggactcgacaacaaaatcgaagtcttcgtcgatggtggtgtgcgccgcgcaaccgacatcctgaaagcattgtgtctcggcgcgaagggtgtcggtatcggacggcctttcctgtacgccatgagcgcttatggttttgatggcgtggataaagctatgcagcttcttcgggacgaactagagatgaatatgcggctcattggatgcacgagtgtagaggaactcaatccctcgatgctcgatacgagcaatctgagtgctcatattacgggtgttccgaccgacaatttgggacatagagtttatgacccgcttgctgggccggtgccgaagtcgaagttgtag

SEQ ID NO: 5001 - protein, 492 aa, Muscodor strobelii
  misc_feature: SGI Peptide ID NO. 561373
  misc_feature (2)..(77): Pfam Id: PF00173 Pfam Desc: Cytochrome b5-like Heme/Steroid binding domain
  misc_feature (118)..(460): Pfam Id: PF01070 Pfam Desc: FMN-dependent dehydrogenase
  misc_feature (7)..(77): Pfam Id: PF00173 Pfam Desc: Cytochrome b5-like Heme/Steroid binding domain
  misc_feature (368)..(419): Pfam Id: PF01645 Pfam Desc: Conserved region in glutamate synthase
  misc_feature (3)..(486): NCBI GI: 116196338 Blast Desc: CHGG_04767 [Chaetomium globosum CBS 148.51] gi|88180680|gb|EAQ88148.1| CHGG_04767 [Chaetomium globosum CBS 148.51]
  misc_feature (1)..(492): NCBI GI: 256720938 Blast Desc: [Nectria haematococca mpVI 77-13-4]
  misc_feature (3)..(486): NCBI GI: 255933708 Blast Desc: Pc12g14280 [Penicillium chrysogenum Wisconsin 54-1255] gi|211582852|emb|CAP81055.1| Pc12g14280 [Penicillium chrysogenum Wisconsin 54-1255]
  misc_feature (3)..(486): NCBI GI: 115396676 Blast Desc: cytochrome b2, mitochondrial precursor [Aspergillus terreus NIH2624] gi|114193546|gb|EAU35246.1| cytochrome b2, mitochondrial precursor [Aspergillus terreus NIH2624]
  misc_feature (3)..(492): NCBI GI: 121714635 Blast Desc: mitochondrial cytochrome b2, [Aspergillus clavatus NRRL 1] gi|119403082|gb|EAW13502.1| mitochondrial cytochrome b2, [Aspergillus clavatus NRRL 1]
  misc_feature (3)..(492): NCBI GI: 85105154 Blast Desc: cytochrome b2, mitochondrial precursor [Neurospora crassa OR74A] gi|28923484|gb|EAA32664.1| cytochrome b2, mitochondrial precursor [Neurospora crassa OR74A]
  misc_feature (3)..(486): NCBI GI: 238502675 Blast Desc: mitochondrial cytochrome b2, [Aspergillus flavus NRRL3357] gi|220691381|gb|EED47729.1| mitochondrial cytochrome b2, [Aspergillus flavus NRRL3357]
  misc_feature (3)..(492): NCBI GI: 119487411 Blast Desc: mitochondrial cytochrome b2, [Neosartorya fischeri NRRL 181] gi|119410655|gb|EAW20601.1| mitochondrial cytochrome b2, [Neosartorya fischeri NRRL 181]
  misc_feature (3)..(492): NCBI GI: 70981939 Blast Desc: mitochondrial cytochrome b2 [Aspergillus fumigatus Af293] gi|66844121|gb|EAL84460.1| mitochondrial cytochrome b2, [Aspergillus fumigatus Af293]
  misc_feature (3)..(486): NCBI GI: 145249024 Blast Desc: An14g02250 [Aspergillus niger] gi|134081526|emb|CAK41962.1| protein product [Aspergillus niger]
  misc_feature (8)..(485): SWISSPROT Homolog: EC 1.1.2.3 L-lactate dehydrogenase (cytochrome)
  misc_feature: Useful for introducing or modulating the production of volatile compounds
MTLSGLEVATHDNKDSCWVVIHGKAYDVTEFLPEHPGGMKIILKYAGKDATAEFDPIHPPDTLDKYLDKSKHLGDVDMKTVRTVKEVEDPDETARQQRIADKPQLAQCYNLLDFEAVAKNVMKKSAWAYYSSAADDEITMRENHEAYHRIWFRPKILVNVKNVSFNTTMLGTPCSMPFYVTATALGKLGHPEGEVVLTRAAHKHNVVQMIPTLASCSFDEIVDARQGDQVQWLQLYVNADRKITEKIVRHAEARGCKGLFITVDAPQLGRREKDMRSKFVDQGSNVQSGQDTDNSQGAARAISSFIDPALSWDDIPWFKSITKMPIVLKGVQRVEDVVKAAELGCDGVVLSNHGGRQLDFARSGIEVLAETMPVLRSMGLDNKIEVFVDGGVRRATDILKALCLGAKGVGIGRPFLYAMSAYGFDGVDKAMQLLRDELEMNMRLIGCTSVEELNPSMLDTSNLSAHITGVPTDNLGHRVYDPLAGPVPKSKL

SEQ ID NO: 5002 - DNA, 2039 bp, Muscodor strobelii
  misc_feature: SGI EST ID NO. CUFF.12599.0
  misc_feature: Variant of the nucleotide sequence at SEQ ID NO 5000
accaatcgccactcatcgattaccacctcgcgagtcgtgacctcattctctatgtcgcatttcatcgttgatgaatctgccattataaacatttctgagttgttgttaacatattagacgctcatagtattcgagcatagatgagacaagtcccgtacagcaatcatttatagtcttttcctcaatttttagcggctttctgcagcggtccactgtcctccgtcgactgtgtaacgtcatcccatccagccgaagcaaatcaccattgaactcggcatctcacccggacgaagacagcatcatattaattggcgcccagagccattgtatcatagagcaaagtaaagttcgttaaattcgtcttcaagatgacgttatctgggcttgaagtcgctacacacgacaacaaggattcttgttgggttgtcattcatggcaaagcatacgatgttacagagtttcttccagagcaccctggtgggatgaagatcattttgaaatatgcaggcaaagatgcaacagcagagttcgacccaattcaccctccagacacgctggacaagtacctggacaagtcaaaacacctcggcgatgtagacatgaaaactgtgagaacagtaaaggaggtcgaggatccagacgagacggcgcgacagcagcgcattgcggacaagccccagctcgcgcaatgctataacctgctcgattttgaggccgtcgccaagaacgtgatgaagaaatctgcatgggcgtactactcaagcgcagctgatgacgagataacaatgcgtgaaaaccacgaggcataccaccgaatatggttccgccccaagatcctcgtaaatgtaaagaacgtctcattcaacaccacaatgctcggcacgccctgctcaatgcccttctacgtgaccgcaacagcactcggtaaactaggccatccagaaggcgaagtagtcctcacgcgcgcagcgcacaagcacaacgtcgtgcagatgatcccgacgctagcttcttgctccttcgacgagatcgtcgacgccagacagggcgaccaggtccaatggcttcagctctacgtaaacgccgatcgtaagatcacggagaagatcgtgcgacatgccgaagcgcgggggtgcaagggtctgttcattacggttgatgcgccgcaactgggacgccgagagaaggacatgcgatccaagttcgtggaccaagggtctaacgtccagagtggtcaagacacggataactcccagggagcagctcgcgccatctcgtcattcatcgatcccgcactttcttgggacgacatcccctggttcaagagcataacgaagatgcctatagtcctcaagggcgtgcagcgcgtcgaagacgtcgtgaaagccgccgagctcggctgcgatggcgtggtcctctccaaccacggtggtcgacaactcgacttcgcgcgctccggtattgaagttctcgccgagaccatgccagtgcttcgctccatgggactcgacaacaaaatcgaagtcttcgtcgatggtggtgtgcgccgcgcaaccgacatcctgaaagcattgtgtctcggcgcgaagggtgtcggtatcggacggcctttcctgtacgccatgagcgcttatggttttgatggcgtggataaagctatgcagcttcttcgggacgaactagagatgaatatgcggctcattggatgcacgagtgtagaggaactcaatccctcgatgctcgatacgagcaatctgagtgctcatattacgggtgttccgaccgacaatttgggacatagagtttatgacccgcttgctgggccggtgccgaagtcgaagttgtagagcgggtgttggatatcagcgtgagagttaagggctgaagagtatatacacatttacatatacctttttatttttttgattgaagatatttgcctcaacaaagtaggcttgtccgagaagatatgttaatgatcactacgggagctagacccgataaggagaaataaattatgcagaagaataaagcctcgg

SEQ ID NO: 5003 - DNA, 999 bp, Muscodor strobelii
  misc_feature: SGI cDNA ID NO. 561374
  misc_feature: Encodes the peptide sequence at SEQ ID NO 5004
atgtcgtccctcgaggccaagattgtcgtgctcggctctcagggcgtcggcaagacgtcgcttgtcaatcgctactgcaagggcgccttcaatccggcccagaccacatccaccgtcggcgccagcttcatgaccaagcgtgtcgtcgacagcgacactgacaccgtcgtacgcttgcagatatgggacacagccggacaggaacgattccgctccatatcgcgactctactaccgcggtgccaacgcctgcatcctctgctacagcatcacggacgcccagtccttcgccgagatgggcatgtggctcactgagctccgtcgcaatctcccaccagatatcgtcctgcacgtcgtcggcacgaaagcagatatcgttgcacgcgacccgacccgccgcgaagtgcccttcgagcgctgcatagcatacgtcgcagagaacctcgcgcccggcctcggctccacgcctcctcccaccgcaacaccatcgggtctgacaggtctgccgcctctgcccaccatcaacctctcgacatcgggcccatctgcctcgttgacgaccacgccgctgggcgccccaccctcaagcgcacccgaaccgcgcagtccgagtagcaagcggagcagcggcttctggggccaagaggtaggctgggatgcctgccacgagatcagcgccgagagcggcgagggagtcgaggaggtcttccgcgttgtgacgcggaagcttgtcgagcagaacaggaagattcagcaggcaattctggccgctactgccacgccgggcctcagcacacctggaggaccagatggtgtggaggggtactttgacggtgtgaatccgagaggcagctttcgagtcgggcgagaccgtagaagttggcttttcagcccgggtttctcgccggctgtcactgttgataatcccagcacgggcgatccaaactctcagggtagggatgttgaggtcaggagtaagagggagagcagatgctgctaa

SEQ ID NO: 5004 - protein, 332 aa, Muscodor strobelii
  misc_feature: SGI Peptide ID NO. 561374
  misc_feature (7)..(124): Pfam Id: PF08477 Pfam Desc: Miro-like protein
  misc_feature (7)..(245): Pfam Id: PF00071 Pfam Desc: Ras family
  misc_feature (7)..(139): Pfam Id: PF00071 Pfam Desc: Ras family
  misc_feature (1)..(332): NCBI GI: 46136069 Blast Desc: FG09550.1 [Gibberella zeae PH-1]
  misc_feature (1)..(332): NCBI GI: 256727576 Blast Desc: [Nectria haematococca mpVI 77-13-4]
  misc_feature (2)..(332): NCBI GI: 171690352 Blast Desc: protein product [Podospora anserina] gi|170945124|emb|CAP71235.1| protein product [Podospora anserina]
  misc_feature (2)..(332): NCBI GI: 156035783 Blast Desc: SS1G_13095 [Sclerotinia sclerotiorum 1980] gi|154698500|gb|EDN98238.1| SS1G_13095 [Sclerotinia sclerotiorum 1980]
  misc_feature (2)..(332): NCBI GI: 154294053 Blast Desc: BC1G_14060 [Botryotinia fuckeliana B05.10] gi|150845105|gb|EDN20298.1| BC1G_14060 [Botryotinia fuckeliana B05.10]
  misc_feature (2)..(332): NCBI GI: 119487415 Blast Desc: ras-like GTP-binding protein, [Neosartorya fischeri NRRL 181] gi|119410657|gb|EAW20603.1| ras-like GTP-binding protein, [Neosartorya fischeri NRRL 181]
  misc_feature (2)..(332): NCBI GI: 121714639 Blast Desc: ras-like GTP-binding protein, [Aspergillus clavatus NRRL 1] gi|119403084|gb|EAW13504.1| ras-like GTP-binding protein, [Aspergillus clavatus NRRL 1]
  misc_feature (2)..(332): NCBI GI: 70981935 Blast Desc: ras-like GTP-binding protein [Aspergillus fumigatus Af293] gi|66844119|gb|EAL84458.1| ras-like GTP-binding protein, [Aspergillus fumigatus Af293] gi|159122279|gb|EDP47401.1| A1163]
  misc_feature (1)..(332): NCBI GI: 145613341 Blast Desc: MGG_01724 [Magnaporthe grisea 70-15] gi|145020432|gb|EDK04561.1| MGG_01724 [Magnaporthe grisea 70-15]
  misc_feature (2)..(332): NCBI GI: 169776005 Blast Desc: [Aspergillus oryzae RIB40] gi|238502681|ref|XP_002382574.1| ras-like GTP-binding protein, [Aspergillus flavus NRRL3357] gi|83771204|dbj|BAE61336.1| protein
MSSLEAKIVVLGSQGVGKTSLVNRYCKGAFNPAQTTSTVGASFMTKRVVDSDTDTVVRLQIWDTAGQERFRSISRLYYRGANACILCYSITDAQSFAEMGMWLTELRRNLPPDIVLHVVGTKADIVARDPTRREVPFERCIAYVAENLAPGLGSTPPPTATPSGLTGLPPLPTINLSTSGPSASLTTTPLGAPPSSAPEPRSPSSKRSSGFWGQEVGWDACHEISAESGEGVEEVFRVVTRKLVEQNRKIQQAILAATATPGLSTPGGPDGVEGYFDGVNPRGSFRVGRDRRSWLFSPGFSPAVTVDNPSTGDPNSQGRDVEVRSKRESRCC

SEQ ID NO: 5005 - DNA, 2098 bp, Muscodor strobelii
  misc_feature: SGI EST ID NO. CUFF.12603.0
  misc_feature: Variant of the nucleotide sequence at SEQ ID NO 5003
gaagaagccaaaacagattcccataattcacaacatcgatttccgcgccggagcgtttgcaccgactgggcatccgcttacttacagccccaagcggaagcatgacatgaagatcacccgctgcggtcccgcgttgtgcatcgcatcgtgcatttaacatcatctccagcctgcccagccgcggtgcgcgatgacatccctgaccgcttgtcaccatcaacaacgggttaacatcaactccaaatccccaaggctacagcatcgaggtgctggtcacggcctcacctctttgcctcggccgaacgtacacacaggcgcatgaacatttgattcatttgcttcagggcgacaatctcgtagtttctgtgtcgttcttaacactccttttgcatcagtccatttcctcgataccctgagaagagctttcctttttttcttttcttgttgcagacctgccttaatcgcacaagtacatttcggcttttctgtggtatcctcgatcgtcgatcgacccaaccagctaatacacgagacttcgacaacgatatattgcaacgacagtccttttctttgacatcacgaccatgtcgtccctcgaggccaagattgtcgtgctcggctctcagggcgtcggcaagacgtcgcttgtcaatcgctactgcaagggcgccttcaatccggcccagaccacatccaccgtcggcgccagcttcatgaccaagcgtgtcgtcgacagcgacactgacaccgtcgtacgcttgcagatatgggacacagccggacaggaacgattccgctccatatcgcgactctactaccgcggtgccaacgcctgcatcctctgctacagcatcacggacgcccagtccttcgccgagatgggcatgtggctcactgagctccgtcgcaatctcccaccagatatcgtcctgcacgtcgtcggcacgaaagcagatatcgttgcacgcgacccgacccgccgcgaagtgcccttcgagcgctgcatagcatacgtcgcagagaacctcgcgcccggcctcggctccacgcctcctcccaccgcaacaccatcgggtctgacaggtctgccgcctctgcccaccatcaacctctcgacatcgggcccatctgcctcgttgacgaccacgccgctgggcgccccaccctcaagcgcacccgaaccgcgcagtccgagtagcaagcggagcagcggcttctggggccaagaggtaggctgggatgcctgccacgagatcagcgccgagagcggcgagggagtcgaggaggtcttccgcgttgtgacgcggaagcttgtcgagcagaacaggaagattcagcaggcaattctggccgctactgccacgccgggcctcagcacacctggaggaccagatggtgtggaggggtactttgacggtgtgaatccgagaggcagctttcgagtcgggcgagaccgtagaagttggcttttcagcccgggtttctcgccggctgtcactgttgataatcccagcacgggcgatccaaactctcagggtagggatgttgaggtcaggagtaagagggagagcagatgctgctaattgggtgcacaactttcatacaacgagctgtggggttggtccttgcagagagaaggcaaatgcgattagatgaggtgccaacgacataactctggtagtggttgaggcccgttcaacgagatgaatgacgaacatggttgtgttttatgctagaagcactctgtttgatttttcacgacttcgagacgaacgattagcatggcatggcgaggcgttcagggcatgggaatcatagtttcggcattttattgtataggtatagcgtatactactacgcaaggggcatcttcggataggggttgtaatgatcacctgtcgtggtctctgtttatgtttaaaccctgggatctcctattattgctgcgaggaagacattctaacatgtgttaacgtgttacttagccaggttaaccaactgtatatacgtaagcatgcaacgcgttacacttttctataatatcaagttgcttggccaaggagtcacatatcctgcacttactgcgtgtgcaattgct

SEQ ID NO: 5006 - DNA, 1194 bp, Muscodor strobelii
  misc_feature: SGI cDNA ID NO. 561375
  misc_feature: Elevated expression when VOC is produced
  misc_feature: Encodes the peptide sequence at SEQ ID NO 5007
atgcggtcgagaatccctctcgtagaagccgtcttggcagcaagctccgtcacggcagcatcgctgacctgccctaacgaccttccattgagctgtcaaaacaccactgctattaccgacacctgttgcttcaatgcgccgggtggtgatcttctgctcactcaattctgggataccgctccgtcaacgggtccatcggactcatggactgtacacggtctctggccggacaattgtgatggcacgtacgaacagtattgtgatcagaacagactgtacacaaatatcacagccattatgcaggagaaagcaccgtgcacgctgaagactatgcaaatctactggaaagactaccagggtaatgacgaagatttctgggagcatgaattcggcaaacacggcacctgtattagtacgctgaatccagagtgctatgccgattaccaggccacggacgaagtgcccgattacttcaaccgtgctgtgagcttgttcaaaacgctgcctacctacacatggctcgcaaaggcgggtatcgtgccttcgagcacggctacttacactcttgctgcaatccaagccgctctctcctcgaaccacggtcacgatgtcatcatacggtgctctaatggagaattgaatgagctgtggtatcactatcacgttcgtggttcagtacagacgggtgaattcgtccctgttgaccccgtgggttcgccctcgaactgccctacgactggcatcaagtacttgcccaagtacactactcctactacgacttcaactactacgactacgaccagcacgcccacgtctacttcaatccccacgggcactgccggtgcactatcaggtaaggcatacgtcaaggtctcacccagcggcttcatgatctctggtgggaaatggtataatacggccggaacaccagcgacctacacagcgaccgcgaacgcagatggtgagaccttcacgatgaagacaagcaagggaccatgccagatcttgggcgataactcgctcagctgtgccgctggaaacacggctagcaactttggttacgacggtacttatatcaagtatgatggtgttaataccttctacactgcttcaacaccctcaggcacggagcagggtactttgtatacgactgagcaagctgtttctgcacagctttattggcagcctctgtag

SEQ ID NO: 5007 - protein, 397 aa, Muscodor strobelii
  misc_feature: SGI Peptide ID NO. 561375
  misc_feature (39)..(240): Pfam Id: PF00445 Pfam Desc: Ribonuclease T2 family
  misc_feature (1)..(394): NCBI GI: 261356680 Blast Desc: ribonuclease Trv [Verticillium albo-atrum VaMs.102]
  misc_feature (16)..(397): NCBI GI: 240111069 Blast Desc: Ribonuclease Trv , [Coccidioides posadasii C735 delta SOWgp]
  misc_feature (3)..(395): NCBI GI: 258565717 Blast Desc: ribonuclease Trv [Uncinocarpus reesii 1704] gi|237907304|gb|EEP81705.1| ribonuclease Trv [Uncinocarpus reesii 1704]
  misc_feature (32)..(397): NCBI GI: 119189867 Blast Desc: CIMG_04981 [Coccidioides immitis RS]
  misc_feature (8)..(397): NCBI GI: 238839723 Blast Desc: ribonuclease T2-like protein [Microsporum canis CBS 113480]
  misc_feature (23)..(382): NCBI GI: 189200809 Blast Desc: ribonuclease M [Pyrenophora tritici-repentis Pt-1C-BFP] gi|187983840|gb|EDU49328.1| ribonuclease M [Pyrenophora tritici-repentis Pt-1C-BFP]
  misc_feature (30)..(395): NCBI GI: 119491687 Blast Desc: ribonuclease T2 family, [Neosartorya fischeri NRRL 181] gi|119411498|gb|EAW21441.1| ribonuclease T2 family, [Neosartorya fischeri NRRL 181]
  misc_feature (11)..(382): NCBI GI: 169617858 Blast Desc: SNOG_12109 [Phaeosphaeria nodorum SN15] gi|160703501|gb|EAT80521.2| SNOG_12109 [Phaeosphaeria nodorum SN15]
  misc_feature (24)..(395): NCBI GI: 121705722 Blast Desc: ribonuclease T2 family, [Aspergillus clavatus NRRL 1] gi|119399270|gb|EAW09698.1| ribonuclease T2 family, [Aspergillus clavatus NRRL 1]
  misc_feature (30)..(395): NCBI GI: 159127512 Blast Desc: ribonuclease T2 family, [Aspergillus fumigatus A1163]
  misc_feature (30)..(395): SWISSPROT Homolog: EC 3.1.27.1 Ribonuclease T(2)
  misc_feature: Useful for introducing or modulating the production of volatile compounds
MRSRIPLVEAVLAASSVTAASLTCPNDLPLSCQNTTAITDTCCFNAPGGDLLLTQFWDTAPSTGPSDSWTVHGLWPDNCDGTYEQYCDQNRLYTNITAIMQEKAPCTLKTMQIYWKDYQGNDEDFWEHEFGKHGTCISTLNPECYADYQATDEVPDYFNRAVSLFKTLPTYTWLAKAGIVPSSTATYTLAAIQAALSSNHGHDVIIRCSNGELNELWYHYHVRGSVQTGEFVPVDPVGSPSNCPTTGIKYLPKYTTPTTTSTTTTTTSTPTSTSIPTGTAGALSGKAYVKVSPSGFMISGGKWYNTAGTPATYTATANADGETFTMKTSKGPCQILGDNSLSCAAGNTASNFGYDGTYIKYDGVNTFYTASTPSGTEQGTLYTTEQAVSAQLYWQPL

SEQ ID NO: 5008 - DNA, 3818 bp, Muscodor strobelii
  misc_feature: SGI EST ID NO. CUFF.12684.1
  misc_feature: Variant of the nucleotide sequence at SEQ ID NO 5006
aaagcttccaacgttcgcgctgtcgttcacgatgatggaaaaaggtgacaagcgtgtcctggccgtgatagacgaaaagtaggtccaacctcctgtcaaggtactcagtggtccaaaatgcggtcgagaatccctctcgtagaagccgtcttggcagcaagctccgtcacggcagcatcgctgacctgccctaacgaccttccattgagctgtcaaaacaccactgctattaccgacacctgttgcttcaatgcgccgggtggtgatcttctgctcactcaattctgggataccgctccgtcaacgggtccatcggactcatggactgtacacggtctctggccggacaattgtgatggcacgtacgaacagtattgtgatcagaacagactgtacacaaatatcacagccattatgcaggagaaagcaccgtgcacgctgaagactatgcaaatctactggaaagactaccagggtaatgacgaagatttctgggagcatgaattcggcaaacacggcacctgtattagtacgctgaatccagagtgctatgccgattaccaggccacggacgaagtgcccgattacttcaaccgtgctgtgagcttgttcaaaacgctgcctacctacacatggctcgcaaaggcgggtatcgtgccttcgagcacggctacttacactcttgctgcaatccaagccgctctctcctcgaaccacggtcacgatgtcatcatacggtgctctaatggagaattgaatgagctgtggtatcactatcacgttcgtggttcagtacagacgggtgaattcgtccctgttgaccccgtgggttcgccctcgaactgccctacgactggcatcaagtacttgcccaagtacactactcctactacgacttcaactactacgactacgaccagcacgcccacgtctacttcaatccccacgggcactgccggtgcactatcaggtaaggcatacgtcaaggtctcacccagcggcttcatgatctctggtgggaaatggtataatacggccggaacaccagcgacctacacagcgaccgcgaacgcagatggtgagaccttcacgatgaagacaagcaagggaccatgccagatcttgggcgataactcgctcagctgtgccgctggaaacacggctagcaactttggttacgacggtacttatatcaagtatgatggtgttaataccttctacactgcttcaacaccctcaggcacggagcagggtactttgtatacgactgagcaagctgtttctgcacagctttattggcagcctctgtagagtattgggtagcaatgaaaacattgtcagatatatggattgtataggagaataaacttggtcagagctcgaaaacaagcgacatgacttgaaatctgcagagtggcagagcggggtaagtcgcttacacgtatcttgattggtttcgttccatactctgcggctgagtcctagatcgtgttgacgtgttcgtctttccagattgacaaccccatacttgatctcaactcccacttcgcacaactgttctgcccagctagatgaggaagaggcgcatactgtatctctccgcagacaacgagagagctatcgacattgaaccctcgctttagagtactttcaacgcacaacttgaaattgcaggaaacagatctccaaatgcactaagtgtcggcgtcgttcatctcacaattgggccaagccgcccgattgtcctgccccatcccggactgtggcgagccaatctagagcatcgacaacagaatttgcgatcatttaccatcgcaagatccgcaatatattatgggtaatcttgacaacataatccggaattttgagagaggacaagctcctcagggtctttctcagaagcagagttctcagcacttctcacgtactgaccgtctcagtcctcgggcgagatctgactccccagtcaagcgctcccgacctagatcttcagaatataccactgctgatgtttctgattttctaaaatgggggcttcgccgaggcaagctgtggaaccctgagcaggacacgcgcagcccccgcacaatatcctcactaccctccatacgctctgtcgaagatcgtgaggagcatcaagacgaacttagattgatcaggcagccagagactcggcctattcgcagagagcatcttattactgaaataaaggatgtatatgccggtcttatcgtcatcgaatcgaagtgtatcagggtggttaagatgcaatcgtcaaattcggacacgaaactaaataacacacaatggcagccattgatagcttcgaaccgaactctattgcatgaacatcaagacgttttgttagcacctctacaaccacacttggatagaatgtcatggggatctaggccgctctggaacgataacagaagacgaggtcatacgagaccacaaggtctggacctcatttagtagccactggtatagttgtgcctcagatcaaaccccaacaacagatcgattctaccaccaccttgcaatttcggcacgttcgcaagtaatacaacaactattctattacacgaaggcattatgcaatctacatataacagcatttctagaaacactaggggcgagctcacagcacatatggtcttggaacagcaggatctccggcagctcgacgggactcttgctcagacagttcaacccaatttcgcgagttcccactctactatgtcttctgtggctcccttctattgctactgcagcagttgtccaggacagcgcaagtctcattctacccccggaccaaactagtcccccggataatgggaaatgggacagtcatctttcttggctgttattccctggaattgtcacaactctacttgtcggcgagtttgctgccgcccatatattaggcgatcctctcgtgttacacggtgcatccatgggattatctgcaggagcattcctattgctggcgctcaaccagcacgatgtttcactccaagcgcagctcagcgcatggggcatttgtgcgatttcaacgattgcctggttatactatgacacgttgcctctgcgctctgtaccagacatgaggcgattagctatattttttgtgatcgtctgcggcttcattctcgatagtgcgatcagtaattccttgtcatcatccgccagcggctcactattttcgagagacgactcaccatcaactgcttccctgttcgccacatttttgttgccaagtatggccctatcagcttttcttcgcagcggtcttcacggtgcctatcatcaattcaggcaacattggggcctgtacgaatcacgtacagtcgcgattccgggatccgaatgaccgctgacgcttgtatgtgttgctatgctatatacttgtagagagagactgggaacatctacgtctgtttgcaatggttattttgacaaatttatttgacacatctggataacataaggtgatgaacacttgaaacattagatgatcagccgagcgacaccttaggccgttagggatgattctcaaccgagataggatctgtatggttccagcaataccatggtcgcgaatgagaccatatggtgacagcacaagcattcatgttgaaaaagccgttcaaagaacattgtgtagtgtcgtgtaagcgaggaggcaccaggaagatttcctgtcatattcaagttgggattgtgttacactcttgcaccataatcattttactcgggtttcgcattttatgctaagatagctatctcaaaatgaccagtcgaaattaacggatgaa

SEQ ID NO: 5009 - DNA, 1503 bp, Muscodor strobelii
  misc_feature: SGI cDNA ID NO. 561376
  misc_feature: Encodes the peptide sequence at SEQ ID NO 5010
atggaagaatctaatactaacttccctttgcattttgtcaaggaaccgccaagacttctgagtaacttagccaccacgagggcaattattaccgcccctctcgacggcacgctttccttttggacagcccctctcgaacatcagttttttgtcacagcttgcggactcccaatcgctgcgacattgggcgaggcatcagcttgggctaccatcggtggcagcgtactgatcgacggcacagtatttggtatgactgctggccacttggtaacacgcctcctaccttcccgcgatgaagggtctaatagagacgcttgttctcctgcacgctcgtcgctagatgattactttttgtcagaatcagacacttccgagtcacaaacaagtagtccggggataacagcccctcgactatttgaccttgccagcgcccagaagattgactctagggacttatccgagtgggaataccgcgaagacattgtcaatctagattatgctcttgtgcccctgccccccgatctacgtttaccaaatcggctagataagtcgaagatcacttttggcaaagagaaagtctccaacggccttttagacattgttgaaaatgatgccgaagcccgattcgaaagaagaaatgtcgtcgtgatgacagcaaacggttacaagccggctatcctgaaaatgctaagttcctcacttttggtcagcccgagcacaaaatttgtcaagactttggccttgtctcttatacaggattttgccctcgaaactggtgactcgggatcatgggttgtggacatgagtcagagccggatctacgggcatctcgttggcgctttagcagatggagacggcatagttatcccaatcaatgctagtcttgagaacatgaaagaacgcataaaggcgaccacggtcagactcccaagagctgatgatattcgtaatctgtctactcgtataacagccgagcctccagtaattcgaatccctcggtcagccgcaaatacagcaagtcgcgatggcacatcaagcatcagcacatgggctacctccataagttcccaatcaaggaacaatgagactgtgaagccggcagcgctctcacctctcttggaagcccctgtgagtgacacaccgtctaacaaacagggccaagatagcgggttgttttccagcacagccactgaagtaaagttgccctccatcgatatcgtcgacccaacgaataccaatgaggagataatgcccgcttccaagggcactaatctcttcgagatgacggattctcataaatatgtggaatccatgaactccatggatatggagtgtgacggtcaaacgtatcgcgtcagctccgaggacaagagccttgcggcagatcgaatccacgactttttgtgggacccaaaatatcatagtccttatgccatcaccttgttggcaagggtcgcacacacctcgcaagatactgctcggtcactctcatggctcggttag

SEQ ID NO: 5010 - protein, 500 aa, Muscodor strobelii
  misc_feature: SGI Peptide ID NO. 561376
  misc_feature (6)..(315): NCBI GI: 119474241 Blast Desc: NFIA_004570 [Neosartorya fischeri NRRL 181] gi|119407149|gb|EAW17099.1| NFIA_004570 [Neosartorya fischeri NRRL 181]
  misc_feature (52)..(307): NCBI GI: 154313213 Blast Desc: [Botryotinia fuckeliana B05.10] gi|150849693|gb|EDN24886.1| [Botryotinia fuckeliana B05.10]
  misc_feature (214)..(302): NCBI GI: 171682606 Blast Desc: protein product [Podospora anserina] gi|170941262|emb|CAP66912.1| protein product [Podospora anserina]
  misc_feature (218)..(324): NCBI GI: 116208410 Blast Desc: [Chaetomium globosum CBS 148.51] gi|88184095|gb|EAQ91563.1| [Chaetomium globosum CBS 148.51]
  misc_feature (52)..(327): NCBI GI: 46109594 Blast Desc: FG01679.1 [Gibberella zeae PH-1]
  misc_feature (42)..(365): NCBI GI: 46109536 Blast Desc: FG01650.1 [Gibberella zeae PH-1]
  misc_feature (165)..(298): NCBI GI: 256730405 Blast Desc: NECHADRAFT_82867 [Nectria haematococca mpVI 77-13-4]
MEESNTNFPLHFVKEPPRLLSNLATTRAIITAPLDGTLSFWTAPLEHQFFVTACGLPIAATLGEASAWATIGGSVLIDGTVFGMTAGHLVTRLLPSRDEGSNRDACSPARSSLDDYFLSESDTSESQTSSPGITAPRLFDLASAQKIDSRDLSEWEYREDIVNLDYALVPLPPDLRLPNRLDKSKITFGKEKVSNGLLDIVENDAEARFERRNVVVMTANGYKPAILKMLSSSLLVSPSTKFVKTLALSLIQDFALETGDSGSWVVDMSQSRIYGHLVGALADGDGIVIPINASLENMKERIKATTVRLPRADDIRNLSTRITAEPPVIRIPRSAANTASRDGTSSISTWATSISSQSRNNETVKPAALSPLLEAPVSDTPSNKQGQDSGLFSSTATEVKLPSIDIVDPTNTNEEIMPASKGTNLFEMTDSHKYVESMNSMDMECDGQTYRVSSEDKSLAADRIHDFLWDPKYHSPYAITLLARVAHTSQDTARSLSWLG

SEQ ID NO: 5011 - DNA, 2233 bp, Muscodor strobelii
  misc_feature: SGI EST ID NO. CUFF.12624.0
  misc_feature: Variant of the nucleotide sequence at SEQ ID NO 5009
agctcatcaactggtcttctcgctattagcaaccgacaaaaaactagttcagctgcaacatcagctcaacctacgcattcttctagcacaaatagctctcagattttcccaaaggtactagcgaagatcaagaccaatggcgtcgagaagtttcatcagcgaccacctcttgtggtattcaaggaattgccaatatccaatgatgcgcgtgagagatttgaaaatttacaatttcacttcaacgaggagctcacagagtacataaaactgaaatcattccagtatgatgtcatgtgggatttctatatagtaggagaatcagagcaggatgccgaaccaacgagcgttttctatagcgataagaagctggcaaaaaagatcgacagctttttcagacaaagtcatatccagcgaaccatggaagaatctaatactaacttccctttgcattttgtcaaggaaccgccaagacttctgagtaacttagccaccacgagggcaattattaccgcccctctcgacggcacgctttccttttggacagcccctctcgaacatcagttttttgtcacagcttgcggactcccaatcgctgcgacattgggcgaggcatcagcttgggctaccatcggtggcagcgtactgatcgacggcacagtatttggtatgactgctggccacttggtaacacgcctcctaccttcccgcgatgaagggtctaatagagacgcttgttctcctgcacgctcgtcgctagatgattactttttgtcagaatcagacacttccgagtcacaaacaagtagtccggggataacagcccctcgactatttgaccttgccagcgcccagaagattgactctagggacttatccgagtgggaataccgcgaagacattgtcaatctagattatgctcttgtgcccctgccccccgatctacgtttaccaaatcggctagataagtcgaagatcacttttggcaaagagaaagtctccaacggccttttagacattgttgaaaatgatgccgaagcccgattcgaaagaagaaatgtcgtcgtgatgacagcaaacggttacaagccggctatcctgaaaatgctaagttcctcacttttggtcagcccgagcacaaaatttgtcaagactttggccttgtctcttatacaggattttgccctcgaaactggtgactcgggatcatgggttgtggacatgagtcagagccggatctacgggcatctcgttggcgctttagcagatggagacggcatagttatcccaatcaatgctagtcttgagaacatgaaagaacgcataaaggcgaccacggtcagactcccaagagctgatgatattcgtaatctgtctactcgtataacagccgagcctccagtaattcgaatccctcggtcagccgcaaatacagcaagtcgcgatggcacatcaagcatcagcacatgggctacctccataagttcccaatcaaggaacaatgagactgtgaagccggcagcgctctcacctctcttggaagcccctgtgagtgacacaccgtctaacaaacagggccaagatagcgggttgttttccagcacagccactgaagtaaagttgccctccatcgatatcgtcgacccaacgaataccaatgaggagataatgcccgcttccaagggcactaatctcttcgagatgacggattctcataaatatgtggaatccatgaactccatggatatggagtgtgacggtcaaacgtatcgcgtcagctccgaggacaagagccttgcggcagatcgaatccacgactttttgtgggacccaaaatatcatagtccttatgccatcaccttgttggcaagggtcgcacacacctcgcaagatactgctcggtcactctcatggctcgatgctgagttattggactctactagtacctcacagtaaccgtggatttagcacctcaacgaggagaaataatgtatagactctcttcctagtcctgtcttcacgatatttaattttgagacttatagaggagcttgcctatgggagttctcgaccacatgctacataagtcaaggtatattccttccgacagctctcactgttggaatccccggcttgggacgcccacaaaaccagatttccagggctttgaattgtctgaatatgaggaagattacaataactagacgaaacacttcaataaacgaagtgtcgagtc

SEQ ID NO: 5012 - DNA, 252 bp, Muscodor strobelii
  misc_feature: SGI cDNA ID NO. 561377
  misc_feature: Encodes the peptide sequence at SEQ ID NO 5013
atgatcgcgagagatcccgcactgaacggatacgatatcctatatgtgtcagactttatcatcaatcccgagttcttagggcaaccatatctgttggagatgatgggatacgcatacatactggctgagcgtcttaatgcgacaattgcggctgaagacaaggttgcgaaacacatccatacgctcacaaagctcgccacctcggcagatgatgtgaaagcgtctagagggttattaagttttgatgaatag

SEQ ID NO: 5013 - protein, 83 aa, Muscodor strobelii
  misc_feature: SGI Peptide ID NO. 561377
MIARDPALNGYDILYVSDFIINPEFLGQPYLLEMMGYAYILAERLNATIAAEDKVAKHIHTLTKLATSADDVKASRGLLSFDE

SEQ ID NO: 5014 - DNA, 1950 bp, Muscodor strobelii
  misc_feature: SGI cDNA ID NO. 561378
  misc_feature: Reduced expression when VOC is produced
  misc_feature: Encodes the peptide sequence at SEQ ID NO 5015
atgtccgtggtggcggatcaagttcgacgtctggacgcacaactggatcgcataccattcactcacctacatgctgccgcagagctgaacacatctcgcgtcaaggatttgcttagaattatcaaggcgttatcagcatcggcaacaaccgggagccagccccaaaattggcaaatccagtctctcatcaaccagtctcaactgttatcagaaagatcagaagccggttcacaagtaactcagtatgaatctgaacttgagtggctgctcgtcagcaaggccaccgtacagacgtatggggttattatcgatactttgctcgatcaaatcatccctttgagtgaccacatttggtactgggatgatgtgctctcttcaccaacttccagcagtctttacctgcttcaaacttcccctgtgaggttctgggcatggtctaccgaagtttatgaggatagcaaagcccgactgcagcgatatacgagcggattgaccgtaaccgacgaatcagaacgaccgtccgcgacgttttcgcagcgatggaggagattttacggcattgtccaggagagtatactggaaaggtctctggctaacgttcagcggcggatcatgtcgcccattgccctcgcacgtgccgaggcacgccagaaacaggccaatttgaagaagctccgagatatgacgtccagtggccttggtgtacttattgacgaaggactcgtcttcggtggcaatgggagtgatgatggaaaaagtgatatcatcatgtctaataaccaagaatggaaaggagtcgttgagcgaagcgtggcactcatggacatggtcctcaaggacgtcctcgtcctggatgttggcgttcccgatttcgaagatagagtctttgcgggcgttgatgaagacccggaactgtcgatacaagtcgaagaagacgacatgaatcggccgattgtcgttgctagacgactgcaatttctcctcgactctcagctacccgagcatgtcaggaacactcgagacgtggttgccaaaaacggacgaccttcacgactgatcaggtattggcttccgacggttggattgctcctttcttcgaccacgcttcttaggatattcgtgaacaggaagcaggaaattctcaattggatacaagacttcggcgcaacggttcgcgacttttggttcaactgggtcgtagaacctgtaaggaaggtcgtcgggacgatacgccatgattcgagcagcgaaatcgcgatcatgagtcgagatagtctcaaagcggaccgcgatagtctggaacgaatggtagttgactttgcgctggacaaacctagtgccgcaatgggcgcgtcatctcttagtaatacccaagtcgctgatattcgcactaaggtgcgagaaggggatgtaacgcccgttcttcgagcttacgagaaagatctcagaagccccttcatcggcgcgatacggggagacctagttcggactttgctcattcagatccagaagaccaaggtcgatgttgaagtggccatggcaggcatcgacgcgcttctgaaaagccaggagctcgtctttggtttcgtcggtctcacaccgggcgtcctggtctccgttggtgcatttcgataccttcgtggcgcactcagcggtcgccggaagtatggaaggaaagctgggagatgtgtgcgtgtgctgcgaaatatcgaccgcatcttctctgaagccacgccatcggctaataacttgctattgtacaaagaccatggcttcctcctctgtgaggtccatgtgctacgacgtcttgcccacaaactacttccatcagacatcgaaagagatttcctcgaagatgtcgatgacttggccaacttgaaaggtatacagtcacagcagcgtgccctggaccgcatccgctgggcatacggaaagtggttggtgtattga

SEQ ID NO: 5015 - protein, 649 aa, Muscodor strobelii
  misc_feature: SGI Peptide ID NO. 561378
  misc_feature (359)..(643): Pfam Id: PF08637 Pfam Desc: ATP synthase regulation protein NCA2
  misc_feature (1)..(647): NCBI GI: 39975879 Blast Desc: MGG_06134 [Magnaporthe grisea 70-15] gi|145011566|gb|EDJ96222.1| MGG_06134 [Magnaporthe grisea 70-15]
  misc_feature (7)..(647): NCBI GI: 46136627 Blast Desc: FG09829.1 [Gibberella zeae PH-1]
  misc_feature (1)..(647): NCBI GI: 116196290 Blast Desc: CHGG_04743 [Chaetomium globosum CBS 148.51] gi|88180656|gb|EAQ88124.1| CHGG_04743 [Chaetomium globosum CBS 148.51]
  misc_feature (1)..(647): NCBI GI: 156035713 Blast Desc: SS1G_13060 [Sclerotinia sclerotiorum 1980] gi|154698465|gb|EDN98203.1| SS1G_13060 [Sclerotinia sclerotiorum 1980]
  misc_feature (11)..(647): NCBI GI: 261356643 Blast Desc: nuclear control of ATPase protein [Verticillium albo-atrum VaMs.102]
  misc_feature (1)..(647): NCBI GI: 256727568 Blast Desc: NECHADRAFT_103464 [Nectria haematococca mpVI 77-13-4]
  misc_feature (1)..(647): NCBI GI: 171690356 Blast Desc: protein product [Podospora anserina] gi|170945126|emb|CAP71237.1| protein product [Podospora anserina]
  misc_feature (20)..(647): NCBI GI: 164425104 Blast Desc: NCU06403 [Neurospora crassa OR74A] gi|157070791|gb|EAA33005.2| conserved [Neurospora crassa OR74A]
  misc_feature (1)..(647): NCBI GI: 189204308 Blast Desc: PTRG_08157 [Pyrenophora tritici-repentis Pt-1C-BFP] gi|187985588|gb|EDU51076.1| PTRG_08157 [Pyrenophora tritici-repentis Pt-1C-BFP]
  misc_feature (1)..(640): NCBI GI: 169599378 Blast Desc: SNOG_02508 [Phaeosphaeria nodorum SN15] gi|160704592|gb|EAT90720.2| SNOG_02508 [Phaeosphaeria nodorum SN15]
  misc_feature: Useful for introducing or modulating the production of volatile compounds
MSVVADQVRRLDAQLDRIPFTHLHAAAELNTSRVKDLLRIIKALSASATTGSQPQNWQIQSLINQSQLLSERSEAGSQVTQYESELEWLLVSKATVQTYGVIIDTLLDQIIPLSDHIWYWDDVLSSPTSSSLYLLQTSPVRFWAWSTEVYEDSKARLQRYTSGLTVTDESERPSATFSQRWRRFYGIVQESILERSLANVQRRIMSPIALARAEARQKQANLKKLRDMTSSGLGVLIDEGLVFGGNGSDDGKSDIIMSNNQEWKGVVERSVALMDMVLKDVLVLDVGVPDFEDRVFAGVDEDPELSIQVEEDDMNRPIVVARRLQFLLDSQLPEHVRNTRDVVAKNGRPSRLIRYWLPTVGLLLSSTTLLRIFVNRKQEILNWIQDFGATVRDFWFNWVVEPVRKVVGTIRHDSSSEIAIMSRDSLKADRDSLERMVVDFALDKPSAAMGASSLSNTQVADIRTKVREGDVTPVLRAYEKDLRSPFIGAIRGDLVRTLLIQIQKTKVDVEVAMAGIDALLKSQELVFGFVGLTPGVLVSVGAFRYLRGALSGRRKYGRKAGRCVRVLRNIDRIFSEATPSANNLLLYKDHGFLLCEVHVLRRLAHKLLPSDIERDFLEDVDDLANLKGIQSQQRALDRIRWAYGKWLVY

SEQ ID NO: 5016 - DNA, 918 bp, Muscodor strobelii
  misc_feature: SGI cDNA ID NO. 561379
  misc_feature: Reduced expression when VOC is produced
  misc_feature: Encodes the peptide sequence at SEQ ID NO 5017
atggccaccttaaactctaccctcatcggcgccttcagccagcccgacaccttttccagcgtcttcgaggaggtcagcaaatacaatgtccagctcaacgtcgtcgagcggctctgggcgacgtggtacctgtggatgcagaacgacaccctcgccaccggcatcctgagcttcgtcatccacgagactgtctacttcggcaggtgtctgccctggatgctgatcgaccgcatgcccttcctgaacaagtacaagatccagaaccagaagatcccaaccctcaaggagcaatgggagtgcgccagcttagtcctcctcagccacttcaccgtcgaactcccccagatctggctcttccaccccgtcgccatgtacttcggcatggactacggtgctcccttcccctcgctcggcaagatggccttccagatcgccgtcttcttcattatggaggatacctggcactactggtttcaccgcgccctgcactacggccctctctacaagaacatccacaagcttcaccacacctactctgctcccttcggcttggctgctgagtacgcttctccgatcgaggttatgctgttggctattggaaccgtcggatcgcctattctatgggtttacttgactggggacctgcatctgttcactatgtacgtgtggattgtctgccgtctcttccaggctatcgatgcccacagtggctacgacttcccctggagcttgcgacacatcctacccttctgggctggcgccgaccaccacgatacccaccatgagcgattcatcggcaattattcttccagcttccgctggtgggactacgtgatggacaccgagtctggccccgaggctgccaagcgtcgccgcgagaggaagatagctgctaccaaggccaagaaggctcagtag

SEQ ID NO: 5017 - protein, 305 aa, Muscodor strobelii
  misc_feature: SGI Peptide ID NO. 561379
  misc_feature (144)..(262): Pfam Id: PF04116 Pfam Desc: Fatty acid hydroxylase superfamily
  misc_feature (2)..(305): NCBI GI: 107785178 Blast Desc: C-4 sterol methyl oxidase [Chaetomium globosum] gi|107785180|gb|ABF84061.1| C-4 sterol methyl oxidase [Chaetomium globosum]
  misc_feature (2)..(305): NCBI GI: 171690354 Blast Desc: protein product [Podospora anserina] gi|170945125|emb|CAP71236.1| protein product [Podospora anserina]
  misc_feature (1)..(305): NCBI GI: 261356642 Blast Desc: C-4 methylsterol oxidase [Verticillium albo-atrum VaMs.102]
  misc_feature (1)..(305): NCBI GI: 256726994 Blast Desc: [Nectria haematococca mpVI 77-13-4]
  misc_feature (1)..(305): NCBI GI: 46136629 Blast Desc: FG09830.1 [Gibberella zeae PH-1]
  misc_feature (1)..(305): NCBI GI: 154294069 Blast Desc: BC1G_14068 [Botryotinia fuckeliana B05.10] gi|150845113|gb|EDN20306.1| BC1G_14068 [Botryotinia fuckeliana B05.10]
  misc_feature (1)..(305): NCBI GI: 156035759 Blast Desc: SS1G_13083 [Sclerotinia sclerotiorum 1980] gi|154698488|gb|EDN98226.1| SS1G_13083 [Sclerotinia sclerotiorum 1980]
  misc_feature (2)..(293): NCBI GI: 85106720 Blast Desc: C-4 methylsterol oxidase, variant [Neurospora crassa OR74A] gi|28923840|gb|EAA33004.1| C-4 methylsterol oxidase, variant [Neurospora crassa OR74A]
  misc_feature (3)..(305): NCBI GI: 169784105 Blast Desc: [Aspergillus oryzae RIB40] gi|83775259|dbj|BAE65381.1| protein product [Aspergillus oryzae]
  misc_feature (11)..(293): NCBI GI: 39975881 Blast Desc: MGG_06133 [Magnaporthe grisea 70-15] gi|145011567|gb|EDJ96223.1| MGG_06133 [Magnaporthe grisea 70-15]
  misc_feature (10)..(286): SWISSPROT Homolog: EC 1.14.13.72 Methylsterol monooxygenase
  misc_feature: Useful for introducing or modulating the production of volatile compounds
MATLNSTLIGAFSQPDTFSSVFEEVSKYNVQLNVVERLWATWYLWMQNDTLATGILSFVIHETVYFGRCLPWMLIDRMPFLNKYKIQNQKIPTLKEQWECASLVLLSHFTVELPQIWLFHPVAMYFGMDYGAPFPSLGKMAFQIAVFFIMEDTWHYWFHRALHYGPLYKNIHKLHHTYSAPFGLAAEYASPIEVMLLAIGTVGSPILWVYLTGDLHLFTMYVWIVCRLFQAIDAHSGYDFPWSLRHILPFWAGADHHDTHHERFIGNYSSSFRWWDYVMDTESGPEAAKRRRERKIAATKAKKAQ

SEQ ID NO: 5018 - DNA, 1575 bp, Muscodor strobelii
  misc_feature: SGI EST ID NO. CUFF.12669.0
  misc_feature: Variant of the nucleotide sequence at SEQ ID NO 5016
caaatttccagtggcctcatctctgcccatcttcgcctccgcccttcgcgattggcccacagtcccatcttcgctgcctcttttagcggtccgcccctgcagatccatgctaccgctaatcgttccacaattcttatcgccatcgtgccgtgcatctgccgtttcctttcttttggtgaagccaatctagtatcctacaaaacattcattaaatcctccattccttatccccctcttttcgctgtgtcacaccctctcagctagaggacagcaacagaactctatttcttttccactttgccattcaattggacgagtagagtgtgcacacgttcagccctctctctcgccatggccaccttaaactctaccctcatcggcgccttcagccagcccgacaccttttccagcgtcttcgaggaggtcagcaaatacaatgtccagctcaacgtcgtcgagcggctctgggcgacgtggtacctgtggatgcagaacgacaccctcgccaccggcatcctgagcttcgtcatccacgagactgtctacttcggcaggtgtctgccctggatgctgatcgaccgcatgcccttcctgaacaagtacaagatccagaaccagaagatcccaaccctcaaggagcaatgggagtgcgccagcttagtcctcctcagccacttcaccgtcgaactcccccagatctggctcttccaccccgtcgccatgtacttcggcatggactacggtgctcccttcccctcgctcggcaagatggccttccagatcgccgtcttcttcattatggaggatacctggcactactggtttcaccgcgccctgcactacggccctctctacaagaacatccacaagcttcaccacacctactctgctcccttcggcttggctgctgagtacgcttctccgatcgaggttatgctgttggctattggaaccgtcggatcgcctattctatgggtttacttgactggggacctgcatctgttcactatgtacgtgtggattgtctgccgtctcttccaggctatcgatgcccacagtggctacgacttcccctggagcttgcgacacatcctacccttctgggctggcgccgaccaccacgatacccaccatgagcgattcatcggcaattattcttccagcttccgctggtgggactacgtgatggacaccgagtctggccccgaggctgccaagcgtcgccgcgagaggaagatagctgctaccaaggccaagaaggctcagtagacgaagcactccgctatcaatttctggttcagacgatgaatagaccaatcgatactttacattgcataagaataaatggcgttgaggtgctagacttccgggccgcggtggcgggttccaaaatcatagtcttgtctggtttggcatgatctcattcaaggatcgatcgctcactgtatattttaagggctgaccagacaatacctgttcataataacgataagatgataaaaatcaatatagactaatattcaaagatttaagttgataaaccgtatttgaagctgaatcccatcagtgaccgtt

SEQ ID NO: 5019 - DNA, 516 bp, Muscodor strobelii
  misc_feature: SGI cDNA ID NO. 561380
  misc_feature: Encodes the peptide sequence at SEQ ID NO 5020
atgacgcttgttgcagtggaatgcaagttgactgggcatcatccaacatgggcaaacacatacaacgaggtcgacatctactggactacacacgatagtcccaagggccttacgcagatggacattcaacacgcagaattctgcgaaacccaattccaacacatcacacacctcttaaagattgctgaaagactgaaggctgttcgcaagttcaacagcctccataagactggcctcaggacaaaaggaaaccaaatcaagacggcaacggcggaagaagcacaatcgacagagaaagttgacgagacaaaagttgtatcatcaagcaccgagttgtcagccgatgacgcccaacctgtcgaggtgcaatccacaaagacaattgataagactcaggttgatgatacgagcactgagaccacaatagctgaagaaatccaacccgacgaggcagaatctgaagagccgaaacctgaggaaaagaagccgccaaatagcaattccttcctttactag

SEQ ID NO: 5020 - protein, 171 aa, Muscodor strobelii
  misc_feature: SGI Peptide ID NO. 561380
  misc_feature (1)..(53): Pfam Id: PF01329 Pfam Desc: Pterin 4 alpha carbinolamine dehydratase
  misc_feature (1)..(49): NCBI GI: 189204628 Blast Desc: transcriptional coactivator/pterin dehydratase [Pyrenophora tritici-repentis Pt-1C-BFP] gi|187985748|gb|EDU51236.1| transcriptional coactivator/pterin
  misc_feature (1)..(61): NCBI GI: 169609891 Blast Desc: SNOG_08037 [Phaeosphaeria nodorum SN15] gi|160701936|gb|EAT84313.2| SNOG_08037 [Phaeosphaeria nodorum SN15]
  misc_feature (1)..(51): NCBI GI: 154293400 Blast Desc: [Botryotinia fuckeliana B05.10] gi|150845307|gb|EDN20500.1| [Botryotinia fuckeliana B05.10]
  misc_feature (1)..(51): NCBI GI: 119179542 Blast Desc: CIMG_08509 [Coccidioides immitis RS]
  misc_feature (1)..(49): NCBI GI: 116196294 Blast Desc: CHGG_04745 [Chaetomium globosum CBS 148.51] gi|88180658|gb|EAQ88126.1| CHGG_04745 [Chaetomium globosum CBS 148.51]
  misc_feature (4)..(51): NCBI GI: 240110140 Blast Desc: pterin-4-alpha-carbinolamine dehydratase family protein [Coccidioides posadasii C735 delta SOWgp]
  misc_feature (1)..(45): NCBI GI: 71755723 Blast Desc: pterin-4-alpha-carbinolamine dehydratase [Trypanosoma brucei TREU927] gi|70834162|gb|EAN79664.1| pterin-4-alpha-carbinolamine dehydratase, [Trypanosoma brucei]
  misc_feature (1)..(58): NCBI GI: 46136631 Blast Desc: FG09831.1 [Gibberella zeae PH-1]
  misc_feature (1)..(50): NCBI GI: 169770543 Blast Desc: [Aspergillus oryzae RIB40] gi|238487036|ref|XP_002374756.1| pterin-4-alpha-carbinolamine dehydratase, [Aspergillus flavus NRRL3357] protein product flavus
  misc_feature (1)..(50): NCBI GI: 19115522 Blast Desc: 4-alpha-hydroxytetrahydrobiopterin dehydratase () [Schizosaccharomyces pombe] gi|18202038|sp|O42658.1|PHS_SCHPO RecName: Full=Pterin-4-alpha-carbinolamine dehydratase; AltName:
MTLVAVECKLTGHHPTWANTYNEVDIYWTTHDSPKGLTQMDIQHAEFCETQFQHITHLLKIAERLKAVRKFNSLHKTGLRTKGNQIKTATAEEAQSTEKVDETKVVSSSTELSADDAQPVEVQSTKTIDKTQVDDTSTETTIAEEIQPDEAESEEPKPEEKKPPNSNSFLY

SEQ ID NO: 5021 - DNA, 1040 bp, Muscodor strobelii
  misc_feature: SGI EST ID NO. CUFF.12639.0
  misc_feature: Variant of the nucleotide sequence at SEQ ID NO 5019
attaatcggcactcgacaacaatcgaatgctcacgcaccatcgatgctggatatgtccgtcaacaccctcaacatctgttcacaagggaagtgattctactttgagtcatcgcatctcgctttacataatgtctgtacgatacgtcgggagcaaactcggttctgaggtgttcaaatctaaagtgcagaacgttgcgaaacttgacttgagtcaagagttactacgacgcacgagaaagctcttgtcgaagaatgattggagcctagttgaaggtaatgggggacgctttggactacagaaaacattcccactcccaacatttcgaagcgcgtttgattttatgacgcttgttgcagtggaatgcaagttgactgggcatcatccaacatgggcaaacacatacaacgaggtcgacatctactggactacacacgatagtcccaagggccttacgcagatggacattcaacacgcagaattctgcgaaacccaattccaacacatcacacacctcttaaagattgctgaaagactgaaggctgttcgcaagttcaacagcctccataagactggcctcaggacaaaaggaaaccaaatcaagacggcaacggcggaagaagcacaatcgacagagaaagttgacgagacaaaagttgtatcatcaagcaccgagttgtcagccgatgacgcccaacctgtcgaggtgcaatccacaaagacaattgataagactcaggttgatgatacgagcactgagaccacaatagctgaagaaatccaacccgacgaggcagaatctgaagagccgaaacctgaggaaaagaagccgccaaatagcaattccttcctttactagtcctcaacctctagtctatggcttttctattcgtcaagaccaaatttagagtcccggaactgcctaattctggatcacattgctatcctccaagctacgataaggagttctctgtaccagtatctgtaattaatatacaatgtaatatgagaaatagatatcttaaacagattttgtcaacaa

SEQ ID NO: 5022 - DNA, 573 bp, Muscodor strobelii
  misc_feature: SGI cDNA ID NO. 561381
  misc_feature: Encodes the peptide sequence at SEQ ID NO 5023
atggccgcacaggctataatatctcacgatcatgaccatgatcatacccatgacgaggacacatctgatggtagaaaagccaaaagggaactgtcttcttccaaacgcgctgctcaaaacagagccgcacagcgcgcctttaggcaaagaaaagaacactatatcaagaagcttgagcagcaagttcgcgagtttggggagatggaacagggatataggaatctacaaaacgataatctgatgctcagagactacatcatcaaacttcagtctcgtcttcttgatatgcaggtcgaacttccaccacccccagccaatatcaatcttgcgctaccgccccctcccgctgctgcgacactgacgcataatggcgcaccaatggaaccatcacccagccaaacttctgctggtacactcgcagacgtcgctgctgcagttgctggatatcaggctaacggacctgttaatgaccgagctttcaaaagtgagaatggccctcaagcgcaccacaccaacgacgttcgacgacccatccaggatgtactgcctcctccttcatcgttgcaagtttag

SEQ ID NO: 5023 - protein, 190 aa, Muscodor strobelii
  misc_feature: SGI Peptide ID NO. 561381
  misc_feature (28)..(87): Pfam Id: PF00170 Pfam Desc: bZIP transcription factor
  misc_feature (18)..(158): NCBI GI: 256726995 Blast Desc: NECHADRAFT_76538 [Nectria haematococca mpVI 77-13-4]
  misc_feature (19)..(112): NCBI GI: 164425111 Blast Desc: NCU06399 [Neurospora crassa OR74A] gi|157070794|gb|EAA33001.2| NCU06399 [Neurospora crassa OR74A]
  misc_feature (20)..(114): NCBI GI: 242815138 Blast Desc: bZIP transcription factor, [Talaromyces stipitatus ATCC 10500] gi|218714850|gb|EED14273.1| bZIP transcription factor, [Talaromyces stipitatus ATCC 10500]
  misc_feature (20)..(114): NCBI GI: 212545256 Blast Desc: bZIP transcription factor, [Penicillium marneffei ATCC 18224] gi|210065751|gb|EEA19845.1| bZIP transcription factor, [Penicillium marneffei ATCC 18224]
  misc_feature (20)..(157): NCBI GI: 171688656 Blast Desc: protein product [Podospora anserina] gi|170944290|emb|CAP70400.1| protein product [Podospora anserina]
  misc_feature (15)..(109): NCBI GI: 46136633 Blast Desc: FG09832.1 [Gibberella zeae PH-1]
  misc_feature (18)..(112): NCBI GI: 169609889 Blast Desc: SNOG_08036 [Phaeosphaeria nodorum SN15] gi|160701935|gb|EAT84312.2| SNOG_08036 [Phaeosphaeria nodorum SN15]
  misc_feature (18)..(112): NCBI GI: 189204626 Blast Desc: conserved [Pyrenophora tritici-repentis Pt-1C-BFP] gi|187985747|gb|EDU51235.1| conserved [Pyrenophora tritici-repentis Pt-1C-BFP]
  misc_feature (20)..(110): NCBI GI: 156035723 Blast Desc: SS1G_13065 [Sclerotinia sclerotiorum 1980] gi|154698470|gb|EDN98208.1| SS1G_13065 [Sclerotinia sclerotiorum 1980]
  misc_feature (19)..(125): NCBI GI: 225555215 Blast Desc: transmembrane protein [Ajellomyces capsulatus G186AR]
MAAQAIISHDHDHDHTHDEDTSDGRKAKRELSSSKRAAQNRAAQRAFRQRKEHYIKKLEQQVREFGEMEQGYRNLQNDNLMLRDYIIKLQSRLLDMQVELPPPPANINLALPPPPAAATLTHNGAPMEPSPSQTSAGTLADVAAAVAGYQANGPVNDRAFKSENGPQAHHTNDVRRPIQDVLPPPSSLQV

SEQ ID NO: 5024 - DNA, 3611 bp, Muscodor strobelii
  misc_feature: SGI EST ID NO. CUFF.12836.1
  misc_feature: Variant of the nucleotide sequence at SEQ ID NO 5022
cgccactgcacaacgggtaattcgcgaggcctagcatagcagataacgtgcatcatggttgccttttcgccgttgtcgttcattcctttcgaaatgaatgcgatccggagaagcaacatctggactcccagcctgtccgcccgtccttgtcagcttccttgccgtatacttaaggtaggtacacacgatatcaggacggagtgaggcgctataaacaggcaggcgaggtaggttcgagaggaagtgatgaggtacaggagccaatgttaaagtcccggaccttactggactccggtgctgggctgggacccgtagagttcgctttgttccaccatcacgctttccgaacggcttccagtttttttttttgcacgcctgctgacaaacccttcccaactctattgtgccccccacttttcgctctcgcaagcacagttccgacaaatcagccacctcggcgtgccaactcaaaagtaccaacagggcagtctttacctagtgcacgtatagactgcgtagttgcacacctttaccatcactgaggtggccctgcactcgtctcgcctgtcctcactacgtagttgttcttctaccgccaacctctccctcatcaagtgttctcgtttcctctgttttgtccgtcctgtttcaacaaagtgagttgtaaacacgcgggctcacatctgacttattgcccaataccacatttattctccttactcatcctcacaaatccctgctctttctggtgtgtcgcgcacactagacgactaatagagaggaagcgcgaccacctccagcctattctgtctagattcgaggttgcatcccgctgccgcccattggcccgcccaactccctctggctgtcgtcagcaccttgacagagccccttggcgattgagctgcccaccagatctgccggccaactgctctcttgcaccggttaatgcagatttcatagatagcactctctgctagcattgcccggttctcacgaagacggcctggacacactctctgtacataccagacacttcttctttcagttccttgtcgatctcggtgtccactcagatcgaccaaataccaagggtctcagatttatggcatactcgtggaactgatctcactgacttgtttttaatactttgtttctgagccttcgccatcattattattccagaaactggagcaacaaagtcaccagcagcattcgtacgtctgatgcacacggttcaaacctggatctgagggcgctccgacagtacaacccgagtcacacccacatcgcatagtcacctcaccccagcccactgagtatctggccagcgcaatattagccggctgattgcacagctacctgctcactccagcgtactgtcggcgtttgtcaccttattcccgatcgaatcgcgtgtcaggttgttttcaatacggtaccacacggacctggcagacggaacttttcattttacctgatcaagccgtgctgcgtatttcgcgccgtatccaggcgatcttcgcagtaatcatagccgttcacccattgcatcagcggtccgtcgcctgaatgctgactcagagacctcaaaatgcagaacactactaactctaatggtatgtttgccatgctctctttctccgattagttatctccaatactctccatataactaccttctctcaagcccagacgctacccacaacccatgcctggacgctggttacaggcgcacccatctgctagtacataacgtattccttcgttttacacacccccttgtggcacggcacaggcacaggcacacccctcccctgctataccgtttgatccctttcggcggcttgctacgctactacaacgtaatatgtaatcatgttctcttcatgcagccttctggaaggtcgacgttaggtttgacggtcttggtttcgttcgcttttaattctccatttaactcttcgcccgactctctctaagtctcaatcctggtcctaagcctctagcacatgccgtcccccatctggctgaccgatttgaactcttgtttcattttcacactctgaacaacctgctcaacatactcggtacatgcactaacaaataccgtagctcctccgggtgaaatcagaacgaacagttctccgtctgttacagcagctaccagttcagtcccacagacacatggctatccagaccccggactgaattcacattctcatatccattcacaacttcgatcgccagccacccccgatctggcatcgactaccatgcaaaggggaatcacaacgagttcagaaggacacgaacccgtcactggatcacctaactccaacatggccgcacaggctataatatctcacgatcatgaccatgatcatacccatgacgaggacacatctgatggtagaaaagccaaaagggaactgtcttcttccaaacgcgctgctcaaaacagagccgcacagcgcgcctttaggcaaagaaaagaacactatatcaagaagcttgagcagcaagttcgcgagtttggggagatggaacagggatataggaatctacaaaacgataatctgatgctcagagactacatcatcaaacttcagtctcgtcttcttgatatgcaggtcgaacttccaccacccccagccaatatcaatcttgcgctaccgccccctcccgctgctgcgacactgacgcataatggcgcaccaatggaaccatcacccagccaaacttctgctggtacactcgcagacgtcgctgctgcagttgctggatatcaggctaacggacctgttaatgaccgagctttcaaaagtgagaatggccctcaagcgcaccacaccaacgacgttcgacgacccatccaggatgtactgcctcctccttcatcgttgcaagtttagggaaacgcaaacgaggaaaaggggcaagagagcgacggaagggaggaagaataacagcaacgcttgttaggtggccgagtttgcctctcggcgatccgaagcaactacgtcgtttccgagtttccttttcgacaaagaacgcgacaagcaagattattcaaaccaaagcaaaaatttcgagaagctgcacggaatacaaatttgttttactaaattctattttcgcgaaagaggcgttgtggagtaatatggaatgggctgaacctgcccgactggctgtttcaacattacaggcgttccgggtattctcagttgctttgattggcctcaagaagaatgtggcacaatggtctagaggaaatcatttacttctcctccccctcgacctcacgttttacttggctgtgtgccaacaggaagaaggagttaaagtgtacgactgtgagacagtctactggcgttaggagtatggttttcgccgagacggagcgagcgaggtccaggcgcaaacgtagactaaaacgacttgccggcttgctaccaatcagatatgtaacgcagtccattctgtgcgttggagcttcttcagccctgtctacttggacgagattttctcatgtgatctgtgccgtgacggagcgtgatctttgtcattcacgtgagcttaggtaaggtatagattctagaaaaactgtg

SEQ ID NO: 5025 - DNA, 2265 bp, Muscodor strobelii
  misc_feature: SGI cDNA ID NO. 561382
  misc_feature: Encodes the peptide sequence at SEQ ID NO 5026
atggcgccctcggcgattgacacttcgatgccacccttgcctgtgcgcgaagagaaaacatacccgccagcgcgcatcttcactgtcaaagagaccaagttcgagaagcccttcgaagcccagcccgatggccgcgagaaagcccttacaaaaccccagggcgaagctgccatagtcattgataatggttcctccgctgtccgcgccggctggtccttcgaggccgctcccagaatctccatccccccgatcatggccaagtatagagacaggaagctggggaagacatactcattcgctggctacgactgctacgccgatactaacgctaaaggccacatcagacacgccttcgaacccggtaccggcatcgttgccaattgggatgtcgaagagcatgtcttggactggacttttctcaagctgggcatgaacaacgccgacggttctattgatttccccatcgtcatgaccgaggccgtcgcgaacttgccctactcgcgcaaatcgatgaacgagatcatctttgaatgctacggcgcaccctctctcgccaccggcatcgactctctattctcttaccgatacaacaagggccagaccggcttggtcatctcctcctcctacagttcaactcacgtcatacccgtctacaacgccaagcccatgctggcccaggccattcgattgaattggggcggctggcatgccgcggaatacctcctcaaattaatccgactgaagtatccagcctttacaggaaagttaaatgcatcgcaggcagagaacatgctacacgatcactgctacgtatctaagtcgtacgacgatgagctacggtcctatctcgattggacgggtctagaggaccgtgatgtggtcatgcaatatccatttaccgaagagatcatcgtccaaaaaagcgaagaagagctggcccgaatcgcagagcgcaagaaggagagtggacggcggctacaggagcaggctgccaaaatgcgcctagagaagctcatacaaaaagagcaagagttggagtactacaagaagcttgcggagaagctagtggacgcgaacaaaaaggatacaaaacgtctcttggatgccgaggatatgaaagatgaggcagcgctcgagcgcacaattaaggagctcgagaaatccgtcaagcgccagcgcacaaaggatgtcggtggcgatccagaagaagaacaagaggagcccgatttcagtctcctcgaggttccagatgaccagctcgacgaagccggtctgaaggcaaagcgacatcagcgacttctgaaatcaaatcatgaagcccgagctcgtgcgaaagcagagaaggaggcagagaaggcgcgagttgccgaagaggaaagacttgatcgagagcgacgggagaatgatctggacaactggctagaggagaagcgcattgctcgcgccaacaccttacagaggatgaaagaacgtgaccgacttaaggccgatcttggaaaccgcaagtcattggcgtcacagatacggatgaagtccatagcaaatctcgcctccgacaatccgagaggcaagcgccgtcgcggcggagacgacgataacttcggcgccaacgacgatgattggggtgtttatcgccaaattgcagtcggcgaaggaagcgatgatgaagaaggcgaggaagatctcgaggggaaccttaagcagctcgaggaagacctacttcgatacgatgccggcttcacccacgagcatacgtgggaggcacagaatgactggaataagagcctgctgcacgccttcatgagaggaccacgccccttcgatgcaggctcgcaggcagagatacatcagatccatctaaacgttgagcgcatacgcgtccccgaggtcgttttccagccatccatcgcaggcgtcgagcagtcggggctcatcgatatcacgggggatatacttacgcagcgcctcagcgggttgccgggcgtaaaccgggatgatttccttcgagatatattcctcaccggaggtaatactctatacacaaacttcgaccaccgaatccgacaaggacttacaccactcctccctgccggatctcccctacatatccggaaggccagcgatgccttactggacgcctggagaggtgctgcacaatgggtcggcacgcctgcatggaagacggccaccatcactaaggctgagtaccaggagaagggtcaggactatctgaaagaacatgacatgggcaattcttacccatga

SEQ ID NO: 5026 - protein, 754 aa, Muscodor strobelii
  misc_feature: SGI Peptide ID NO. 561382
  misc_feature (52)..(749): Pfam Id: PF00022 Pfam Desc: Actin
  misc_feature (123)..(218): Pfam Id: PF00022 Pfam Desc: Actin
  misc_feature (623)..(743): Pfam Id: PF00022 Pfam Desc: Actin
  misc_feature (52)..(92): Pfam Id: PF00022 Pfam Desc: Actin
  misc_feature (22)..(745): NCBI GI: 239609205 Blast Desc: chromatin remodeling complex subunit [Ajellomyces dermatitidis ER-3]
  misc_feature (30)..(752): NCBI GI: 119180538 Blast Desc: CIMG_08893 [Coccidioides immitis RS]
  misc_feature (22)..(745): NCBI GI: 261189029 Blast Desc: chromatin remodeling complex subunit [Ajellomyces dermatitidis SLH14081] gi|239591931|gb|EEQ74512.1| chromatin remodeling complex subunit [Ajellomyces dermatitidis SLH14081]
  misc_feature (22)..(752): NCBI GI: 255933644 Blast Desc: Pc12g13950 [Penicillium chrysogenum Wisconsin 54-1255] gi|211582820|emb|CAP81022.1| Pc12g13950 [Penicillium chrysogenum Wisconsin 54-1255]
  misc_feature (22)..(745): NCBI GI: 67524059 Blast Desc: AN2487.2 [Aspergillus nidulans FGSC A4] gi|40744649|gb|EAA63805.1| AN2487.2 [Aspergillus nidulans FGSC A4]
  misc_feature (22)..(751): NCBI GI: 212545258 Blast Desc: chromatin remodeling complex subunit (Arp5), [Penicillium marneffei ATCC 18224] gi|210065752|gb|EEA19846.1| chromatin remodeling complex subunit (Arp5), [Penicillium ATCC
  misc_feature (1)..(751): NCBI GI: 119487431 Blast Desc: chromatin remodeling complex subunit (Arp5), [Neosartorya fischeri NRRL 181] gi|119410665|gb|EAW20611.1| chromatin remodeling complex subunit (Arp5), [Neosartorya NRRL
  misc_feature (22)..(745): NCBI GI: 115396696 Blast Desc: conserved [Aspergillus terreus NIH2624] gi|114193556|gb|EAU35256.1| conserved [Aspergillus terreus NIH2624]
  misc_feature (22)..(745): NCBI GI: 70981919 Blast Desc: chromatin remodeling complex subunit (Arp5) [Aspergillus fumigatus Af293] gi|66844111|gb|EAL84450.1| chromatin remodeling complex subunit (Arp5), [Aspergillus Af293]
  misc_feature (22)..(752): NCBI GI: 226283568 Blast Desc: chromatin remodeling complex subunit (Arp5) [Paracoccidioides brasiliensis Pb01]
MAPSAIDTSMPPLPVREEKTYPPARIFTVKETKFEKPFEAQPDGREKALTKPQGEAAIVIDNGSSAVRAGWSFEAAPRISIPPIMAKYRDRKLGKTYSFAGYDCYADTNAKGHIRHAFEPGTGIVANWDVEEHVLDWTFLKLGMNNADGSIDFPIVMTEAVANLPYSRKSMNEIIFECYGAPSLATGIDSLFSYRYNKGQTGLVISSSYSSTHVIPVYNAKPMLAQAIRLNWGGWHAAEYLLKLIRLKYPAFTGKLNASQAENMLHDHCYVSKSYDDELRSYLDWTGLEDRDVVMQYPFTEEIIVQKSEEELARIAERKKESGRRLQEQAAKMRLEKLIQKEQELEYYKKLAEKLVDANKKDTKRLLDAEDMKDEAALERTIKELEKSVKRQRTKDVGGDPEEEQEEPDFSLLEVPDDQLDEAGLKAKRHQRLLKSNHEARARAKAEKEAEKARVAEEERLDRERRENDLDNWLEEKRIARANTLQRMKERDRLKADLGNRKSLASQIRMKSIANLASDNPRGKRRRGGDDDNFGANDDDWGVYRQIAVGEGSDDEEGEEDLEGNLKQLEEDLLRYDAGFTHEHTWEAQNDWNKSLLHAFMRGPRPFDAGSQAEIHQIHLNVERIRVPEVVFQPSIAGVEQSGLIDITGDILTQRLSGLPGVNRDDFLRDIFLTGGNTLYTNFDHRIRQGLTPLLPAGSPLHIRKASDALLDAWRGAAQWVGTPAWKTATITKAEYQEKGQDYLKEHDMGNSYP

SEQ ID NO: 5027 - DNA, 3587 bp, Muscodor strobelii
  misc_feature: SGI EST ID NO. CUFF.12694.0
  misc_feature: Variant of the nucleotide sequence at SEQ ID NO 5025
ctttcgcgactcattgacaccagcacagcatcacctcaatgtccgttgccaaatgggctccactcttgggatcttcaacgcccagtgattggacaacggcgctgtctcgcctggaaagcggaacaaggccgcccagccatgtcgctgcttccctgtgatgcgtgttgccgtcagccttgtcgtcaaaatgtgacaggctggggaaggggcgagatggccactacagacaatacagctcgtcgctgccaacaccaccgccaactcgaagcccaccgaggcaattgcgtacccagtcgttaaagcttcggccagctgtttgcccggcccagcactattcagcaaccgtgcaaaccctcaattccatctggggatatttccaccgtcgacagatgccatcttgaacctcgtcccgcaatctcatccgtcatcaccgcgctacgctatggtactacacctccaacgtttgtgatcaccgcaaagcacggaatccatcagaatggcgccctcggcgattgacacttcgatgccacccttgcctgtgcgcgaagagaaaacatacccgccagcgcgcatcttcactgtcaaagagaccaagttcgagaagcccttcgaagcccagcccgatggccgcgagaaagcccttacaaaaccccagggcgaagctgccatagtcattgataatggttcctccgctgtccgcgccggctggtccttcgaggccgctcccagaatctccatccccccgatcatggccaagtatagagacaggaagctggggaagacatactcattcgctggctacgactgctacgccgatactaacgctaaaggccacatcagacacgccttcgaacccggtaccggcatcgttgccaattgggatgtcgaagagcatgtcttggactggacttttctcaagctgggcatgaacaacgccgacggttctattgatttccccatcgtcatgaccgaggccgtcgcgaacttgccctactcgcgcaaatcgatgaacgagatcatctttgaatgctacggcgcaccctctctcgccaccggcatcgactctctattctcttaccgatacaacaagggccagaccggcttggtcatctcctcctcctacagttcaactcacgtcatacccgtctacaacgccaagcccatgctggcccaggccattcgattgaattggggcggctggcatgccgcggaatacctcctcaaattaatccgactgaagtatccagcctttacaggaaagttaaatgcatcgcaggcagagaacatgctacacgatcactgctacgtatctaagtcgtacgacgatgagctacggtcctatctcgattggacgggtctagaggaccgtgatgtggtcatgcaatatccatttaccgaagagatcatcgtccaaaaaagcgaagaagagctggcccgaatcgcagagcgcaagaaggagagtggacggcggctacaggagcaggctgccaaaatgcgcctagagaagctcatacaaaaagagcaagagttggagtactacaagaagcttgcggagaagctagtggacgcgaacaaaaaggatacaaaacgtctcttggatgccgaggatatgaaagatgaggcagcgctcgagcgcacaattaaggagctcgagaaatccgtcaagcgccagcgcacaaaggatgtcggtggcgatccagaagaagaacaagaggagcccgatttcagtctcctcgaggttccagatgaccagctcgacgaagccggtctgaaggcaaagcgacatcagcgacttctgaaatcaaatcatgaagcccgagctcgtgcgaaagcagagaaggaggcagagaaggcgcgagttgccgaagaggaaagacttgatcgagagcgacgggagaatgatctggacaactggctagaggagaagcgcattgctcgcgccaacaccttacagaggatgaaagaacgtgaccgacttaaggccgatcttggaaaccgcaagtcattggcgtcacagatacggatgaagtccatagcaaatctcgcctccgacaatccgagaggcaagcgccgtcgcggcggagacgacgataacttcggcgccaacgacgatgattggggtgtttatcgccaaattgcagtcggcgaaggaagcgatgatgaagaaggcgaggaagatctcgaggggaaccttaagcagctcgaggaagacctacttcgatacgatgccggcttcacccacgagcatacgtgggaggcacagaatgactggaataagagcctgctgcacgccttcatgagaggaccacgccccttcgatgcaggctcgcaggcagagatacatcagatccatctaaacgttgagcgcatacgcgtccccgaggtcgttttccagccatccatcgcaggcgtcgagcagtcggggctcatcgatatcacgggggatatacttacgcagcgcctcagcgggttgccgggcgtaaaccgggatgatttccttcgagatatattcctcaccggaggtaatactctatacacaaacttcgaccaccgaatccgacaaggacttacaccactcctccctgccggatctcccctacatatccggaaggccagcgatgccttactggacgcctggagaggtgctgcacaatgggtcggcacgcctgcatggaagacggccaccatcactaaggctgagtaccaggagaagggtcaggactatctgaaagtaagtgcatatttcaaattcttaatttccgcctatcacgacatcagtcttggccttggaggcgtgtcatcccagccctaagacttcttgctgttcttggatgccgggtgcagggctggctcaaatttccgaccaatggcaaggctccgcttgtggcttgggaaggaatccgaccatgtttcacaacacggctctgcacggcatgcttaccgcagcatcctacccatcttgtgctttgcataacttttgccttgtcaaaccatatgacgtcgaataggacagtgtgctgactgctgcaatcttcaccgcttgtaggaacatgacatgggcaattcttacccatgatgatatgatgcagttttgacaaccttatctacacttgtgcaatcgtgcattatttttgctcttttccccatacatcgctcaccgaaatagaagtgaccgaaacgggaaaagacatggaatggttctcgcggccggctaaggattgatcggctgcatgggttcatgatggggtacgcctatacctacagggcgacaactactgatgaatatgactgctctgtccatttgcgggggacagaaatagaagaggagtttgcgcattggacagatagtgtgtaaaatagatcactgtgaattgtctgaataagcggttctcttctaccaaagttgcgcacttgatggaggtgcgcattgcagagtcgtcgtgatgtgataatttcggtaaaaaaaccatgttacgttgcttacatatgccaggactatgagaggactgacagggagagaatacatgatcatgtaacaacgttgttgatgacaggaatatgacttagaatggtaaaccagagcgttg

SEQ ID NO: 5028 - DNA, 219 bp, Muscodor strobelii
  misc_feature: SGI cDNA ID NO. 561383
  misc_feature: Encodes the peptide sequence at SEQ ID NO 5029
atggagagccctcacgagcaccagcagaacctgctgctgtcgcgtatcatcaccaacgttgaaaaactcaatgaatctatcgtgatcatgaacaagagtctccaggagatcaatgtgcaaaacatgaacatcgagcttgttgcccagatgttcaagaactaccagtccaatgtgctcttccacctagaagctacggataatctcaaggaaccgtcatga

SEQ ID NO: 5029 - protein, 72 aa, Muscodor strobelii
  misc_feature: SGI Peptide ID NO. 561383
  misc_feature (1)..(72): Pfam Id: PF08650 Pfam Desc: DASH complex subunit Dad4
  misc_feature (1)..(72): NCBI GI: 164425116 Blast Desc: DASH complex subunit DAD4 [Neurospora crassa OR74A] gi|157070796|gb|EDO65111.1| DASH complex subunit DAD4 [Neurospora crassa OR74A]
  misc_feature (1)..(72): NCBI GI: 171688668 Blast Desc: protein product [Podospora anserina] gi|170944296|emb|CAP70406.1| protein product [Podospora anserina]
  misc_feature (1)..(72): NCBI GI: 46124023 Blast Desc: FG06389.1 [Gibberella zeae PH-1]
  misc_feature (1)..(72): NCBI GI: 261356638 Blast Desc: VDBG_05175 [Verticillium albo-atrum VaMs.102]
  misc_feature (1)..(72): NCBI GI: 145603314 Blast Desc: conserved [Magnaporthe grisea 70-15] gi|145011571|gb|EDJ96227.1| conserved [Magnaporthe grisea 70-15]
  misc_feature (1)..(72): NCBI GI: 212545260 Blast Desc: DASH complex subunit Dad4, [Penicillium marneffei ATCC 18224] gi|210065753|gb|EEA19847.1| DASH complex subunit Dad4, [Penicillium marneffei ATCC 18224]
  misc_feature (2)..(72): NCBI GI: 121714655 Blast Desc: ACLA_055600 [Aspergillus clavatus NRRL 1] gi|119403092|gb|EAW13512.1| ACLA_055600 [Aspergillus clavatus NRRL 1]
  misc_feature (1)..(72): NCBI GI: 255933646 Blast Desc: Pc12g13960 [Penicillium chrysogenum Wisconsin 54-1255] gi|211582821|emb|CAP81023.1| Pc12g13960 [Penicillium chrysogenum Wisconsin 54-1255]
  misc_feature (2)..(71): NCBI GI: 225555213 Blast Desc: [Ajellomyces capsulatus G186AR]
  misc_feature (1)..(72): NCBI GI: 226283567 Blast Desc: [Paracoccidioides brasiliensis Pb01]
MESPHEHQQNLLLSRIITNVEKLNESIVIMNKSLQEINVQNMNIELVAQMFKNYQSNVLFHLEATDNLKEPS

SEQ ID NO: 5030 - DNA, 882 bp, Muscodor strobelii
  misc_feature: SGI EST ID NO. CUFF.12688.0
  misc_feature: Variant of the nucleotide sequence at SEQ ID NO 5028
tcgctatcacacttttagaataactgatgacatagacaattgtgtattttactcaaattagttgcctagtatctttatggttaagcagacgcgctcaacccgttttagtacgattgattattcgactgattgccgtttcgcctgacgcagagtagtcggatttctgaagcttgaatagttgggtacatgaggaccgtactacctaataaagctctaacatccatctccaaggtccctaagccacttagcgcggttacagtccacctctcccaaaccagacaagcagagcctcagtcaacagtacacaactggaacattctcagctgcactgatcgagttcttgacgtcctaggacaagatggagagccctcacgagcaccagcagaacctgctgctgtcgcgtatcatcaccaacgttgaaaaactcaatgaatctatcgtgatcatgaacaagagtctccaggagatcaatgtgcaaaacatgaacatcgagcttgttgcccagatgttcaagaactaccagtccaatgtgctcttccacctagaagctacggataatctcaaggaaccgtcatgaacagatacctaggtaggggaggaaagagtcgcccacaatacatgtagcaaagctcctaaacagacgacacagtggcgtattgtgagaatgatattgtgtccctgcttgttggatgtgagatttatcatgcgacgaatatcaaggctatgagaggatgaactgtcctgaaggaggtacaagtgggcttgcagaccgagaccttgggggatatcacataccaacagagtaatgattccgacagctagctgcctcgcatggtgctgaagttatttcaatgctatataaatatctttgttgttgcagaa

SEQ ID NO: 5031 - DNA, 591 bp, Muscodor strobelii
  misc_feature: SGI cDNA ID NO. 561384
  misc_feature: Encodes the peptide sequence at SEQ ID NO 5032
atgtcggcacccaccgaggctcagatagctcaccaggagctcatcgacaagctcgacatacactccatccacaagacctaccgcaacccgcactggcgccccaaccagcgccgcaacaagaacatcaagaccatcctcggcgacgccctgcgcaaggaagcctccatggccgccacgccccaagacaactcgggcgtcgctactccgatgcaggtcgacaacgacggcttgtccacgagcggaacctcgacacccgctcagtccgctggcggctccaatcagcagcccaatctcgcccaggcctcgcgtagtctgtcgaagcttgtgctggagaagagcctgcgtccgaacggtgccactggcgcgaccgcgacggcccccagcgcaacctacaccaacatcgagtcggcgccctcggtcgcccacacgaaacggtactgcgacatcaccggcctccctgctccctatctcgaccccaagagcaggcttcgctatcacaatagggagtgcttcggcttcattcgcaatctgccccaaggcgcaggcgagcaatacctggaggctagaggtgctcataccgtcttgaagtga

SEQ ID NO: 5032 - protein, 196 aa, Muscodor strobelii
  misc_feature: SGI Peptide ID NO. 561384
  misc_feature (145)..(174): Pfam Id: PF08265 Pfam Desc: YL1 nuclear protein C-terminal domain
  misc_feature (7)..(196): NCBI GI: 116196302 Blast Desc: CHGG_04749 [Chaetomium globosum CBS 148.51] gi|88180662|gb|EAQ88130.1| CHGG_04749 [Chaetomium globosum CBS 148.51]
  misc_feature (1)..(196): NCBI GI: 256726996 Blast Desc: NECHADRAFT_34267 [Nectria haematococca mpVI 77-13-4]
  misc_feature (1)..(196): NCBI GI: 46124025 Blast Desc: FG06390.1 [Gibberella zeae PH-1]
  misc_feature (7)..(196): NCBI GI: 171688666 Blast Desc: protein product [Podospora anserina] gi|170944295|emb|CAP70405.1| protein product [Podospora anserina]
  misc_feature (11)..(196): NCBI GI: 164425114 Blast Desc: NCU06395 [Neurospora crassa OR74A] gi|157070795|gb|EAA32997.2| conserved [Neurospora crassa OR74A]
  misc_feature (15)..(196): NCBI GI: 39975889 Blast Desc: MGG_06129 [Magnaporthe grisea 70-15] gi|145011572|gb|EDJ96228.1| MGG_06129 [Magnaporthe grisea 70-15]
  misc_feature (1)..(196): NCBI GI: 156035727 Blast Desc: SS1G_13067 [Sclerotinia sclerotiorum 1980] gi|154698472|gb|EDN98210.1| SS1G_13067 [Sclerotinia sclerotiorum 1980]
  misc_feature (1)..(196): NCBI GI: 154294027 Blast Desc: BC1G_14047 [Botryotinia fuckeliana B05.10] gi|150845092|gb|EDN20285.1| BC1G_14047 [Botryotinia fuckeliana B05.10]
  misc_feature (1)..(196): NCBI GI: 261356637 Blast Desc: conserved [Verticillium albo-atrum VaMs.102]
  misc_feature (11)..(196): NCBI GI: 212545262 Blast Desc: conserved [Penicillium marneffei ATCC 18224] gi|210065754|gb|EEA19848.1| conserved [Penicillium marneffei ATCC 18224]
MSAPTEAQIAHQELIDKLDIHSIHKTYRNPHWRPNQRRNKNIKTILGDALRKEASMAATPQDNSGVATPMQVDNDGLSTSGTSTPAQSAGGSNQQPNLAQASRSLSKLVLEKSLRPNGATGATATAPSATYTNIESAPSVAHTKRYCDITGLPAPYLDPKSRLRYHNRECFGFIRNLPQGAGEQYLEARGAHTVLK

SEQ ID NO: 5033 - DNA, 1625 bp, Muscodor strobelii
  misc_feature: SGI EST ID NO. CUFF.12690.0
  misc_feature: Variant of the nucleotide sequence at SEQ ID NO 5031
caaaagtaagtgatacggcaatacaacattcaataattaggtctgcaatgcgcccactgacagattaacaatgttagcaatagtcgattcacgctatagtgttaaggcgattcataacaataccccaaagacgaaccctagatacagcttactagctatctgaaatcttgtcttaagtctatccgcatcacatagaggcgtgcatatctcttttgtttgtcgcctgccgcctgccgccaaaccctctgtcgcgcccgttttcaccttcctcgtcaaccactattatcaaacaaccattcccgccgccacaaaagcaacgcgtcaagtcatcaacatgtcggcacccaccgaggctcagatagctcaccaggagctcatcgacaagctcgacatacactccatccacaagacctaccgcaacccgcactggcgccccaaccagcgccgcaacaagaacatcaagaccatcctcggcgacgccctgcgcaaggaagcctccatggccgccacgccccaagacaactcgggcgtcgctactccgatgcaggtcgacaacgacggcttgtccacgagcggaacctcgacacccgctcagtccgctggcggctccaatcagcagcccaatctcgcccaggcctcgcgtagtctgtcgaagcttgtgctggagaagagcctgcgtccgaacggtgccactggcgcgaccgcgacggcccccagcgcaacctacaccaacatcgagtcggcgccctcggtcgcccacacgaaacggtactgcgacatcaccggcctccctgctccctatctcgaccccaagagcaggcttcgctatcacaatagggagtgcttcggcttcattcgcaatctgccccaaggcgcaggcgagcaatacctggaggctagaggtgctcataccgtcttgaagtgaagagctctctgcaggactagagcctgtgtctagtgccgcggcttatgccggattttcagcctatcttacatttatagctcatcaactggtactgcgagtttctacaattccacacacgatcaacttcacaacttggagcatgacagaacagatcacggcgagtgtattgagaggcaatatgcctaggcttgtgcgtcgtacaaaaatgggtcattatgagaagaatgttcgaccagcaaagtcaagcccatcctacgcaccagccgcctttcagcaaccagatacaaggcatacgctccggcttattgcgatccgactttttcacaaaagagcaaaaaagaagtggattgctctctgcctgtaactgacgggtaccgagaatgcatggcggaggaccattctcagtgaccagagcttctaagagctgaggacgccgcggcaaggggatatcatcatgatgacgagagggtttattgagaatgataggggtatatgtattctctgcagaagagcccatatgaaatgaattgatcaatgacccgtactgtgtcgaagcctaccttgaaacacgcgtgttctgtgatttccgagatttttgcctgcgtgcctcgaaaacacggttgcagacatccattcccacggtatcaatcgagaccataatcgtgagataatcgcgagaatatccaaactttgcaagctg

SEQ ID NO: 5034 - DNA, 420 bp, Muscodor strobelii
  misc_feature: SGI cDNA ID NO. 561385
  misc_feature: Encodes the peptide sequence at SEQ ID NO 5035
atgcctacgatgtggttatcagacaaccaaaaaataggagtggtcttctgctcaggcggaggcttcttcctcatcggtggtgtgctactattctttgatcgcgctatgctggctatgggaaatatcctctttctaatcggcctaacgataatcatcggcccgcaaaagacgctcttattcttcgcacgacgtcaaaaggcaaaaggcacagcggccttcttcgcgggtctactactcatattactacgatggcctttaatcggctttctagtagagttgtacgggattgtcatcttatttggtgacttcctagggactatcgctggcttcgcgagaggaatacctgttattgggccttggatcggcatgctggttgataggattgggttaggacggcggaatgctgagctgccggtctga

SEQ ID NO: 5035 - protein, 139 aa, Muscodor strobelii
  misc_feature: SGI Peptide ID NO. 561385
  misc_feature (30)..(125): Pfam Id: PF04178 Pfam Desc: Got1-like family
  misc_feature (1)..(139): NCBI GI: 145603316 Blast Desc: Got1 family protein [Magnaporthe grisea 70-15] gi|145011573|gb|EDJ96229.1| Got1 family protein [Magnaporthe grisea 70-15]
  misc_feature (3)..(139): NCBI GI: 256726997 Blast Desc: [Nectria haematococca mpVI 77-13-4]
  misc_feature (1)..(139): NCBI GI: 116196304 Blast Desc: CHGG_04750 [Chaetomium globosum CBS 148.51] gi|88180663|gb|EAQ88131.1| CHGG_04750 [Chaetomium globosum CBS 148.51]
  misc_feature (1)..(139): NCBI GI: 261356636 Blast Desc: Got1 family protein [Verticillium albo-atrum VaMs.102]
  misc_feature (4)..(139): NCBI GI: 171688664 Blast Desc: protein product [Podospora anserina] gi|170944294|emb|CAP70404.1| protein product [Podospora anserina]
  misc_feature (1)..(139): NCBI GI: 119487425 Blast Desc: Got1-like family protein [Neosartorya fischeri NRRL 181] gi|119410662|gb|EAW20608.1| Got1-like family protein [Neosartorya fischeri NRRL 181]
  misc_feature (3)..(139): NCBI GI: 46124027 Blast Desc: FG06391.1 [Gibberella zeae PH-1]
  misc_feature (1)..(139): NCBI GI: 121714651 Blast Desc: conserved [Aspergillus clavatus NRRL 1] gi|119403090|gb|EAW13510.1| conserved [Aspergillus clavatus NRRL 1]
  misc_feature (1)..(139): NCBI GI: 85106697 Blast Desc: NCU06396 [Neurospora crassa OR74A] gi|28923834|gb|EAA32998.1| conserved [Neurospora crassa OR74A]
  misc_feature (1)..(139): NCBI GI: 242815155 Blast Desc: Got1 family protein [Talaromyces stipitatus ATCC 10500] gi|218714853|gb|EED14276.1| Got1 family protein [Talaromyces stipitatus ATCC 10500]
MPTMWLSDNQKIGVVFCSGGGFFLIGGVLLFFDRAMLAMGNILFLIGLTIIIGPQKTLLFFARRQKAKGTAAFFAGLLLILLRWPLIGFLVELYGIVILFGDFLGTIAGFARGIPVIGPWIGMLVDRIGLGRRNAELPV

SEQ ID NO: 5036 - DNA, 1987 bp, Muscodor strobelii
  misc_feature: SGI EST ID NO. CUFF.13013.1
  misc_feature: Variant of the nucleotide sequence at SEQ ID NO 5034
ctacaatgtaatttcgggaatcgcattcgagcttgaaaatcttcctttctctctcttcatacttccataacacattgaaacgctctctcacgacaactacgcacacgattgacgaatcacatataccctttgcgtatttagttcgcttccaccacccggaccaatagcgctgtgatcttctctgaaccttgcgagagtgttgaagcgcagagctcgaagcttcattgcgcgacctcgcttcaattttgacgtccaagccggactgggcaacaaataatacacaaacaagatgcctacgatgtggttatcagacaaccaaaaaataggagtggtcttctgctcaggcggaggcttcttcctcatcggtggtgtgctactattctttgatcgcgctatgctggctatgggaaatatcctctttctaatcggcctaacgataatcatcggcccgcaaaagacgctcttattcttcgcacgacgtcaaaaggcaaaaggcacagcggccttcttcgcgggtctactactcatattactacgatggcctttaatcggctttctagtagagttgtacgggattgtcatcttatttggtgacttcctagggactatcgctggcttcgcgagaggaatacctgttattgggccttggatcggcatgctggttgataggattgggttaggacggcggaatgctgagctgccggtctgaagaggtgctgtgtgtagagaaagcacagttctattcgaacacaacatgtgatgcctcgtgccgaatcgcttcgcttcgcggccgtctggacggtgggtcatatctgctctgatctgatatggtcttgggatgtatcaaattgtaatgataatgagaagaagtcaggggcgtctggggttcggtacaagaaactgtacgatagccttcacgggcgaaaggaacgacgagacgccgaaagcaaggagcatagcgtatcacggctctggtgtctggttggagaggaggccaatcattgttgtatcatttgcctatgcagaatcccagggttggtttctcgggggctacgaagagagagaaataaagattttctcgtcccatcttatcctcgatcgtcgaaccaaacaaaaacaaagcatgagaagaaccatctaagcttcacccccttgctcatcatctgtttctgttatcttttcccctcttccgttgcgttatgcctacatgcttcccagtacttatctggtacttagtagttgcatgccccctattcctatctatccatgcgagtagtttggtcatttgttgtctcgggtattgccatttcacataatcatatcccatccctgtcttccctctctccgtcgcgagaacttagtagccggacttgatgaggtagtcggcaagggcctcggtggttgaggtggcgtttccggcgacgtgcgcctcgccgtggtgggcgactatgaaggcttgctttgtcttggcgacgcagattccttcccgtccctgcgagaatgaaaatagtaatgttagcattgaataactggaaagatgtatgggaggtaaggggcaaaaaagtaccttgcgggcgtagatgcttcggccatcgatgcgggctacgacgtagcgctcgccggcgacgtggatgccctcggcctgagcgttggcgacggcggactggtcacccttctcgttctcggcggcggcaaggatgcctaccagggtcttgagttctgcgggttggagctagcggagctttgttagctttgtggtgtattgctttttatagttctaagatctgaactccttcaaagccacggatagctgcggccgcaggggatccgaagaggggttgcgtacgttgaagccggccgaggtagcccagacgctgtcgccggcagcactgacgatggcggccttgtcgaggtgaccgctgccaacaaggctattaccatgtctcagatcagctcccgtcctctagtcatcgcatttctttctttc

SEQ ID NO: 5037 - DNA, 414 bp, Muscodor strobelii
  misc_feature: SGI cDNA ID NO. 561386
  misc_feature: Encodes the peptide sequence at SEQ ID NO 5038
atgtcttggcaacagtacatcgactccagccttgttggcagcggtcacctcgacaaggccgccatcgtcagtgctgccggcgacagcgtctgggctacctcggccggcttcaacctccaacccgcagaactcaagaccctggtaggcatccttgccgccgccgagaacgagaagggtgaccagtccgccgtcgccaacgctcaggccgagggcatccacgtcgccggcgagcgctacgtcgtagcccgcatcgatggccgaagcatctacgcccgcaagggacgggaaggaatctgcgtcgccaagacaaagcaagccttcatagtcgcccaccacggcgaggcgcacgtcgccggaaacgccacctcaaccaccgaggcccttgccgactacctcatcaagtccggctactaa

SEQ ID NO: 5038 - protein, 137 aa, Muscodor strobelii
  misc_feature: SGI Peptide ID NO. 561386
  misc_feature (2)..(132): Pfam Id: PF00235 Pfam Desc: Profilin
  misc_feature (1)..(137): NCBI GI: 46124029 Blast Desc: FG06392.1 [Gibberella zeae PH-1]
  misc_feature (1)..(137): NCBI GI: 256727573 Blast Desc: [Nectria haematococca mpVI 77-13-4]
  misc_feature (1)..(137): NCBI GI: 85106701 Blast Desc: profilin [Neurospora crassa OR74A] gi|28923835|gb|EAA32999.1| profilin [Neurospora crassa OR74A]
  misc_feature (1)..(137): NCBI GI: 240110376 Blast Desc: Profilin II , [Coccidioides posadasii C735 delta SOWgp]
  misc_feature (1)..(137): NCBI GI: 51556857 Blast Desc: profilin-like protein [Dactylellina haptotyla]
  misc_feature (1)..(137): NCBI GI: 116196306 Blast Desc: [Chaetomium globosum CBS 148.51] gi|88180664|gb|EAQ88132.1| [Chaetomium globosum CBS 148.51]
  misc_feature (1)..(137): NCBI GI: 119180545 Blast Desc: CIMG_08896 [Coccidioides immitis RS]
  misc_feature (1)..(137): NCBI GI: 19114739 Blast Desc: profilin [Schizosaccharomyces pombe] gi|730406|sp|P39825.1|PROF_SCHPO RecName: Full=Profilin gi|218681764|pdb|3D9Y|A Chain A, Crystal Structure Of Profilin B,
  misc_feature (1)..(137): NCBI GI: 213410563 Blast Desc: profilin [Schizosaccharomyces japonicus yFS275] gi|212004098|gb|EEB09758.1| profilin [Schizosaccharomyces japonicus yFS275]
  misc_feature (1)..(137): NCBI GI: 210075240 Blast Desc: YALI0B07183p [Yarrowia lipolytica] gi|199425148|emb|CAG82829.4| YALI0B07183p [Yarrowia lipolytica]
MSWQQYIDSSLVGSGHLDKAAIVSAAGDSVWATSAGFNLQPAELKTLVGILAAAENEKGDQSAVANAQAEGIHVAGERYVVARIDGRSIYARKGREGICVAKTKQAFIVAHHGEAHVAGNATSTTEALADYLIKSGY

SEQ ID NO: 5039 - DNA, 1870 bp, Muscodor strobelii
  misc_feature: SGI EST ID NO. CUFF.13014.5
  misc_feature: Variant of the nucleotide sequence at SEQ ID NO 5037
caggtaatggaggggatgggcaatggttactggggcagtttccaagtctacccgcaagcagcccctcattcaagtgttgtcttgtcgtgtgaagcaagcattattattgttattgctccattttgctcgccctttgtgtagtcctgacaccatcggtggctgacctgacctccacccgtcccgccatacctgcccctgtaccgttcaatctttaacatctgtctaccgtgacaacgccgactttagtccttcagtcatctttttgttcacttttccaacactctccttcttcctcttgctttacccgtcttattcccccatcctcgcaaagctaatagcgagagtatcacatcatgtcttggcaacagtacatcgactccagccttgttggcagcggtcacctcgacaaggccgccatcgtcagtgctgccggcgacagcgtctgggctacctcggccggcttcaacctccaacccgcagaactcaagaccctggtaggcatccttgccgccgccgagaacgagaagggtgaccagtccgccgtcgccaacgctcaggccgagggcatccacgtcgccggcgagcgctacgtcgtagcccgcatcgatggccgaagcatctacgcccgcaagggacgggaaggaatctgcgtcgccaagacaaagcaagccttcatagtcgcccaccacggcgaggcgcacgtcgccggaaacgccacctcaaccaccgaggcccttgccgactacctcatcaagtccggctactaagttctcgcgacggagagagggaagacagggatgggatatgattatgtgaaatggcaatacccgagacaacaaatgaccaaactactcgcatggatagataggaatagggggcatgcaactactaagtaccagataagtactgggaagcatgtaggcataacgcaacggaagaggggaaaagataacagaaacagatgatgagcaagggggtgaagcttagatggttcttctcatgctttgtttttgtttggttcgacgatcgaggataagatgggacgagaaaatctttatttctctctcttcgtagcccccgagaaaccaaccctgggattctgcataggcaaatgatacaacaatgattggcctcctctccaaccagacaccagagccgtgatacgctatgctccttgctttcggcgtctcgtcgttcctttcgcccgtgaaggctatcgtacagtttcttgtaccgaaccccagacgcccctgacttcttctcattatcattacaatttgatacatcccaagaccatatcagatcagagcagatatgacccaccgtccagacggccgcgaagcgaagcgattcggcacgaggcatcacatgttgtgttcgaatagaactgtgctttctctacacacagcacctcttcagaccggcagctcagcattccgccgtcctaacccaatcctatcaaccagcatgccgatccaaggcccaataacaggtattcctctcgcgaagccagcgatagtccctaggaagtcaccaaataagatgacaatcccgtacaactctactagaaagccgattaaaggccatcgtagtaatatgagtagtagacccgcgaagaaggccgctgtgccttttgccttttgacgtcgtgcgaagaataagagcgtcttttgcgggccgatgattatcgttaggccgattagaaagaggatctgggagagtacctaggtgagcatatgttcaaagcaggcaggtaaagcatttgctggtggcaccatatgcgatagaatcagagttgcactgggtgcgaaagtgtgtttcctcctttgacagggtcttaagctgctcagaaacacggaccagttttctc

SEQ ID NO: 5040 - DNA, 1488 bp, Muscodor strobelii
  misc_feature: SGI cDNA ID NO. 561387
  misc_feature: Encodes the peptide sequence at SEQ ID NO 5041
atggcagaacgaccgagcacatctggtggattgagttcgcaaaagggaactaagaacgatttcaacttcaataataagagaatatcgagagatgatttctatctcgaaacaaaatcgtatgggcgaagtcgtgcgaagacgtttggtcccagccaagggcaactcccaactcctgatgccagcccacgatcggtgtcgacggcacggtttgcaaacctgaacgcggtccggaagcagagtctggattctattaatgttgcacgccatgaagacatagggatggcgctgggcagcccaagccatgctccggctgctccaattgcatggagaacaaatacgctgcaacatagacaaaattcatcgccatatgtagaagcacccatttcgagaagcagcagcgtggatacttttgatatgccagcacagaaaaaaccaggaaaatggaagctgttcggcatgtttggcagaaagcactcagatcaacctgtcccggcaatttcgatatcggacccaaatggtcttaaaaacgctaatctagcagaggaccaatgggccaaagctatcgaaacacaaccagaagcaaagagcccggcgagatctaatacgagtgcttcgcgcaaaacaccaagacacaaacccattgttgtccgatcacaaacaatgccacttggcatggacactaatgaaccaccgaaggagaccacgaggaagaaggatgttagattcgagagcataccaatagtgttggacacgggcccgactttgaaccctgcaccaggtccgctgttgaacgtagagatcccagacgtacgaatggaaagatatagcgtgatgttcaacagtgttttgaactcaaacccatccttattgacgaggcgtcaagcaaatgttcaaaagctgaagcccattgacgacgctaatgagcgtcaagatatcacaggccttgaaaccagcaccgcagtatatcgcgccctcaccaaagtggcagatgatgagcccagcacaaaaaacgccttcaacagcgacttcgcagaaaacaccctcgacggctacttcatctacgtcttacgctacaagctcacaccacatatgcaggacttcgacgatccggcgatgctgggcgtggtgggcgacaaacccagtgcgttaaaactcacgcctgtggagttgagtatcgcgagacagatcagtatgagtcaacagcaaagaaaaatgttgcagccactcaggaccaagtcctcacgtgatggaagcggagcggcgagcaggagcgagagtaggaatgggagtgtgaccggacagacacagacggctagagcgagtcctgcaagaactagtcctgtagctggtgtcgctatgggtaatagtggtaggattgccgagacgaagactagtacgccgacgcttgtgcatccgccagggagcttgagtgtcatgatggatgctaggcagaggaggagtcaggttgttgtcgttgaggagaattga

SEQ ID NO: 5041 - protein, 495 aa, Muscodor strobelii
  misc_feature: SGI Peptide ID NO. 561387
  misc_feature (23)..(306): NCBI GI: 39975895 Blast Desc: MGG_06126 [Magnaporthe grisea 70-15] gi|145011576|gb|EDJ96232.1| MGG_06126 [Magnaporthe grisea 70-15]
  misc_feature (1)..(305): NCBI GI: 171688658 Blast Desc: protein product [Podospora anserina] gi|170944291|emb|CAP70401.1| protein product [Podospora anserina]
  misc_feature (1)..(305): NCBI GI: 261356628 Blast Desc: conserved [Verticillium albo-atrum VaMs.102]
  misc_feature (1)..(306): NCBI GI: 154294059 Blast Desc: BC1G_14063 [Botryotinia fuckeliana B05.10] gi|150845108|gb|EDN20301.1| BC1G_14063 [Botryotinia fuckeliana B05.10]
  misc_feature (382)..(493): NCBI GI: 39975895 Blast Desc: MGG_06126 [Magnaporthe grisea 70-15] gi|145011576|gb|EDJ96232.1| MGG_06126 [Magnaporthe grisea 70-15]
  misc_feature (13)..(222): NCBI GI: 46124031 Blast Desc: FG06393.1 [Gibberella zeae PH-1]
  misc_feature (92)..(307): NCBI GI: 255933654 Blast Desc: Pc12g14000 [Penicillium chrysogenum Wisconsin 54-1255] gi|211582825|emb|CAP81027.1| Pc12g14000 [Penicillium chrysogenum Wisconsin 54-1255]
  misc_feature (259)..(312): NCBI GI: 46124031 Blast Desc: FG06393.1 [Gibberella zeae PH-1]
  misc_feature (388)..(493): NCBI GI: 256726998 Blast Desc: NECHADRAFT_76544 [Nectria haematococca mpVI 77-13-4]
  misc_feature (20)..(220): NCBI GI: 256726998 Blast Desc: NECHADRAFT_76544 [Nectria haematococca mpVI 77-13-4]
MAERPSTSGGLSSQKGTKNDFNFNNKRISRDDFYLETKSYGRSRAKTFGPSQGQLPTPDASPRSVSTARFANLNAVRKQSLDSINVARHEDIGMALGSPSHAPAAPIAWRTNTLQHRQNSSPYVEAPISRSSSVDTFDMPAQKKPGKWKLFGMFGRKHSDQPVPAISISDPNGLKNANLAEDQWAKAIETQPEAKSPARSNTSASRKTPRHKPIVVRSQTMPLGMDTNEPPKETTRKKDVRFESIPIVLDTGPTLNPAPGPLLNVEIPDVRMERYSVMFNSVLNSNPSLLTRRQANVQKLKPIDDANERQDITGLETSTAVYRALTKVADDEPSTKNAFNSDFAENTLDGYFIYVLRYKLTPHMQDFDDPAMLGVVGDKPSALKLTPVELSIARQISMSQQQRKMLQPLRTKSSRDGSGAASRSESRNGSVTGQTQTARASPARTSPVAGVAMGNSGRIAETKTSTPTLVHPPGSLSVMMDARQRRSQVVVVEEN

SEQ ID NO: 5042 - DNA, 1876 bp, Muscodor strobelii
  misc_feature: SGI EST ID NO. CUFF.12708.0
  misc_feature: Variant of the nucleotide sequence at SEQ ID NO 5040
ggaaaatggaagctgttcggcatgtttggcagaaagcactcagatcaacctgtcccggcaatttcgatatcggacccaaatggtcttaaaaacgctaatctagcagaggaccaatgggccaaagctatcgaaacacaaccagaagcaaagagcccggcgagatctaatacgagtgcttcgcgcaaaacaccaagacacaaacccattgttgtccgatcacaaacaatgccacttggcatggacactaatgaaccaccgaaggagaccacgaggaagaaggatgttagattcgagagcataccaatagtgttggacacgggcccgactttgaaccctgcaccaggtccgctgttgaacgtagagatcccagacgtacgaatggaaagatatagcgtgatgttcaacagtgttttgaactcaaacccatccttattgacgaggcgtcaagcaaatgttcaaaagctgaagcccattgacgacgctaatgagcgtcaagatgaacatccacgtccaggcgtagctcgaagggcaacatcgccaggacttgcgttattcccaagtgacaagagacctcgtcatatccctcaccctcagaaattgtcaccacgccatcgtactaatagttcccctgcacttctgccatcaccatccaggccatcttttgaccagtctgtacataatcatcctagacggccctctagggatgaaaccttgcaacacgctcatattcatacccgccgcccgtctcaagattcacacaagaaggcacatcacacgaccacaaaagccacccatgcagacccgacaccaactcaccacttccacgctgaacctcaccactttaaccccgaggaatcaagtctctatctagaatcaccaacttactactcagactcagagcaatcaccaacaaccgtcagatcacaggccttgaaaccagcaccgcagtatatcgcgccctcaccaaagtggcagatgatgagcccagcacaaaaaacgccttcaacagcgacttcgcagaaaacaccctcgacggctacttcatctacgtcttacgctacaagcgtgagtaacagtagcttccgcaagccctcaacctctgtcgcgtcttcgagccagacgacagtcacaccacatatgcaggacttcgacgatccggcgatgctgggcgtggtgggcgacaaacccagtgcgttaaaactcacgcctgtggagttgagtatcgcgagacagatcagtatgagtcaacagcaaagaaaaatgttgcagccactcaggaccaagtcctcacgtgatggaagcggagcggcgagcaggagcgagagtaggaatgggagtgtgaccggacagacacagacggctagagcgagtcctgcaagaactagtcctgtagctggtgtcgctatgggtaatagtggtaggattgccgagacgaagactagtacgccgacgcttgtgcatccgccagggagcttgagtgtcatgatggatgctaggcagaggaggagtcaggttgttgtcgttgaggagaattgagagggtgatgtgtatatatgggttttacaaatcgaagctggctcgatgtcagttcagggggttgacattcgtgatgatgaatgaggcagagcgttgcatttaatggaacgttcgcaggtaatagcgggcgtaatttaattctagcaaggagttcgatggatggatgagggcaaagtgaaggatttggacgagacaaatggcagatgacttcgtgcatacactatgtacttttactttgttcggaaaaggagacgaagaagcagaagcgaggtcgacgtgtgccgtgttacccactcccgtcttgagcgagatctgtgtcctatttcgaagtgctcggcaa

SEQ ID NO: 5043 - DNA, 597 bp, Muscodor strobelii
  misc_feature: SGI cDNA ID NO. 561388
  misc_feature: Encodes the peptide sequence at SEQ ID NO 5044
atgaagctgcactacatcggggtcatccagaacgagagcaagcccggtgtcgagctcgtcgccgagaaggagctgagcgcatactcgcgcttcacccgcacaaactatggcgagttcatgaccctattctccaagaccgtcgccgagcggacgaggccaggacagcgacaggatgtcgaggaacaagactacacattccacgcctacggccggacagagggcgtctgcggcatcatcatctcagatcacgagtacccagcactagttgcccaccagctgctgtccaaagtcatggacgaattcctcgcaaaccacccccggtcgtcgtgggcctcggcaggagccaacagcatcaacatgcccgagcttaaagagtacctcgccaaataccaggacccccaccaggccgacagcatcatgaagatccagagggagctcgacgagaccaagatcgtgctgcacaagaccatcgagagcgtcctgcagcgtggcgagaagattgacgacctcgttgccaagagtgacgggctcagcaaccagagcaagatgttctaccaacaagcaaagaagcaaaactcgtgctgcctgattatgtaa

SEQ ID NO: 5044 - protein, 198 aa, Muscodor strobelii
  misc_feature: SGI Peptide ID NO. 561388
  misc_feature (102)..(188): Pfam Id: PF00957 Pfam Desc: Synaptobrevin
  misc_feature (118)..(188): Pfam Id: PF00957 Pfam Desc: Synaptobrevin
  misc_feature (1)..(198): NCBI GI: 46124033 Blast Desc: FG06394.1 [Gibberella zeae PH-1]
  misc_feature (1)..(198): NCBI GI: 256727575 Blast Desc: [Nectria haematococca mpVI 77-13-4]
  misc_feature (1)..(198): NCBI GI: 145603322 Blast Desc: SNARE protein, [Magnaporthe grisea 70-15] gi|145011577|gb|EDJ96233.1| SNARE protein, [Magnaporthe grisea 70-15]
  misc_feature (1)..(198): NCBI GI: 156035733 Blast Desc: SS1G_13070 [Sclerotinia sclerotiorum 1980] gi|154698475|gb|EDN98213.1| SS1G_13070 [Sclerotinia sclerotiorum 1980]
  misc_feature (1)..(198): NCBI GI: 119180558 Blast Desc: synaptobrevin homolog ykt6 [Coccidioides immitis RS]
  misc_feature (1)..(198): NCBI GI: 240110379 Blast Desc: Synaptobrevin family protein [Coccidioides posadasii C735 delta SOWgp]
  misc_feature (1)..(198): NCBI GI: 154294031 Blast Desc: BC1G_14049 [Botryotinia fuckeliana B05.10] gi|150845094|gb|EDN20287.1| BC1G_14049 [Botryotinia fuckeliana B05.10]
  misc_feature (1)..(198): NCBI GI: 189204464 Blast Desc: synaptobrevin [Pyrenophora tritici-repentis Pt-1C-BFP] gi|187985666|gb|EDU51154.1| synaptobrevin [Pyrenophora tritici-repentis Pt-1C-BFP]
  misc_feature (1)..(198): NCBI GI: 238840227 Blast Desc: synaptobrevin [Microsporum canis CBS 113480]
  misc_feature (1)..(198): NCBI GI: 256720643 Blast Desc: [Nectria haematococca mpVI 77-13-4]
MKLHYIGVIQNESKPGVELVAEKELSAYSRFTRTNYGEFMTLFSKTVAERTRPGQRQDVEEQDYTFHAYGRTEGVCGIIISDHEYPALVAHQLLSKVMDEFLANHPRSSWASAGANSINMPELKEYLAKYQDPHQADSIMKIQRELDETKIVLHKTIESVLQRGEKIDDLVAKSDGLSNQSKMFYQQAKKQNSCCLIM

SEQ ID NO: 5045 - DNA, 1417 bp, Muscodor strobelii
  misc_feature: SGI EST ID NO. CUFF.12736.0
  misc_feature: Variant of the nucleotide sequence at SEQ ID NO 5043
cgggaatgggcggtctgagctcacaccccgcgccatgtgacaaagacaaccaagaaagacggcggcattgttgcatgcgccgcagcgcctgttacgtagagccaagacctgctggttttaccgctgcctgcgcccaagtgtccgtccacgattcgatttgatttgatttgatttccgttcgcaccgcatcctctgcctcaacctatagattcctaaatcaacacactccttcctacgcccatcgataccgctgcttgagccatacgtgaccagttccaatatccagacccaagcacctcttcgcaaccaacaaccgctaccaacatgaagctgcactacatcggggtcatccagaacgagagcaagcccggtgtcgagctcgtcgccgagaaggagctgagcgcatactcgcgcttcacccgcacaaactatggcgagttcatgaccctattctccaagaccgtcgccgagcggacgaggccaggacagcgacaggatgtcgaggaacaagactacacattccacgcctacggccggacagagggcgtctgcggcatcatcatctcagatcacgagtacccagcactagttgcccaccagctgctgtccaaagtcatggacgaattcctcgcaaaccacccccggtcgtcgtgggcctcggcaggagccaacagcatcaacatgcccgagcttaaagagtacctcgccaaataccaggacccccaccaggccgacagcatcatgaagatccagagggagctcgacgagaccaagatcgtgctgcacaagaccatcgagagcgtcctgcagcgtggcgagaagattgacgacctcgttgccaagagtgacgggctcagcaaccagagcaagatgttctaccaacaagcaaagaagcaaaactcgtgctgcctgattatgtaaatttagcgccatacgaactcaggattgtcatgtgaatccaccatcaccacgccacaccgttccagtggtagcagagcagggaggaaggaggagatctgccaaattggctatctggcgcaggactttctctttgctctctttttcctctacatagcctgtctacctacatacccaactaccaactcgtttacatctcacgtacggcgtcgcgcaaattcggagcagcaggatttgtcactcgtttccgggaattcatgttgggcaagtctgaggagagaagttctggtgtaatacttccctgcatccggacatcactaatagttctcgtgtacggctgtcgggctcaagcctagcgtaatagaaacattatgatagagatgtctgactcgacttatgaacttgtggtcttgattgctgtcgatgcacaattttttactatcctatcttggcgaactactaacctcgtcatgtttagtacaagcgcgacccggcgagg

SEQ ID NO: 5046 - DNA, 1482 bp, Muscodor strobelii
  misc_feature: SGI cDNA ID NO. 561390
  misc_feature: Reduced expression when VOC is produced
  misc_feature: Encodes the peptide sequence at SEQ ID NO 5047
atgggtcgaccaaccctcttactcactgtgctaataggcatatcattgacattcctatactgtctttgggcagttgtgtacaggacctggttccatccattggcaaaatatcccggtccacgactagccgcggtatcagagttctggtacatttggaaatggacatcatcgcgatatcccttcgcaatggaagaagcgcatcgcaaatacggcgatgtagtaagaatagcgccaaacgagctctcgttcgcgaccgtgcaagcctcaagggatatatatggcaagccatcgcatagtacaaagcaatttctcaaagcagacttctacaaaatcccgggaattgaggaagccatagtgaatgcgagaaaccctgcccagcacgcgcgacaacggaagtatctcgcaaatggtttcagtgctaaatctctccgtgaccaagaagttgtgattcacgagtatgttgacttgctcgttcatcagcttggtagacttggacgccctgagggtccaggggttgatattggagaggcttttcagtggttggcttttgatgttataggcgatctggcattcggcgagtccttcggagcagtagccgatggggagaaggggttttgggtctcccttctattcgatgcatcctacgtaatggtactaggaaatttatggcatcggttcccactcgccgttctcgctataccatttttcctgcctaagggagccttcggcaaattcaaaacccacgatgcattgaccgacgaaaagatgaaaagacgagtaaagatgagcgattcactccgacgagacgacttcttctctcatctactgcgaaaaggcgatagcgcagtgccgcacagcgaattaaagagccaggcttcggttttgatcctcggtggttcggaaaccactgccactgctctctctgctgcggtgtatttcctcctccagcatccgcagacgtaccagaaactctgcgaggagatacgctcgagatttacgtacaagagtgaaatcaccgctgaggcggtggctgagctgaagtatctccaagctgtgatcgacgaaacacttcggctattccctcccgtcgccttcggactcccgcgcacgagtccaggtgcgatggtggatggtgattacataccggccggtgtcacagtgcacgtctgtaactggatgactacgcgttctgagcgctactggaaggaacccatgtctttcattcccgaacgatggatgggtgaagatcttggcgatatcaaagaagccagtcaaccgttttcattgggagtgcgcgtttgcatgggggtcaatttggcttatatggaaatgagacttgctctatccaagatgatttttgcttacgattgggaactggtcgataaaagccccaaactctttgacgagtccaaattgtacgttatatggcagaagccagatttgcgtgtgcgtttctcttctcggaaggatcatcagttttga

SEQ ID NO: 5047 - protein, 493 aa, Muscodor strobelii
  misc_feature: SGI Peptide ID NO. 561390
  misc_feature (38)..(485): Pfam Id: PF00067 Pfam Desc: Cytochrome P450
  misc_feature (9)..(459): NCBI GI: 46138361 Blast Desc: FG10695.1 [Gibberella zeae PH-1]
  misc_feature (1)..(487): NCBI GI: 154289577 Blast Desc: BC1G_16084 [Botryotinia fuckeliana B05.10] gi|150849019|gb|EDN24212.1| BC1G_16084 [Botryotinia fuckeliana B05.10] gi|169635728|emb|CAP58782.1| cytochrome P40 monooxygenase
  misc_feature (17)..(485): NCBI GI: 259485752 Blast Desc: TPA: cytochrome P450, (Eurofung) [Aspergillus nidulans FGSC A4]
  misc_feature (22)..(459): NCBI GI: 256725278 Blast Desc: NECHADRAFT_45567 [Nectria haematococca mpVI 77-13-4]
  misc_feature (55)..(487): NCBI GI: 156054726 Blast Desc: SS1G_06211 [Sclerotinia sclerotiorum 1980] gi|154703991|gb|EDO03730.1| SS1G_06211 [Sclerotinia sclerotiorum 1980]
  misc_feature (19)..(485): NCBI GI: 67522561 Blast Desc: AN1737.2 [Aspergillus nidulans FGSC A4] gi|40744867|gb|EAA64023.1| AN1737.2 [Aspergillus nidulans FGSC A4] gi|259487082|tpe|CBF85469.1| TPA: cytochrome P450, (Eurofung)
  misc_feature (55)..(489): NCBI GI: 154296440 Blast Desc: BC1G_13046 [Botryotinia fuckeliana B05.10] gi|150843407|gb|EDN18600.1| BC1G_13046 [Botryotinia fuckeliana B05.10]
  misc_feature (18)..(485): NCBI GI: 121712479 Blast Desc: benzoate 4-monooxygenase cytochrome P450 [Aspergillus clavatus NRRL 1] gi|119402003|gb|EAW12425.1| benzoate 4-monooxygenase cytochrome P450 [Aspergillus clavatus NRRL 1]
  misc_feature (18)..(487): NCBI GI: 255931847 Blast Desc: Pc12g06380 [Penicillium chrysogenum Wisconsin 54-1255] gi|211582099|emb|CAP80265.1| Pc12g06380 [Penicillium chrysogenum Wisconsin 54-1255]
  misc_feature (1)..(487): NCBI GI: 119481647 Blast Desc: benzoate 4-monooxygenase cytochrome P450 [Neosartorya fischeri NRRL 181] gi|119409006|gb|EAW18955.1| benzoate 4-monooxygenase cytochrome P450 [Neosartorya fischeri NRRL 181]
  misc_feature (34)..(464): SWISSPROT Homolog: EC 1.14.13.12 Benzoate 4-monooxygenase
  misc_feature: Useful for introducing or modulating the production of volatile compounds
MGRPTLLLTVLIGISLTFLYCLWAVVYRTWFHPLAKYPGPRLAAVSEFWYIWKWTSSRYPFAMEEAHRKYGDVVRIAPNELSFATVQASRDIYGKPSHSTKQFLKADFYKIPGIEEAIVNARNPAQHARQRKYLANGFSAKSLRDQEVVIHEYVDLLVHQLGRLGRPEGPGVDIGEAFQWLAFDVIGDLAFGESFGAVADGEKGFWVSLLFDASYVMVLGNLWHRFPLAVLAIPFFLPKGAFGKFKTHDALTDEKMKRRVKMSDSLRRDDFFSHLLRKGDSAVPHSELKSQASVLILGGSETTATALSAAVYFLLQHPQTYQKLCEEIRSRFTYKSEITAEAVAELKYLQAVIDETLRLFPPVAFGLPRTSPGAMVDGDYIPAGVTVHVCNWMTTRSERYWKEPMSFIPERWMGEDLGDIKEASQPFSLGVRVCMGVNLAYMEMRLALSKMIFAYDWELVDKSPKLFDESKLYVIWQKPDLRVRFSSRKDHQF

SEQ ID NO: 5048 - DNA, 7538 bp, Muscodor strobelii
  misc_feature: SGI EST ID NO. CUFF.12760.0
  misc_feature: Variant of the nucleotide sequence at SEQ ID NO 5046
gcaaccttttctttttctcgtatctgtatatacataagagctgaactcctaacagtcagttcattttgtctatttatctgtcttttcaactatcggaccgtaggcagtgagactcaccgattattgaacggcgtgaacgctatatcaccaatttctttcctgctgcgtgcgcttgcgcggggcgcatagattgaggaaacgcatacgaacgaaaccatgggtcgaccaaccctcttactcactgtgctaataggcatatcattgacattcctatactgtctttgggcagttgtgtacaggacctggttccatccattggcaaaatatcccggtccacgactagccgcggtatcagagttctggtacatttggaaatggacatcatcgcgatatcccttcgcaatggaagaagcgcatcgcaaatacggcgatgtagtaagaatagcgccaaacgagctctcgttcgcgaccgtgcaagcctcaagggatatatatggcaagccatcgcatagtacaaagcaatttctcaaagcagacttctacaaaatcccgggaattgaggaagccatagtgaatgcgagaaaccctgcccagcacgcgcgacaacggaagtatctcgcaaatggtttcagtgctaaatctctccgtgaccaagaagttgtgattcacgagtatgttgacttgctcgttcatcagcttggtagacttggacgccctgagggtccaggggttgatattggagaggcttttcagtggttggcttttgatgttataggcgatctggcattcggcgagtccttcggagcagtagccgatggggagaaggggttttgggtctcccttctattcgatgcatcctacgtaatggtactaggaaatttatggcatcggttcccactcgccgttctcgctataccatttttcctgcctaagggagccttcggcaaattcaaaacccacgatgcattgaccgacgaaaagatgaaaagacgagtaaagatgagcgattcactccgacgagacgacttcttctctcatctactgcgaaaaggcgatagcgcagtgccgcacagcgaattaaagagccaggcttcggttttgatcctcggtggttcggaaaccactgccactgctctctctgctgcggtgtatttcctcctccagcatccgcagacgtaccagaaactctgcgaggagatacgctcgagatttacgtacaagagtgaaatcaccgctgaggcggtggctgagctgaagtatctccaagctgtgatcgacgaaacacttcggctattccctcccgtcgccttcggactcccgcgcacgagtccaggtgcgatggtggatggtgattacataccggccggtgtcacagtgcacgtctgtaactggatgactacgcgttctgagcgctactggaaggaacccatgtctttcattcccgaacgatggatgggtgaagatcttggcgatatcaaagaagccagtcaaccgttttcattgggagtgcgcgtttgcatgggggtcaatttggcttatatggaaatgagacttgctctatccaagatgatttttgcttacgattgggaactggtcgataaaagccccaaactctttgacgagtccaaattgtacgttatatggcagaagccagatttgcgtgtgcgtttctcttctcggaaggatcatcagttttgaagaagtcgctggtatattgcgcacagtggaattcggatccataaggtcagtaagaagccagtattagagtctgaaacgaccattggtctcgttaatgctgaatgagcttttacacatgaggccagctagacgatacagatccagaatgcgatatatcagtgtgacggtcatttcgataatagtggctgatgcttagacataatctgaacaattagttcggaacaaagtcataaacatcagatctctacgtccgagttactaactagatgatggagatccagaactcgactcaggccaagttcccgcgtgaagcgggaaatgacaaagattacatgggaattgccgactcacagagtgcaagtgaaagggtcacttcaaatcatcattcattcctcatttcttaagttcctggccaagccccctacatcagcacttcatctccctgggattctaaccactcttccccttagcaacatcgtcatccactttcggcctaccaggaatctctacacctagaacctcatacctaaccccaatatacgcatcactacagaccaatacatcaaccttcctccccccttccacttccggcaacttgacaacagtctttgccgttggtctactgcccacctgaacgcccttcgtcgggcccgcaccccatcccaccctcttaacggcaataatctcatccctcgccttatcacaaaccaccacaaaccagccctcactctgcggtttcgggtatctaggcgcgtagatcctaccatcccgctccgtgacaggattcatcctcttgagactaacagtcaattcctcatacttgatgttctccgtgcccacaaccacgttcgggatgcgcgacagagctttcacaaacttcccttgttgtgtgggatgcacgcccagcttcttcgcgaggccttctttctgctgttgtgtccacgtactgagcttctgcagcgctgtagtatctttcagtgactccttaggaacactaggaaagatggacagcggtgagtcttcgggccagcgggcggactttatgcattgaaggagagtgatcatttgaagacaagatgatagatagccaagttcggtgaggacatcgatagaggcttgtatgatacgaattgcttggtctagcacacttgtttgatcaccgacgtaatctgtgattgggaggtcgatgcgcgccatgtgtgcttggagaaggaggaaggctttgacgtgcggatcccacattggaagaccgaaagagtcgcctgagaaaggtaggttattggacaactcgatgttgatgaggtcttcattatgccgcacgggcagctcgtcgtactcgattgcgcttgacatccaggagagcacgtcacggaatgcagcgttaggcttgacatgctccacgaggtgtcggattgtcttgtgagatagatagtagtaactcatgatcttacccagtggtgttgggtcaacatcgccgttaggatatacctcgacacactttgataatgctaactcgtctaaggaatgattgaccatatcaatcatgaaatcgttagcgagctgttgcgcagcgatactgttatgttcttcggcagatatttcgagcccgtaatacgatggattcttgtgcaagcgtctgaagaagaatgtccacgtcaagtagtctaacgcatcctgcttggtaatgacggtctcggcagacacttcggcacacaagtgattatcgagcacagtgtggagagatgactctactggaaaaccagtgtgtaagaagtgcttgtagaagtccttcttcgcatcttgggtgaagatacgtgccacacctgaattgtcgaactgcggccgccctgctcgaccaagcatctgcaagacatccgttaggtccatgtccttatatccttcgattttggcgtcatagaactgtgtccctttgacgacgactaaatgggcgggcaagttgacaccccaagctagggtacttgttgcgaccaaaatctgaatcttgttgttcaggaataattcttcggccaactgcctatccgattcaactaaacctgcatgatgaagccctatgccaaaacttactgcctctttcaacgcatcatcctttactcttgttaggttgagctgaaggtcttcctctgacatatgaacaaaccgcctagggttatcctccatgccgcagaagtttatgagatctttggcagtcagccgggtctgacgtcgcgaaggaacgaagatgatcacaggcttgtcgggactgtgcgtcttgatcgccgagaatgttggccggttcatggattgcatcaagggacagaagcccctgacttctggaaacccgtcgatgtacagctccaatggtacaggacgtactgaatgccgaaagttgaaaagaccttctttgacaccaagccaattagccagatctgtcgcattagcacaggcagttgacatgcctaaaagtctgacagaggtcttggttgactcggcaatgtagttcatacgcgatacgatgatctctagaatgggaccacggtctccagcaagaagatggatctcatcaatgatcacaagtgaaacttgtcgaacatagcctctggtctgccaactacgagagataccgtcccacttctcaggggttgtgatgatgacatcagcatccttgatagtcttagtatcaggagtattatcaccagtcaactctactagtttgagacccaaaggtcccgaaagcctagcaccccaatctttaactctctcacggacaagagccttcatgggtgcaatgtatacaaccttggatcctggtcgttctctaaaagcccaccacattgccaactctgcagcaactgtcttgccactaccagtcggagatccaagtagtacgttggcggatgtgtggtataaagtgtggaatatttgagtctgcatagggttaaagaactggaatctcttcgcatatacctcctccaggcctgggttctttaaggcggtgatgggaaggggctgtaggttgagtaggtcggtatagacgctctcggtgtcagggcgaatgagatgctggaaagaaacaggggtaaccgtttccgctccaagccacttatctgagactgcccttacataaatttggttgggaagaggatccgacaatggaatggtgaagttgagttcatggtcgtcgtagagctttctcctgttaaggataaagaactcatgatgatagatctctgaggtttcagagttctcgacccagatgtagaaagactccgatgttccatgcatcgggtcaaaccatctgaagtcaggtgtgataaataatttgatacgtaatacgtctctattgagcggagcaatctcagcctcgaccgataccgtgggaaagttatcgataatctttgcgattttctttccggcactgtgattatggactagaccgccaatttcggctggttccatatctcgaagtgtctcgatactaagatggtccttcgagtcgagttgatccagaacaggcttggcaacgtcgaattggtggagcggatgctgaaagggccattgccgtttctcaatcgacttcgctaatgtcagtaagacgaggcactgatggccccagcgccgattcaacgcgatcataaaaagagcgcgacatatacgagccgattgctgtgcaacataattgagatcgtttgtcaaagcaaaatcctcgtactgtgcacgtgagatgtacgattgaagaagaatattcgtcttggtctgaggtgtgtcgatcccaccaggaacagcgcagggaataatatcgtgtcgcattttgctcaattctttttcctcgctgtctctggattggatgttgtcgaactctccactcatgctgatcatgtgaagtacatccgcctccgtagcttgtggcttcatcatcttattgaaaatttcgacagttgattgttgaatatagtattggctggcaatccgcccgacatccttgctcttgagctcctcagtcacttcgttgaaaataatcatttgactctgctgtagtgtacgagctgcctgtattgctagttgccgtctcctttggacgagctgcggatcatcccgaatctcagcccactcaatgccataagtcataggacttcttctcatgcgcacaaacagatatgagtatccaatccactgtacggcgtcggggatggataggacggtgcccagtgagatttctgcattcaggttatcgactagcttcgatgagaattttgattcaatgggttgctgatccgtcacagccgacaaataatgaggtagcttatctgccgttgtgcaaatcataccaatacccgtgtcttcaaattggggtcgacctgcgcgaccaaaaatttgaagcacgtcgagaatgccaagatcgacaaactttccgtcctgagcgctgtatacttgggttcctttgatcactaccgcggcggctggcaggttaacaccccatgcgagagtcgcagtacagcacaagactttgatgacaccctcggcgaagagtcgctccataaggtttctgtccgaccgagtcataccagcgtgatgtatacccagacctttgggtacgaggtctcttagatcgcgtgcctttgactgtttcatgtcccggacagcttgttcataacgaggatgtcccgatggatcgaataagtccacacacacttggtcaactgccttttgatagagcatttttgcggtgagaagagtatctcttctggaatgaacaaagaccatgacttggtggtccagctccaacatctctcttactttctcgaacgctactgtatccagattctccttcgactgcttcgttcctgcctttcctttcactccaataaagtgctgctcaagaggaacaggtcggaaggaagagtcgaagtaaaacaaaccagtgtatcggttcaccttgaggaagtccgcaacgtcgatatagttcggtagtgtagcgctgagtcctacaatgcgaatcattgactgtgtgctttcgacctgtcgttctgttcgggccaccagtgactctaacacagcgccacgctcgtcgtgtagcatatggacttcatcgataatgagtagacggactttctgcacgagttcagtatctcctgtgccctttcgcgtaataacatcccatttctcaggggtagtgacgatgatctgtgtttgtacgacttcggatttggtgagatgcatatcgcctgtgtattctcggcaacgaactccaagccatgccaggcgcttgcccaggttctcggtaatttcggcggcgagcgccttcatgggggcaacgtagacgattttgaagtcttcgagctcggcggcaaaatctgtagcttccatgttctcgatgggattgggagttaggtattggccaatggtctgcaaaatagtcaacatagctgcatcggtcttacccgcacccgtgggagcgcagatcagcatgttctcattgctcttgtaggcgaccggatagaccaagctttgcattcggttgagggttttatagcctttgaatgttcgacgacataggccgtccaagtcactgatgttgacaaacttgtgtccgggccacagagtgccagccttgccagcaggaacgaagtattcttcgtatttctcgaactgcctcctttcgcttccaacgggcagtccgtactttttcccagaatggctcagagtgttcccagcgctatgttttttgtacacatgagggtactcaacttctttatgcatactgggggcgagagtggcatttttatgctcaaagtctctttgcctgaggatctcctctcgctctgctcggttcaagatccaac

SEQ ID NO: 5049 - DNA, 1680 bp, Muscodor strobelii
  misc_feature: SGI cDNA ID NO. 561391
  misc_feature: Encodes the peptide sequence at SEQ ID NO 5050
atggccactgctattgccacaacagagctgcaatgccccgccgagtattgcatgacacagctgccaagtagaacagatgacgatgcggagaatccgagcagagatgctgcgctccaaacgacagaaaacatcatagtcgagcatgacttgtccgttcaacaggagtacccaaccggtgtcaaactctggctgatcatagtcactgtgggcgctgtgctcattctcggcagcatagaccagaacatcgtcgctacggcggtgcccagcatcaccgaccatttccatacagttgccgatgttgcttggtactcgtctgctttcagactcacgagttgtgcttttcaatttatcttcggcaaggcctatacgctcttctccactaagcgtgtttacttgctcgcgaatgctatcacgattgccggctcactgctctgtgcgacggcgagcacttcgacgattctcgtcataggaagggctgtggctggattgggtgctgctgggtcgttctcgggttgttgggtgatcatcgtgcagtcaatcccactgcgccggcgaccactgctcgtcggcgtcttgagtgggattgacggcctggcaactctcatcgcgcctattctggggggtgttttgactcaatcgcttggatggcggtggtgcttctatatcgctgtgcccatcggagccgtcacattcgttctgactatgtgttgtctatcggagatcccgaagccaagcgatgttgttcgaatgacattcgtacaaaagattctacatctcgatctcctcagtaatctccttttcttaccagcattgacgagtttatttcttgcgttctcatgggccggcaccaagtatccctggaatagcggaaaagtcattggccctttggtcacctttgccgttctcctagcagcatttgtctataaccaatttcgacgaggtgacaccgctgctcttccacctcgtattatcaagcgtcgaactgtcatcgcaggtttcatcttcatcatgtgtacgaacagtacagcaaatgtgctcgaatactacttaccaacatactaccaaacagttcgcggatactccccagccagaagcggttacatgatgttccctatcatcgtgggagcgacgatcgggtctttcattcacggcgcagggacgagcgcttttggctattacgcgccgttcatgcttgtgggttcgattttgatgccaatcggcgcagggctcgttacgacgttcaaaatagacaccaaacttgcacaacttgtcttctatactggtctgtctggtctagcctacgggattggcttcacggggccatcaaatgcagtacaaaccgtgttgcctgctgatgacgtttcactagggcttgctgtcattttgttcgcccaatcttttggtccagctgtcgccatcgcagtagcacaagttcttttcacgaatcagctttcagccaaccttgatggtcttgtaccgggtctgagtccggcgagcattgaaaatagcagcttgtcagagatcatcgcaagcgtacctcaagcgcaggctgtagatgtccttgtgaggatcgacaaaagcctctctcagacttggtacctggttgttgggctggcgggcgctacaattataggaagctcgcttatcgagtggcgatctgtgaagtcgaagagggcctag

SEQ ID NO: 5050 - protein, 559 aa, Muscodor strobelii
  misc_feature: SGI Peptide ID NO. 561391
  misc_feature (69)..(473): Pfam Id: PF07690 Pfam Desc: Major Facilitator Superfamily
  misc_feature (3)..(558): NCBI GI: 145231898 Blast Desc: An02g02780 [Aspergillus niger] gi|134056327|emb|CAK47562.1| protein product [Aspergillus niger]
  misc_feature (23)..(557): NCBI GI: 46139751 Blast Desc: FG11390.1 [Gibberella zeae PH-1]
  misc_feature (19)..(558): NCBI GI: 242763997 Blast Desc: efflux pump antibiotic resistance protein, [Talaromyces stipitatus ATCC 10500] gi|218723881|gb|EED23298.1| efflux pump antibiotic resistance protein, [Talaromyces ATCC
  misc_feature (30)..(559): NCBI GI: 169762396 Blast Desc: [Aspergillus oryzae RIB40] gi|83770126|dbj|BAE60259.1| protein product [Aspergillus oryzae]
  misc_feature (30)..(559): NCBI GI: 238488169 Blast Desc: efflux pump antibiotic resistance protein, [Aspergillus flavus NRRL3357] gi|220697710|gb|EED54050.1| efflux pump antibiotic resistance protein, [Aspergillus flavus NRRL3357]
  misc_feature (39)..(559): NCBI GI: 242786957 Blast Desc: efflux pump antibiotic resistance protein, [Talaromyces stipitatus ATCC 10500] gi|218721054|gb|EED20473.1| efflux pump antibiotic resistance protein, [Talaromyces ATCC
  misc_feature (55)..(559): NCBI GI: 212544081 Blast Desc: conserved [Penicillium marneffei ATCC 18224] gi|210067102|gb|EEA21195.1| conserved [Penicillium marneffei ATCC 18224]
  misc_feature (4)..(559): NCBI GI: 115385793 Blast Desc: conserved [Aspergillus terreus NIH2624] gi|114187890|gb|EAU29590.1| conserved [Aspergillus terreus NIH2624]
  misc_feature (55)..(558): NCBI GI: 169762414 Blast Desc: [Aspergillus oryzae RIB40] gi|83770135|dbj|BAE60268.1| protein product [Aspergillus oryzae]
  misc_feature (7)..(559): NCBI GI: 67515473 Blast Desc: AN0018.2 [Aspergillus nidulans FGSC A4] gi|40746181|gb|EAA65337.1| AN0018.2 [Aspergillus nidulans FGSC A4]
MATAIATTELQCPAEYCMTQLPSRTDDDAENPSRDAALQTTENIIVEHDLSVQQEYPTGVKLWLIIVTVGAVLILGSIDQNIVATAVPSITDHFHTVADVAWYSSAFRLTSCAFQFIFGKAYTLFSTKRVYLLANAITIAGSLLCATASTSTILVIGRAVAGLGAAGSFSGCWVIIVQSIPLRRRPLLVGVLSGIDGLATLIAPILGGVLTQSLGWRWCFYIAVPIGAVTFVLTMCCLSEIPKPSDVVRMTFVQKILHLDLLSNLLFLPALTSLFLAFSWAGTKYPWNSGKVIGPLVTFAVLLAAFVYNQFRRGDTAALPPRIIKRRTVIAGFIFIMCTNSTANVLEYYLPTYYQTVRGYSPARSGYMMFPIIVGATIGSFIHGAGTSAFGYYAPFMLVGSILMPIGAGLVTTFKIDTKLAQLVFYTGLSGLAYGIGFTGPSNAVQTVLPADDVSLGLAVILFAQSFGPAVAIAVAQVLFTNQLSANLDGLVPGLSPASIENSSLSEIIASVPQAQAVDVLVRIDKSLSQTWYLVVGLAGATIIGSSLIEWRSVKSKRA

SEQ ID NO: 5051 - DNA, 2217 bp, Muscodor strobelii
  misc_feature: SGI EST ID NO. CUFF.12741.0
  misc_feature: Variant of the nucleotide sequence at SEQ ID NO 5049
gcctcgatgaatgcagcaatactaacatgactactatgcggccgttgtgattgatgcgaaatgcatcgcgacctggccagcggtggacaggaagcctgaagtcctggttgagatcatttttcccgcttccatcgggtttggatgacgtctgagcatcttttccgatatggcaatatgccgaaaccgaatggaaatcatcacgctccgatcgcacctaggtagtttgaggggacatgttgtactatataagtcgtcaatgcctaaaatgatcgctgttttctctgtcttatctaaaggttaggagtacggttacatctcgtcataaagtatggccactgctattgccacaacagagctgcaatgccccgccgagtattgcatgacacagctgccaagtagaacagatgacgatgcggagaatccgagcagagatgctgcgctccaaacgacagaaaacatcatagtcgagcatgacttgtccgttcaacaggagtacccaaccggtgtcaaactctggctgatcatagtcactgtgggcgctgtgctcattctcggcagcatagaccagaacatcgtcgctacggcggtgcccagcatcaccgaccatttccatacagttgccgatgttgcttggtactcgtctgctttcagactcacgagttgtgcttttcaatttatcttcggcaaggcctatacgctcttctccactaagcgtgtttacttgctcgcgaatgctatcacgattgccggctcactgctctgtgcgacggcgagcacttcgacgattctcgtcataggaagggctgtggctggattgggtgctgctgggtcgttctcgggttgttgggtgatcatcgtgcagtcaatcccactgcgccggcgaccactgctcgtcggcgtcttgagtgggattgacggcctggcaactctcatcgcgcctattctggggggtgttttgactcaatcgcttggatggcggtggtgcttctatatcgctgtgcccatcggagccgtcacattcgttctgactatgtgttgtctatcggagatcccgaagccaagcgatgttgttcgaatgacattcgtacaaaagattctacatctcgatctcctcagtaatctccttttcttaccagcattgacgagtttatttcttgcgttctcatgggccggcaccaagtatccctggaatagcggaaaagtcattggccctttggtcacctttgccgttctcctagcagcatttgtctataaccaatttcgacgaggtgacaccgctgctcttccacctcgtattatcaagcgtcgaactgtcatcgcaggtttcatcttcatcatgtgtacgaacagtacagcaaatgtgctcgaatactacttaccaacatactaccaaacagttcgcggatactccccagccagaagcggttacatgatgttccctatcatcgtgggagcgacgatcgggtctttcattcacggcgcagggacgagcgcttttggctattacgcgccgttcatgcttgtgggttcgattttgatgccaatcggcgcagggctcgttacgacgttcaaaatagacaccaaacttgcacaacttgtcttctatactggtctgtctggtctagcctacgggattggcttcacggggccatcaaatgcagtacaaaccgtgttgcctgctgatgacgtttcactagggcttgctgtcattttgttcgcccaatcttttggtccagctgtcgccatcgcagtagcacaagttcttttcacgaatcagctttcagccaaccttgatggtcttgtaccgggtctgagtccggcgagcattgaaaatagcagcttgtcagagatcatcgcaagcgtacctcaagcgcaggctgtagatgtccttgtgaggatcgacaaaagcctctctcagacttggtacctggttgttgggctggcgggcgctacaattataggaagctcgcttatcgagtggcgatctgtgaagtcgaagagggcctaggaatggggaatcgggtcctgagctgggattggtggcctagcagtatgatcgagctctccgcgataccattgtctttgcttgatagtcttgtctgcaattgtatcatgttcctcagggcttgcgtatcggtttataatagcataagccttgattatgagctgaatatgctcagtagtcacctctctacacgaagtcaaaaagcagctcct

SEQ ID NO: 5052 - DNA, 4536 bp, Muscodor strobelii
  misc_feature: SGI cDNA ID NO. 561392
  misc_feature: Encodes the peptide sequence at SEQ ID NO 5053
atggatcccgtgacagccttaggagcagctggctctgtagtaggaattgctggcttcggcatccagctcagtcagattctcaccaagtacgtggatcgctttctgtccgctcaggagagtcttcagaagattgtggatgagatcgaatcgacgtcgcacgctttgaaagaggtatatctactcattcgagaggaactggacaattttgaaactggaagaccattgcgtctcttcacggaaacatccttattgaacgtcaaacaaaccgccgatcaatgtctcgtcatcttttggcgcattgaagctacaatcgagtcgaccatcaccggtgacagctctgcgaatacgaaggaaaaactagtcaaaaagctgaacgatttcaacaaactcaattcgtacacatcgaattttcctatcgctattgaattgcggcctatatcgaaagctctcgacagtcggcaaagggcccgatggacgagaagtgtttcgaagatagaggattactgcgagcaactacgacgagtcaaaatcaacttgacgctgacttttcaagtcataagtcttggacaacagcgctctcaatcaacaccaactgttgaggatttccacctgatggtgaagacttacgctgttattagccaaatcgcaactgaagacgaactcagagctattgcgaatcaggcccagaggcaaagccaagcgctgcacggcaaggcagaacgtccagtcaaaccatcaaagccgattcaatcgccatctcggttcgcgaagagtatgcagaacggaaaacttgccgcacatcaggaacctctgcaacggcccaacgcagctcggtctgcgacaaaacaacttcggacagttactatgccatttctggctcctctaagcaaccaatcgaaccgtgagcctaccatcgatgaccacgataatggacagcatataaatacaagccctcagcctgaccctgcattattgtctcaggttcaaacgcctttgactaacgggcgatctaaacccgtgaacggacttcgtccccagcgtgacggcgacgctcttaatggagaggccaaggagaatctcgaaaatgcaacaaatcgtggcattaataagtcatcgaatggcgtacaccctcaagccggatttaataatgtagtacaacaagttcataacagagaacaaccgcctcctcagccaacatccagagatcctgcacgcgacgagggcgaatctcgcgaaaaagccggagagaagagcatctcagacaagacagacaccaaaactcccagggttgatcatctcgttacagatgctccgaacggaaacaaaggaattcatgttgtgccttatataataagcgatcaaggtgcatatccgctgccgatctcattaggatcggaactgaagagtaatcttcaagggggtcttcaacttgggcaagcaggaaagagactatcgaagaaactcgcattcttaagttcggaacaatttcaaacagtgcaaactgtattgcagcagatgccaggcgatgatgctgggaagctagcccacctcgaattggtgaaaaagcgaagcatgaaattctggcagaaatcacaaaaggtccctattgcgttcgtagagaaggatacaggcactgtgccaaagagtggctcggctgtacttgaagaatcgactgatactggagctagacctataaatacgcggcaagagcaaaatcttgtcagtgatctctcgaaccagaacgctgcgctgaagagaatcccggagacagaaccccaggtacctggggcagatgatccatcgactcctgcggtgatggacaaccatcttttattgccattgggtcgtcatcgacggaatattgtcagccatatccaaacaaccacgccaattcctcatggtgttgaaataccggggttccagaattttaagcatctgcttgtcaacgaaagagaatggagggaaagattcaccgagtatagggtttggactattcgaccattgcacagcacccaatcgcagacccttcctgatgaatgggaccgatgcatgctatcagaagagttcattgatgttacacaaatcagacttcatatcgccgctctagacaagcatgcgaccacaatacttgagaagctggcagccctaacgatcagtcagcaaatccaagtcatgcgatctgtggaggccgcaaagatgggagatgcgcggctcaataaccaatggaaactcagacagcttaaagttctgcgagcgagacgacttttcaaagaaaaacaagtcaaagctattacggtctacgcttataaagaaccacctgctcaagcattcgaaccagcaaaagaaccacctaaaaatgcatcaccatcgtcgactacggcaaagtcgaggaaaaaggaacagaccaggcatagggtgggaataaatgaaagtgaaagtgaaagtggaagtgaaagtagtgcttcaaccgccactacaactagaattaacataagagtaaacggcgaccaaaacaggccaaaccgggcaaattaccgttatgattatgagaatcgttacgatccttatgagtctgaagaagaaactgtgcgaagctcaagaattcaccgcgcaaatgaagctatatccagacgtactccggtcccaccgccgccatcgcgatactctaaaaatgctatgcctccgccgcctcctcgtccggtcgctataccaccatcatattcagccaggaccgcgcgctcagcgaacactgttcagccaacagtagtgattaacaaccgagttgcatatgatagtgacgattcagatggagaaaacaggcatgactattcgagtgaaagcgagcttgatattcgtgttcgaaggagatcggagagaaagtcaccttcgcctcacggacgcacgcgcatctactacgtttcaccggagagagatcgagagaccacacgcgggagaggggatcaagttgtactccgagacaaaaccaggcaatatcgtgataaatcgcctccagatatttcacctccagatcatggtcatcgccgtgatgacagcacgaatgaggttgtcgggggccgggagatctttcatcgtatgcgccgggtgaatgtagaacctcgtgatagggatgctgatccttcttctgaccctcgccataatggacgatcacgccgttcaagaagcccatccatatcagaggaacgcggcaattttttacgttactataatgcagatgaactgagagggagagcgagaaagagattcgggtatcctgtcgacttcgaccgtcagccacacgatccccaggcttcaacagatgattttaatgaagctgtgagtcgcagcctagaagccgtcgaacaacttctcattgaatggactcctcaacacgaaccgacaaagcacgacgacgacaacgatgaagacatttcggccagtgctgagcatccacgcagatcaatgcctaacaggcctgacactggtacccaatggcctgatactgtgcccacgggaatatcagatcttgactttgcatcagtgaaccatgagcatgcgtcggcggaggcaatccgggacgaagatctatctctcccggatgcaccagagaacagagaagctcaacccgtacccgtttcccaaccaacggcagacagcaaatctgagaagaccctcataaatcatgaccaagaaagccaagctcctgacaaacacgccattggcgcaaacggcgtaccatctaacccgtatgctgcgaacaacccacctttccggcctcctcagcgcagggaaacaacagatggcaacaatctatcagagcgacaacccccgcgtgcaaacacttttcccattaacaacacagacgacattggaatccgcatgttcaactcaacccaacgcgtctcaaccatgcccacaccaaatcgacaagcatggacgggtatagagtgggcacgacaaattgttgaagacacggcttcaatagctgttgacgacaatgacgaagaagaagacgctatgatccccgagccaccacggccaaatcgcagtccagattggcatgataacatcacgaggagagaccgagacacggactatcgctccacgcgtcgtccacctcttagcacactcaacgatctcaacaggacttcgaacttagaagaagttataacccgccaccctcctcgcagacgtactgttgagtttgaagagcgccctagccggcattcagctccggatagagtgaggactgttgaaaggcgggatcctccggttagatatcgagagcggattatagaacgcgagagagaccgagacagtaatcgcgagagagaccttagggaacgcatcagagaactggaaagagaacgtagggacatccaacgggaacgtgagagagacatcgtagagcttcgacgcgatcgagatattgcaataactcgcgaaagagttctcgaagaactgttcgaaagaaaactcagagaagtcgaacaggatcgagaaattattgctcaaagtcgggcggaacatcgctattga

SEQ ID NO: 5053 - protein, 1511 aa, Muscodor strobelii
  misc_feature: SGI Peptide ID NO. 561392
MDPVTALGAAGSVVGIAGFGIQLSQILTKYVDRFLSAQESLQKIVDEIESTSHALKEVYLLIREELDNFETGRPLRLFTETSLLNVKQTADQCLVIFWRIEATIESTITGDSSANTKEKLVKKLNDFNKLNSYTSNFPIAIELRPISKALDSRQRARWTRSVSKIEDYCEQLRRVKINLTLTFQVISLGQQRSQSTPTVEDFHLMVKTYAVISQIATEDELRAIANQAQRQSQALHGKAERPVKPSKPIQSPSRFAKSMQNGKLAAHQEPLQRPNAARSATKQLRTVTMPFLAPLSNQSNREPTIDDHDNGQHINTSPQPDPALLSQVQTPLTNGRSKPVNGLRPQRDGDALNGEAKENLENATNRGINKSSNGVHPQAGFNNVVQQVHNREQPPPQPTSRDPARDEGESREKAGEKSISDKTDTKTPRVDHLVTDAPNGNKGIHVVPYIISDQGAYPLPISLGSELKSNLQGGLQLGQAGKRLSKKLAFLSSEQFQTVQTVLQQMPGDDAGKLAHLELVKKRSMKFWQKSQKVPIAFVEKDTGTVPKSGSAVLEESTDTGARPINTRQEQNLVSDLSNQNAALKRIPETEPQVPGADDPSTPAVMDNHLLLPLGRHRRNIVSHIQTTTPIPHGVEIPGFQNFKHLLVNEREWRERFTEYRVWTIRPLHSTQSQTLPDEWDRCMLSEEFIDVTQIRLHIAALDKHATTILEKLAALTISQQIQVMRSVEAAKMGDARLNNQWKLRQLKVLRARRLFKEKQVKAITVYAYKEPPAQAFEPAKEPPKNASPSSTTAKSRKKEQTRHRVGINESESESGSESSASTATTTRINIRVNGDQNRPNRANYRYDYENRYDPYESEEETVRSSRIHRANEAISRRTPVPPPPSRYSKNAMPPPPPRPVAIPPSYSARTARSANTVQPTVVINNRVAYDSDDSDGENRHDYSSESELDIRVRRRSERKSPSPHGRTRIYYVSPERDRETTRGRGDQVVLRDKTRQYRDKSPPDISPPDHGHRRDDSTNEVVGGREIFHRMRRVNVEPRDRDADPSSDPRHNGRSRRSRSPSISEERGNFLRYYNADELRGRARKRFGYPVDFDRQPHDPQASTDDFNEAVSRSLEAVEQLLIEWTPQHEPTKHDDDNDEDISASAEHPRRSMPNRPDTGTQWPDTVPTGISDLDFASVNHEHASAEAIRDEDLSLPDAPENREAQPVPVSQPTADSKSEKTLINHDQESQAPDKHAIGANGVPSNPYAANNPPFRPPQRRETTDGNNLSERQPPRANTFPINNTDDIGIRMFNSTQRVSTMPTPNRQAWTGIEWARQIVEDTASIAVDDNDEEEDAMIPEPPRPNRSPDWHDNITRRDRDTDYRSTRRPPLSTLNDLNRTSNLEEVITRHPPRRRTVEFEERPSRHSAPDRVRTVERRDPPVRYRERIIERERDRDSNRERDLRERIRELERERRDIQRERERDIVELRRDRDIAITRERVLEELFERKLREVEQDREIIAQSRAEHRY

SEQ ID NO: 5054 - DNA, 5429 bp, Muscodor strobelii
  misc_feature: SGI EST ID NO. CUFF.12753.0
  misc_feature: Variant of the nucleotide sequence at SEQ ID NO 5052
cttcaacagctctgccataatgctttcgacgaggcttgaggctcatcgctaatccctcgatgagcacgatggtttgattcatataacgcgggacatcgaatggatcccgtgacagccttaggagcagctggctctgtagtaggaattgctggcttcggcatccagctcagtcagattctcaccaagtacgtggatcgctttctgtccgctcaggagagtcttcagaagattgtggatgagatcgaatcgacgtcgcacgctttgaaagaggtatatctactcattcgagaggaactggacaattttgaaactggaagaccattgcgtctcttcacggaaacatccttattgaacgtcaaacaaaccgccgatcaatgtctcgtcatcttttggcgcattgaagctacaatcgagtcgaccatcaccggtgacagctctgcgaatacgaaggaaaaactagtcaaaaagctgaacgatttcaacaaactcaattcgtacacatcgaattttcctatcgctattgaattgcggcctatatcgaaagctctcgacagtcggcaaagggcccgatggacgagaagtgtttcgaagatagaggattactgcgagcaactacgacgagtcaaaatcaacttgacgctgacttttcaagtcataagtcttggacaacagcgctctcaatcgtaaatattagacgcctcccaaaagctcgaagctcttcacttataccatacagaacaccaactgttgaggatttccacctgatggtgaagacttacgctgttattagccaaatcgcaactgaagacgaactcagagctattgcgaatcaggcccagaggcaaagccaagcgctgcacggcaaggcagaacgtccagtcaaaccatcaaagccgattcaatcgccatctcggttcgcgaagagtatgcagaacggaaaacttgccgcacatcaggaacctctgcaacggcccaacgcagctcggtctgcgacaaaacaacttcggacagttactatgccatttctggctcctctaagcaaccaatcgaaccgtgagcctaccatcgatgaccacgataatggacagcatataaatacaagccctcagcctgaccctgcattattgtctcaggttcaaacgcctttgactaacgggcgatctaaacccgtgaacggacttcgtccccagcgtgacggcgacgctcttaatggagaggccaaggagaatctcgaaaatgcaacaaatcgtggcattaataagtcatcgaatggcgtacaccctcaagccggatttaataatgtagtacaacaagttcataacagagaacaaccgcctcctcagccaacatccagagatcctgcacgcgacgagggcgaatctcgcgaaaaagccggagagaagagcatctcagacaagacagacaccaaaactcccagggttgatcatctcgttacagatgctccgaacggaaacaaaggaattcatgttgtgccttatataataagcgatcaaggtgcatatccgctgccgatctcattaggatcggaactgaagagtaatcttcaagggggtcttcaacttgggcaagcaggaaagagactatcgaagaaactcgcattcttaagttcggaacaatttcaaacagtgcaaactgtattgcagcagatgccaggcgatgatgctgggaagctagcccacctcgaattggtgaaaaagcgaagcatgaaattctggcagaaatcacaaaaggtccctattgcgttcgtagagaaggatacaggcactgtgccaaagagtggctcggctgtacttgaagaatcgactgatactggagctagacctataaatacgcggcaagagcaaaatcttgtcagtgatctctcgaaccagaacgctgcgctgaagagaatcccggagacagaaccccaggtacctggggcagatgatccatcgactcctgcggtgatggacaaccatcttttattgccattgggtcgtcatcgacggaatattgtcagccatatccaaacaaccacgccaattcctcatggtgttgaaataccggggttccagaattttaagcatctgcttgtcaacgaaagagaatggagggaaagattcaccgagtatagggtttggactattcgaccattgcacagcacccaatcgcagacccttcctgatgaatgggaccgatgcatgctatcagaagagttcattgatgttacacaaatcagacttcatatcgccgctctagacaagcatgcgaccacaatacttgagaagctggcagccctaacgatcagtcagcaaatccaagtcatgcgatctgtggaggccgcaaagatgggagatgcgcggctcaataaccaatggaaactcagacagcttaaagttctgcgagcgagacgacttttcaaagaaaaacaagtcaaagctattacggtctacgcttataaagaaccacctgctcaagcattcgaaccagcaaaagaaccacctaaaaatgcatcaccatcgtcgactacggcaaagtcgaggaaaaaggaacagaccaggcatagggtgggaataaatgaaagtgaaagtgaaagtggaagtgaaagtagtgcttcaaccgccactacaactagaattaacataagagtaaacggcgaccaaaacaggccaaaccgggcaaattaccgttatgattatgagaatcgttacgatccttatgagtctgaagaagaaactgtgcgaagctcaagaattcaccgcgcaaatgaagctatatccagacgtactccggtcccaccgccgccatcgcgatactctaaaaatgctatgcctccgccgcctcctcgtccggtcgctataccaccatcatattcagccaggaccgcgcgctcagcgaacactgttcagccaacagtagtgattaacaaccgagttgcatatgatagtgacgattcagatggagaaaacaggcatgactattcgagtgaaagcgagcttgatattcgtgttcgaaggagatcggagagaaagtcaccttcgcctcacggacgcacgcgcatctactacgtttcaccggagagagatcgagagaccacacgcgggagaggggatcaagttgtactccgagacaaaaccaggcaatatcgtgataaatcgcctccagatatttcacctccagatcatggtcatcgccgtgatgacagcacgaatgaggttgtcgggggccgggagatctttcatcgtatgcgccgggtgaatgtagaacctcgtgatagggatgctgatccttcttctgaccctcgccataatggacgatcacgccgttcaagaagcccatccatatcagaggaacgcggcaattttttacgttactataatgcagatgaactgagagggagagcgagaaagagattcgggtatcctgtcgacttcgaccgtcagccacacgatccccaggcttcaacagatgattttaatgaagctgtgagtcgcagcctagaagccgtcgaacaacttctcattgaatggactcctcaacacgaaccgacaaagcacgacgacgacaacgatgaagacatttcggccagtgctgagcatccacgcagatcaatgcctaacaggcctgacactggtacccaatggcctgatactgtgcccacgggaatatcagatcttgactttgcatcagtgaaccatgagcatgcgtcggcggaggcaatccgggacgaagatctatctctcccggatgcaccagagaacagagaagctcaacccgtacccgtttcccaaccaacggcagacagcaaatctgagaagaccctcataaatcatgaccaagaaagccaagctcctgacaaacacgccattggcgcaaacggcgtaccatctaacccgtatgctgcgaacaacccacctttccggcctcctcagcgcagggaaacaacagatggcaacaatctatcagagcgacaacccccgcgtgcaaacacttttcccattaacaacacagacgacattggaatccgcatgttcaactcaacccaacgcgtctcaaccatgcccacaccaaatcgacaagcatggacgggtatagagtgggcacgacaaattgttgaagacacggcttcaatagctgttgacgacaatgacgaagaagaagacgctatgatccccgagccaccacggccaaatcgcagtccagattggcatgataacatcacgaggagagaccgagacacggactatcgctccacgcgtcgtccacctcttagcacactcaacgatctcaacaggacttcgaacttagaagaagttataacccgccaccctcctcgcagacgtactgttgagtttgaagagcgccctagccggcattcagctccggatagagtgaggactgttgaaaggcgggatcctccggttagatatcgagagcggattatagaacgcgagagagaccgagacagtaatcgcgagagagaccttagggaacgcatcagagaactggaaagagaacgtagggacatccaacgggaacgtgagagagacatcgtagagcttcgacgcgatcgagatattgcaataactcgcgaaagagttctcgaagaactgttcgaaagaaaactcagagaagtcgaacaggatcgagaaattattgctcaaagtcgggcggaacatcgctattgatttcgcctcaacacctggtataaccacgactcgaatacgaggattgaattatatcagtaggaggtagaccgagcgagttaaatcatttgtgatcgagatcgtcgatttgtataatattctggtaattttgtgtcttacgtgcaggtaaatatactgagcgtgatctaatcatgtctatatttcgccttcatgtatttaacgcctctccggataattcatgccgaaatgctactttcatgctgtttgcgattgtgatgtgatattgggatcatctttcaaaacaacacaagtaacagcgcctatactagactaggccaggaaggtcgttcttccacaatataggtctcgagcaataggaataagcccattgcccaccatgccgtccattgtggcgcctcggcctccattgcccttttccctttccggtattgaagcctagcctgtccagtgcaataactcgtgtcgaggataaagggcattgtgcttgtggaggtcttctatcactcactagcaatattgcgaacgatcctcctttgcacagctaattcatatgatatagtcatagaactctcattggttccagattgatgaagaatgcggggaggcaaagggcaaccaacaaaaatgattaggtcgacgcgtgggacgtagacgagcaaggtcagaaataaaggttgtaggagttctatgatcgaaatcatacctgaaagtatcatcgaagagccccatcctcttcacccg

SEQ ID NO: 5055 - DNA, 618 bp, Muscodor strobelii
  misc_feature: SGI cDNA ID NO. 561393
  misc_feature: Encodes the peptide sequence at SEQ ID NO 5056
atgtcgggcaaccgaaactacgacttccttatcaagctgctgcttattggcgactcgggcgtgggcaagtcatgctgtctgctacggttcagtgaagactccttcacgccctccttcatcaccaccatcggcatcgacttcaagatccgcactatcgagctcgacggcaagcgcgtcaagctgcagatctgggacaccgccggccaggagcgattccgcaccatcaccaccgcctattaccgcggggccatgggcatcctcctcgtgtacgacgtcaccgaccagcgctccttcgacaacatccgcacgtggttcgccaacgtagaacagcacgccaccgagggcgtcaacaagatcctcatcggcaacaagtgcgactgggaagagaagcgcgtggtctcaaccgagcagggcgaggccctcgccagagagctcggcatcccctttctcgaggtctctgccaagagcaacatcaacatcgacaaggccttctataacctagcggccgacatcaagaagcgcatcatcgacacctccaagaccgacccctcctcatctcaaaacgtctccgtcggccagggcgccggcagcagtggtggctccggcaagtgctgctag

SEQ ID NO: 5056 - protein, 205 aa, Muscodor strobelii
  misc_feature: SGI Peptide ID NO. 561393
  misc_feature (12)..(126): Pfam Id: PF08477 Pfam Desc: Miro-like protein
  misc_feature (12)..(173): Pfam Id: PF00071 Pfam Desc: Ras family
  misc_feature (1)..(205): NCBI GI: 189204310 Blast Desc: GTP-binding protein SAS1 [Pyrenophora tritici-repentis Pt-1C-BFP] gi|187985589|gb|EDU51077.1| GTP-binding protein SAS1 [Pyrenophora tritici-repentis Pt-1C-BFP]
  misc_feature (1)..(205): NCBI GI: 14475537 Blast Desc: Rab/GTPase [Glomerella lindemuthiana]
  misc_feature (1)..(205): NCBI GI: 46123663 Blast Desc: FG06209.1 [Gibberella zeae PH-1]
  misc_feature (1)..(205): NCBI GI: 88766387 Blast Desc: RAB/GTPase [Metarhizium anisopliae]
  misc_feature (1)..(205): NCBI GI: 258577751 Blast Desc: GTP-binding protein SAS1 [Uncinocarpus reesii 1704] gi|237903323|gb|EEP77724.1| GTP-binding protein SAS1 [Uncinocarpus reesii 1704]
  misc_feature (1)..(205): NCBI GI: 119179533 Blast Desc: conserved [Coccidioides immitis RS] gi|240110137|gb|EER28296.1| Ras family protein [Coccidioides posadasii C735 delta SOWgp]
  misc_feature (1)..(205): NCBI GI: 154294011 Blast Desc: secretion related Rab/GTPase [Botryotinia fuckeliana B05.10] gi|150845084|gb|EDN20277.1| secretion related Rab/GTPase [Botryotinia fuckeliana B05.10]
  misc_feature (1)..(205): NCBI GI: 261188123 Blast Desc: GTP-binding protein SAS1 [Ajellomyces dermatitidis SLH14081] gi|239593353|gb|EEQ75934.1| GTP-binding protein SAS1 [Ajellomyces dermatitidis SLH14081]
  misc_feature (1)..(205): NCBI GI: 239609095 Blast Desc: GTP-binding protein SAS1 [Ajellomyces dermatitidis ER-3]
  misc_feature (4)..(205): NCBI GI: 39975877 Blast Desc: rab GTPase SrgA, [Magnaporthe grisea 70-15] gi|145011565|gb|EDJ96221.1| rab GTPase SrgA, [Magnaporthe grisea 70-15]
  misc_feature (11)..(131): SWISSPROT Homolog: EC 2.7.11.1 Non-specific serine/threonine protein kinase
MSGNRNYDFLIKLLLIGDSGVGKSCCLLRFSEDSFTPSFITTIGIDFKIRTIELDGKRVKLQIWDTAGQERFRTITTAYYRGAMGILLVYDVTDQRSFDNIRTWFANVEQHATEGVNKILIGNKCDWEEKRVVSTEQGEALARELGIPFLEVSAKSNINIDKAFYNLAADIKKRIIDTSKTDPSSSQNVSVGQGAGSSGGSGKCC

SEQ ID NO: 5057 - DNA, 1793 bp, Muscodor strobelii
  misc_feature: SGI EST ID NO. CUFF.13066.0
  misc_feature: Variant of the nucleotide sequence at SEQ ID NO 5055
tgggaagggcgctagtacaaagacagctagacagtgagccgcgcccagggtgcatgtatcacggctgccagaaacagtggacgccatcaatcccgccgaccgcattctgaactgcactgacgacgagcgaccaccacgctgccgacatcatcatccaccgccgccataccacaccttgcaccctgagtcaccgcgaccgccgacgagtgtgacccggagccctgccgctgtgctagtcctacgctcgcctccgaaccacccgcctccatcgccgctgatccctcaacacacctttcgcacaacacacacacgcactcgacgaggccgacgtcctcatccccctcacatcatgtcgggcaaccgaaactacgacttccttgtaggttccgcctcccctattgagtggtgttctgctctccgccatgagatacgccatacgatataccataccatagacaaatcccaaatccctaccattctcccgaccctcgttctcagtatccactcagcgacgactcgaccagccctcttgtctcgcgacatcatcgctatccgcattaccacctgccaagacgtggctgtattcttcctctgttgcccgaacccaactatattccacatcacatgcatctcgagcacccataaacaaaactacagggacatcatggctgactgggtacttgcgaggtacagatcaagctgctgcttattggcgactcgggcgtgggcaagtcatgctgtctgctacggttcagtgaagactccttcacgccctccttcatcaccaccatcggcatcgacttcaagatccgcactatcgagctcgacggcaagcgcgtcaagctgcagatctgggacaccgccggccaggagcgattccgcaccatcaccaccgcctattaccgcggggccatgggcatcctcctcgtgtacgacgtcaccgaccagcgctccttcgacaacatccgcacgtggttcgccaacgtagaacagcacgccaccgagggcgtcaacaagatcctcatcggcaacaagtgcgactgggaagagaagcgcgtggtctcaaccgagcagggcgaggccctcgccagagagctcggcatcccctttctcgaggtctctgccaagagcaacatcaacatcgacaaggccttctataacctagcggccgacatcaagaagcgcatcatcgacacctccaagaccgacccctcctcatctcaaaacgtctccgtcggccagggcgccggcagcagtggtggctccggcaagtgctgctagacccccacgaccctaccgtatatctgaactataaatctggagagaggaggaaatggaccgtctgtttttttgcgaaagagcaagcaatagaatcgataccacgagcacacacggccggtgcccttgatttggtctaagatgcgcgagagggcgaggctcggaggaaagggggttgatactgatacagtggtggagcctaggcactgagcgatagaatatgagctacgcggaggacagagaagaagacagagggtaccaaagtcctttggctctcccgacggaactgtatcatcaatcgatcaacgagacggaggagcctttttgtctgagcggacagagagttgtaggagatggctgcttcgggatagacaggatgaagcatgacgaagagaatagcccgcccctgataggtatgagagagtgaaatagcactgggggctgaattgagtcttccgttggagtttggttcataggtgggttcttttagtattaaatacactgttttttctcct

SEQ ID NO: 5058 - DNA, 1263 bp, Muscodor strobelii
  misc_feature: SGI cDNA ID NO. 561394
  misc_feature: Encodes the peptide sequence at SEQ ID NO 5059
atgaccgaccgtctactcagcaagctcagacgcgatttaggccgagagatcgatgccagccagaagtactcgtttgcaacaccacctgcggaagagcagcctctaccggcagaacctccaccgacgccgacgccacctccccaagacaaccagccatcgctatttgagcaattcttccccgacgaagccaacgccaagaaccagcaggccgcccgtcccgaccaaggcggcgagggtgacgggtcttggagcagctactgggcatctcaattcttcgccgaccagccccctccacgcgtagcccccctcgaggatgctctccacgacacagacgctgcccaggacgatgccgagtatggcgacctgcacaagtacatcctgcgcgccaagagcatgttggagctccacgccgccagcaagcacctgctcctgactgacttcatccgcctaggcgtcgaggccaaggaggtcgaaggctggatcagtggcatcctcaccgtcgtccaagcccgcaaccccgataccctcgagccgcaaggcgtctactggatcctcttcgaccaacccagtgctgcagaagcctacaaggacaagatggagcagctctgggcgctcggcaagacctatctccctggcgcacaccacaaagagtcccacaggacacagcagcacttacccgaacgcacgcgcttcaccgaacaaggcgcagatgtcgccaacctcctcaagggcttcaccctcgtaccacccagcatgacctatcatatcaaggtgcctcaatggagcgcttcaaagatcatggagctggggcaaggcggcatcgtcgaccgcatcgcctcccgcctcaggtccaagttcctcgtcatggtccgtgtagagcgcggcaggctgaccctcgatgccctacgacgcgctatacaggacgatggcgtgcaccggaacctcccctggcgcatcacggatctcgagaggggcattttgccctacggccagagtcttgtgaaagccaacgaggcttatcaacctagcccatataccgcgcctggggaagagccttctccggaagacaccgccaatgaggctgcggagcacgatctgcaagtgagacagtattttcggtttattgtcccgttcatggataatgctgaagccaaccgctttgtgcgtaattggcaccgtcgcgagcttacttggcaaaccagtgggggtggagtggaaaggagggaagagagtaggctactgaatgtatcgctgctctggtga

SEQ ID NO: 5059 - protein, 420 aa, Muscodor strobelii
  misc_feature: SGI Peptide ID NO. 561394
  misc_feature (131)..(420): NCBI GI: 169598686 Blast Desc: SNOG_02148 [Phaeosphaeria nodorum SN15] gi|160704449|gb|EAT90360.2| SNOG_02148 [Phaeosphaeria nodorum SN15]
  misc_feature (129)..(407): NCBI GI: 46123665 Blast Desc: FG06210.1 [Gibberella zeae PH-1]
  misc_feature (132)..(397): NCBI GI: 256726862 Blast Desc: NECHADRAFT_32994 [Nectria haematococca mpVI 77-13-4]
  misc_feature (131)..(319): NCBI GI: 164425118 Blast Desc: NCU06391 [Neurospora crassa OR74A] gi|157070797|gb|EAA32993.2| [Neurospora crassa OR74A]
  misc_feature (131)..(420): NCBI GI: 189204562 Blast Desc: [Pyrenophora tritici-repentis Pt-1C-BFP] gi|187985715|gb|EDU51203.1| [Pyrenophora tritici-repentis Pt-1C-BFP]
  misc_feature (128)..(396): NCBI GI: 119179529 Blast Desc: [Coccidioides immitis RS]
  misc_feature (128)..(396): NCBI GI: 240110135 Blast Desc: CPC735_061670 [Coccidioides posadasii C735 delta SOWgp]
  misc_feature (131)..(393): NCBI GI: 239609094 Blast Desc: conserved [Ajellomyces dermatitidis ER-3]
  misc_feature (130)..(396): NCBI GI: 225555101 Blast Desc: conserved [Ajellomyces capsulatus G186AR]
  misc_feature (129)..(254): NCBI GI: 116196308 Blast Desc: CHGG_04752 [Chaetomium globosum CBS 148.51] gi|88180665|gb|EAQ88133.1| CHGG_04752 [Chaetomium globosum CBS 148.51]
MTDRLLSKLRRDLGREIDASQKYSFATPPAEEQPLPAEPPPTPTPPPQDNQPSLFEQFFPDEANAKNQQAARPDQGGEGDGSWSSYWASQFFADQPPPRVAPLEDALHDTDAAQDDAEYGDLHKYILRAKSMLELHAASKHLLLTDFIRLGVEAKEVEGWISGILTVVQARNPDTLEPQGVYWILFDQPSAAEAYKDKMEQLWALGKTYLPGAHHKESHRTQQHLPERTRFTEQGADVANLLKGFTLVPPSMTYHIKVPQWSASKIMELGQGGIVDRIASRLRSKFLVMVRVERGRLTLDALRRAIQDDGVHRNLPWRITDLERGILPYGQSLVKANEAYQPSPYTAPGEEPSPEDTANEAAEHDLQVRQYFRFIVPFMDNAEANRFVRNWHRRELTWQTSGGGVERREESRLLNVSLLW

SEQ ID NO: 5060 - DNA, 2247 bp, Muscodor strobelii
  misc_feature: SGI EST ID NO. CUFF.12777.0
  misc_feature: Variant of the nucleotide sequence at SEQ ID NO 5058
cgatgaagcacatactcacttccgatgaatatcggttgctatcgaatataatctatgacacccgattgcgtcccagtcattgacgtcagcttgaacacgacaacaattggccaatataaggattccacgaattgacggctcgctccggagaagcgtacctatgttagcagagcacctagccgcaagccaatgaagaattgcagcctcccgtaatgtctgcagtatgagtgtaacgacagtagagctcatggattttattatcagcgcgatgcgttccaggcgaccgcaggcttgaggtgggagacctgaatgttggtttgatgagccctcggtggaagatcactgtgggggagtggactagacgcgctaacaagcatagcccagctgctgagacagctacctcgcagcaaaactaaacattccacctcgactatcccaacatgatgcagagctaaacgatgtctatttgatgctcccctaatgctcgatcgacagctccatcggcctctcttgcgactgatagctgcagaatggcgtgtcgcgacggcggcggcgggcttccacgccgatgccagctctctgcgatccagggctagcaagttgcaatgggcgttgaaagtagcaaagaataaaaaattcgagcgacagcaaagggcaaacgacaggcgcttgcagcaacagcacatccaacaagagatgaccgaccgtctactcagcaagctcagacgcgatttaggccgagagatcgatgccagccagaagtactcgtttgcaacaccacctgcggaagagcagcctctaccggcagaacctccaccgacgccgacgccacctccccaagacaaccagccatcgctatttgagcaattcttccccgacgaagccaacgccaagaaccagcaggccgcccgtcccgaccaaggcggcgagggtgacgggtcttggagcagctactgggcatctcaattcttcgccgaccagccccctccacgcgtagcccccctcgaggatgctctccacgacacagacgctgcccaggacgatgccgagtatggcgacctgcacaagtacatcctgcgcgccaagagcatgttggagctccacgccgccagcaagcacctgctcctgactgacttcatccgcctaggcgtcgaggccaaggaggtcgaaggctggatcagtggcatcctcaccgtcgtccaagcccgcaaccccgataccctcgagccgcaaggcgtctactggatcctcttcgaccaacccagtgctgcagaagcctacaaggacaagatggagcagctctgggcgctcggcaagacctatctccctggcgcacaccacaaagagtcccacaggacacagcagcacttacccgaacgcacgcgcttcaccgaacaaggcgcagatgtcgccaacctcctcaagggcttcaccctcgtaccacccagcatgacctatcatatcaaggtgcctcaatggagcgcttcaaagatcatggagctggggcaaggcggcatcgtcgaccgcatcgcctcccgcctcaggtccaagttcctcgtcatggtccgtgtagagcgcggcaggctgaccctcgatgccctacgacgcgctatacaggacgatggcgtgcaccggaacctcccctggcgcatcacggatctcgagaggggcattttgccctacggccagagtcttgtgaaagccaacgaggcttatcaacctagcccatataccgcgcctggggaagagccttctccggaagacaccgccaatgaggctgcggagcacgatctgcaagtgagacagtattttcggtttattgtcccgttcatggataatgctgaagccaaccgctttgtgcgtaattggcaccgtcgcgagcttacttggcaaaccagtgggggtggagtggaaaggagggaagagagtaggctactgaatgtatcgctgctctggtgagatgagctaggtcgatagtcgaatagatacccaattcacattgttcttttcaatcaatgatcgttgaccatacggatcatgaagtctgcgctgatgcggccgaagagtgggtgactatcctattggagattggttcgccctggctgtcatgatattcactactactatcactacggctcaaaatcttgcagtaaactaacgccaatggttccatggttctcagtctattgtcacttataaaaatctccggaccacatagatatgatgaataggccgatctcaaaaggc

SEQ ID NO: 5061 - DNA, 2145 bp, Muscodor strobelii
  misc_feature: SGI cDNA ID NO. 561395
  misc_feature: Encodes the peptide sequence at SEQ ID NO 5062
atgaaggacgatttcaagatcaggatccagcccacagatatggagggccagaagaacccaacgaggaagaatgcagccaaagtcttgcttcaccggacttgtttcgccccggcacgtttcaccaacggaggtctatgccaagttgaagtccgtggcgtgcggtacgaagccgtcgcttggcaaggcaacgaaaacgtcaatagcaatattgcctctgtcagtcgcgtcttccagggtgttgcaaacttagagctcggcgaaactgttcgcattactccaggcggtggaccagttcgagctgccgagcgcgtggtgctgagacagatcgcttctgaacatggcccactaccaacagctgaagcatctgaattgaggaaaagatggcagattggcctagacatgagattagaaaccgctggatacatcctgccaggatgcacatttgacgacattttgatgaggggtcagatacgctctttcgtggttgattcagtcaacggcagcccgaacagcgttggagtatacgatcccaacgtcactgtcgtagagattgccagtggctctcaagtggacggtatcaaagcgaacgtaagattgggacctttgccagacatgtcagagcagattggggaactgaactctttcctcaaactatatgggtataacatctccgatctgggtgctcccctttactcttgtggcattatcattgatgggagccatgggactggcaaaacactccttatcaatcacattgctgcttcgagatggggtagagtcatacggatcacgcccgacgacaagccgccgatggtaaaagacgtcttcgccactacaattgatcatggagatccaaccataatcctgattgatgagttgacaaaacttatcggcaaaggaaaccccaatagggccgaatatatcagtgcattcgagaaaggtctcgacagcttagcccataaagcgaaagaaaataacatgcgaccaaatgttctggtagttggcacgtgtttagactattatgacaatattccatacgatctccaacggcctgaacgattccacgagcacatccgtttgaccgccccgaatgcaaatggacgaaaggacataattcaatcctgggatacttcgactctgtttgctcatgatatccttcccaatcttgttgaacatacgcatgcattcactggtggcgacctcgtcaatctcctcgcttgtgccgccataccacgacgcgatcgatttgaggagcttgcaacagaatcaaagcttagtgaatttccatttgaatggcgagacttcaaacaggttatcaagaaggtgcgcccctctgccatgaaagacatcgacctaaagcctccaactgtcaactggaccgacattggtggttacgaggatgtaaagagagctctccagcaagcacttcaaacgccaaagggtctatcagaagacctctggataccctccaagggcatcctgctatacggcccacctggttgctccaagaccatgacagcacaggccatggcgaccgaaacaggctataatttcctcgcagtgaaaggcggtgagctcctgaacatgtacgtcggcgagactgagagatcgatccgcaacattttcaagcgagctgcagaagcagcacccagcatcattttcttcgatgaaatcgattcgctcgcaggctcaagatctacaggacaatctggcggtggtggcgtccaggccgtgactacgctactgacagagatggacggtttcgagcaaagaggtgacgttttcgtcctcgcagccaccaatcgacctgattgcgtagatccggccctcatgcgacctggccgttttgacgaaacaatatatgtcccgttgcccgacgtgaaggctcgcgaggctatcatcacgcgcatgacgaagaagctgaacattcctgaaatcgatgttgaggccttgggacagatgacggatggctattcaggtgctgagatatgtggcattctggggggtgcattcaagggcgggaggcaaggcaccaggatggataccctcaaggctgaaatcgcgaaaagaccaaagtctgtgactagcctgacgctgagttacttcgaaaattggcgcaaaacagggctctcgtttactgcgtaa

SEQ ID NO: 5062 - protein, 714 aa, Muscodor strobelii
  misc_feature: SGI Peptide ID NO. 561395
  misc_feature (492)..(676): Pfam Id: PF00004 Pfam Desc: ATPase family associated with various cellular activities (AAA)
  misc_feature (234)..(414): Pfam Id: PF00004 Pfam Desc: ATPase family associated with various cellular activities (AAA)
  misc_feature (492)..(663): Pfam Id: PF00004 Pfam Desc: ATPase family associated with various cellular activities (AAA)
  misc_feature (4)..(713): NCBI GI: 116196310 Blast Desc: CHGG_04753 [Chaetomium globosum CBS 148.51] gi|88180666|gb|EAQ88134.1| CHGG_04753 [Chaetomium globosum CBS 148.51]
  misc_feature (4)..(707): NCBI GI: 171690350 Blast Desc: protein product [Podospora anserina] gi|170945123|emb|CAP71234.1| protein product [Podospora anserina]
  misc_feature (53)..(707): NCBI GI: 46123667 Blast Desc: FG06211.1 [Gibberella zeae PH-1]
  misc_feature (1)..(707): NCBI GI: 145603306 Blast Desc: MGG_13203 [Magnaporthe grisea 70-15] gi|145011563|gb|EDJ96219.1| MGG_13203 [Magnaporthe grisea 70-15]
  misc_feature (53)..(707): NCBI GI: 256727428 Blast Desc: NECHADRAFT_32564 [Nectria haematococca mpVI 77-13-4]
  misc_feature (139)..(707): NCBI GI: 156035707 Blast Desc: SS1G_13057 [Sclerotinia sclerotiorum 1980] gi|154698462|gb|EDN98200.1| SS1G_13057 [Sclerotinia sclerotiorum 1980]
  misc_feature (1)..(708): NCBI GI: 159122098 Blast Desc: AAA family ATPase, [Aspergillus fumigatus A1163]
  misc_feature (23)..(707): NCBI GI: 255935935 Blast Desc: Pc13g05600 [Penicillium chrysogenum Wisconsin 54-1255] gi|211583614|emb|CAP91629.1| Pc13g05600 [Penicillium chrysogenum Wisconsin 54-1255]
  misc_feature (1)..(708): NCBI GI: 70982275 Blast Desc: AAA family ATPase [Aspergillus fumigatus Af293] gi|66844289|gb|EAL84628.1| AAA family ATPase, [Aspergillus fumigatus Af293]
  misc_feature (32)..(706): NCBI GI: 225681355 Blast Desc: cell division cycle protein [Paracoccidioides brasiliensis Pb03]
MKDDFKIRIQPTDMEGQKNPTRKNAAKVLLHRTCFAPARFTNGGLCQVEVRGVRYEAVAWQGNENVNSNIASVSRVFQGVANLELGETVRITPGGGPVRAAERVVLRQIASEHGPLPTAEASELRKRWQIGLDMRLETAGYILPGCTFDDILMRGQIRSFVVDSVNGSPNSVGVYDPNVTVVEIASGSQVDGIKANVRLGPLPDMSEQIGELNSFLKLYGYNISDLGAPLYSCGIIIDGSHGTGKTLLINHIAASRWGRVIRITPDDKPPMVKDVFATTIDHGDPTIILIDELTKLIGKGNPNRAEYISAFEKGLDSLAHKAKENNMRPNVLVVGTCLDYYDNIPYDLQRPERFHEHIRLTAPNANGRKDIIQSWDTSTLFAHDILPNLVEHTHAFTGGDLVNLLACAAIPRRDRFEELATESKLSEFPFEWRDFKQVIKKVRPSAMKDIDLKPPTVNWTDIGGYEDVKRALQQALQTPKGLSEDLWIPSKGILLYGPPGCSKTMTAQAMATETGYNFLAVKGGELLNMYVGETERSIRNIFKRAAEAAPSIIFFDEIDSLAGSRSTGQSGGGGVQAVTTLLTEMDGFEQRGDVFVLAATNRPDCVDPALMRPGRFDETIYVPLPDVKAREAIITRMTKKLNIPEIDVEALGQMTDGYSGAEICGILGGAFKGGRQGTRMDTLKAEIAKRPKSVTSLTLSYFENWRKTGLSFTA

SEQ ID NO: 5063 - DNA, 2788 bp, Muscodor strobelii
  misc_feature: SGI EST ID NO. CUFF.12780.0
  misc_feature: Variant of the nucleotide sequence at SEQ ID NO 5061
agtaagacaagttatgtatccctccgaagagaccctagttattcgagaattgaacatatgtcgacatcattgcaattgatcatccggactataatcagttgtttatgagctctatgattccctcgtttatacactctattgcggcgtggggtctgtgcggctccacttatagggcttccatccaccagttcgctgggcatctacagtgaggagggactaaaggtttttctgtcgtcgaaaacactcagagtcagacatatcagtatacaatgtggcaacacagattcatgaagcgatcggattttttagttcccatattccaaagggagaaaaattgttgtcggcaccgccgtgagcagttgaatcgatagccctgctccaaaattcacagctactgccaaagcggcagatcaagatccagcaagatgaaggacgatttcaagatcaggatccagcccacagatatggagggccagaagaacccaacgaggaagaatgcagccaaagtcttgcttcaccggacttgtttcgccccggcacgtttcaccaacggaggtctatgccaagttgaagtccgtggcgtgcggtacgaagccgtcgcttggcaaggcaacgaaaacgtcaatagcaatattgcctctgtcagtcgcgtcttccagggtgttgcaaacttagagctcggcgaaactgttcgcattactccaggcggtggaccagttcgagctgccgagcgcgtggtgctgagacagatcgcttctgaacatggcccactaccaacagctgaagcatctgaattgaggaaaagatggcagattggcctagacatgagattagaaaccgctggatacatcctgccaggatgcacatttgacgacattttgatgaggggtcagatacgctctttcgtggttgattcagtcaacggcagcccgaacagcgttggagtatacgatcccaacgtcactgtcgtagagattgccagtggctctcaagtggacggtatcaaagcgaacgtaagattgggacctttgccagacatgtcagagcagattggggaactgaactctttcctcaaactatatgggtataacatctccgatctgggtgctcccctttactcttgtggcattatcattgatgggagccatgggactggcaaaacactccttatcaatcacattgctgcttcgagatggggtagagtcatacggatcacgcccgacgacaagccgccgatggtaaaagacgtcttcgccactacaattgatcatggagatccaaccataatcctgattgatgagttgacaaaacttatcggcaaaggaaaccccaatagggccgaatatatcagtgcattcgagaaaggtctcgacagcttagcccataaagcgaaagaaaataacatgcgaccaaatgttctggtagttggcacgtgtttagactattatgacaatattccatacgatctccaacggcctgaacgattccacgagcacatccgtttgaccgccccgaatgcaaatggacgaaaggacataattcaatcctgggatacttcgactctgtttgctcatgatatccttcccaatcttgttgaacatacgcatgcattcactggtggcgacctcgtcaatctcctcgcttgtgccgccataccacgacgcgatcgatttgaggagcttgcaacagaatcaaagcttagtgaatttccatttgaatggcgagacttcaaacaggttatcaagaaggtgcgcccctctgccatgaaagacatcgacctaaagcctccaactgtcaactggaccgacattggtggttacgaggatgtaaagagagctctccagcaagcacttcaaacgccaaagggtctatcagaagacctctggataccctccaagggcatcctgctatacggcccacctggttgctccaagaccatgacagcacaggccatggcgaccgaaacaggctataatttcctcgcagtgaaaggcggtgagctcctgaacatgtacgtcggcgagactgagagatcgatccgcaacattttcaagcgagctgcagaagcagcacccagcatcattttcttcgatgaaatcgattcgctcgcaggctcaagatctacaggacaatctggcggtggtggcgtccaggccgtgactacgctactgacagagatggacggtttcgagcaaagaggtgacgttttcgtcctcgcagccaccaatcgacctgattgcgtagatccggccctcatgcgacctggccgttttgacgaaacaatatatgtcccgttgcccgacgtgaaggctcgcgaggctatcatcacgcgcatgacgaagaagctgaacattcctgaaatcgatgttgaggccttgggacagatgacggatggctattcaggtgctgagatatgtggcattctggggggtgcattcaagggcgggaggcaaggcaccaggatggataccctcaaggctgaaatcgcgaaaagaccaaagtctgtgactagcctgacgctgagttacttcgaaaattggcgcaaaacagggctctcgtttactgcgtaatgagacaactattaaatgtaattgcaatgtgtataattggcggatctaaatccaaacaatcgacgaaattgcagtttgctactcaaccgagtaaattagtatggaatcattgagattgaaaaacttacacatgctagtagaaacgtagacattgcgcttagaaatacgagcgatgtccagaattaccaattacaataacgcatgctattagactatta

SEQ ID NO: 5064 - DNA, 453 bp, Muscodor strobelii
  misc_feature: SGI cDNA ID NO. 561396
  misc_feature: Encodes the peptide sequence at SEQ ID NO 5065
atgaccttaactgtaacagcacaatcagaagtcgcatcatcgaacaattcgacccctgacttcaagtctccaaaagaactcctcctatacctatacgaggatctcacgagactgtcacaagtcgcgtctcacgacattattctccaccgcttcgataatccttcctcgccattacaaggcatcaaagctgcccaagcacacgaagaggcgctggttgcggggaccggcggtacactgttcatggatgtcgagtcggtagttgcgaactcgcatttcggtgcggtgatcggagtattacgggctaattgtcccggccttgatgatctcgccgtaccgttttgcggactttggcgtttcgaagatgggcggctggtggagcattgggagaacgctgctggagatccccagactatggctggctggttgaaggctgcaagttgcagtgcgagatga

SEQ ID NO: 5065 - protein, 150 aa, Muscodor strobelii
  misc_feature: SGI Peptide ID NO. 561396
  misc_feature (25)..(149): NCBI GI: 237797505 Blast Desc: Psyrpo1_01550 [Pseudomonas syringae pv. oryzae str. 1_6]
  misc_feature (5)..(131): NCBI GI: 28867912 Blast Desc: PSPTO_0684 [Pseudomonas syringae pv. tomato str. DC3000] gi|213969276|ref|ZP_03397414.1| PSPTOT1_3577 [Pseudomonas syringae pv. tomato T1] gi|28851148|gb|AAO54226.1| PSPTO_0684 pv.
  misc_feature (23)..(131): NCBI GI: 66047695 Blast Desc: Psyr_4468 [Pseudomonas syringae pv. syringae B728a] gi|63258402|gb|AAY39498.1| conserved [Pseudomonas syringae pv. syringae B728a]
  misc_feature (25)..(131): NCBI GI: 257483259 Blast Desc: PsyrptA_08393 [Pseudomonas syringae pv. tabaci ATCC 11528]
  misc_feature (25)..(131): NCBI GI: 71735243 Blast Desc: PSPPH_4513 [Pseudomonas syringae pv. phaseolicola 1448A] gi|71555796|gb|AAZ35007.1| PSPPH_4513 [Pseudomonas syringae pv. phaseolicola 1448A]
  misc_feature (13)..(139): NCBI GI: 162450407 Blast Desc: sce2135 [Sorangium cellulosum 'So ce 56'] gi|161160989|emb|CAN92294.1| [Sorangium cellulosum 'So ce 56']
  misc_feature (21)..(130): NCBI GI: 171684409 Blast Desc: protein product [Podospora anserina] gi|170942165|emb|CAP67817.1| protein product [Podospora anserina]
  misc_feature (28)..(144): NCBI GI: 116193237 Blast Desc: [Chaetomium globosum CBS 148.51] gi|88182249|gb|EAQ89717.1| [Chaetomium globosum CBS 148.51]
MTLTVTAQSEVASSNNSTPDFKSPKELLLYLYEDLTRLSQVASHDIILHRFDNPSSPLQGIKAAQAHEEALVAGTGGTLFMDVESVVANSHFGAVIGVLRANCPGLDDLAVPFCGLWRFEDGRLVEHWENAAGDPQTMAGWLKAASCSAR

SEQ ID NO: 5066 - DNA, 214 bp, Muscodor strobelii
  misc_feature: SGI EST ID NO. CUFF.12783.0
  misc_feature: Variant of the nucleotide sequence at SEQ ID NO 5064
tctacattagaaaatctcgcttccaagatgaccttaactgtaacagcacaatcagaagtcgcatcatcgaacaattcgacccctgacttcaagtctccaaaagaactcctcctatacctatacgaggatctcacgagactgtcacaagtcgcgtctcacgacattattctccaccgcttcgataatccttcctcgccattacaaggcatcaaag

SEQ ID NO: 5067 - DNA, 597 bp, Muscodor strobelii
  misc_feature: SGI cDNA ID NO. 561398
  misc_feature: Reduced expression when VOC is produced
  misc_feature: Encodes the peptide sequence at SEQ ID NO 5068
atgtcaccgccagacccacgaaatctccttccgtctcgcgcagatcccgtgcatcgtcaacgtcgaaaagagctcgagaaagaacacccattcggcttcaaagaaatagcagtcttaagcatgatcggcatgggcttattatgggacatcgagaaacaagtacagaaacacgaggagaaacacgagaaagaagaggctgagcagaagaaacgggaagagcgagatcagaggcgcagagccaagtcgcagagcacacgcagcgactcgagaaatcctcgctccgatggcggccgaagtgagcggagtgagcggagagaaagaaggactcaagaggaatacacgtcaaatccgcggcgcaggcagtctgttgcgtatggacaggaatatcgtaatcgggactcccatcgcccggatcgctactatgacgagagaccgagatatgagccgagatatgaaagggatccgagatatgaactcgatccacggtacgaagtcgatcagcgatacgaagttgtgtacgaaccgagaaatgaagagagggagagaagggatcctgaaccggagatgagacggaggagtcgtcgtgactcttggtag

SEQ ID NO: 5068 - protein, 198 aa, Muscodor strobelii
  misc_feature: SGI Peptide ID NO. 561398
  misc_feature: Useful for introducing or modulating the production of volatile compounds
MSPPDPRNLLPSRADPVHRQRRKELEKEHPFGFKEIAVLSMIGMGLLWDIEKQVQKHEEKHEKEEAEQKKREERDQRRRAKSQSTRSDSRNPRSDGGRSERSERRERRTQEEYTSNPRRRQSVAYGQEYRNRDSHRPDRYYDERPRYEPRYERDPRYELDPRYEVDQRYEVVYEPRNEERERRDPEPEMRRRSRRDSW

SEQ ID NO: 5069 - DNA, 7332 bp, Muscodor strobelii
  misc_feature: SGI EST ID NO. CUFF.12818.0
  misc_feature: Variant of the nucleotide sequence at SEQ ID NO 5067
aagtgccgctagctccactataggtcacgatcaaaaccaagaatgctcgtggaaggcacatgtctcggagctttctttccctgcagttattcgtctgagcttattacaattattcctccccttctcatcgccgggcctcatcctacgagctccagatgtccggcttaacacaacctcgccccagacacggctccgtacaattgaggtgcttcgttgtaccctgttgcaccgcagccatagcttctaggcaatctccttgctcccttgtcatcgggacgtgctctcgcggtactgcaggatgagatgcttagcatgtctcgcccgccggcagctatcagatatacgtgaacagtcccatttcagttggtaaccagcagcgcagagaaagagaacgagcaattcggatactaccggtgggctgtcggccatgtcttcagctattaccagtgtcatggacagcccggctgctacggccggcgccgtggcaacacgagtagaagaggtggtgcgttctcaaggctcgtcctcctggcttggactactaggacgattcatactattcatcttgcatattgcctccactatactatactggagtctgaagcttacgactatctcttttccgacgctactcttcacgttcttctccacaagcttgaccgttacgatgaacgcaacgactctagccttcattctatttctcgtcatatccggtgtgacatgggtagtgcggtaccggtacctaaatatgtattcacgtcttccgcctgagccacaacgtaaggaaccagaactggatcttttcccggatgcccacgacgaagacctaaaacctggcctatcaaactatctagatgagtttttgagcgccatcaagatttttggcttcttggaacgccctgtgtttcatgagttaacacgaagcatgcaaactcgaaagctcatcgccggtgagaccctaaacctggaagacgagaaaggtttctgcctcgttgttgatgggcttgtggagatttttgtaaaatcccaacaaccgcgctcagctgcagcttcgaacctggcttccggtgtctcattcgattcttctatgactgatgatgaagagcatgcgcaccctggtcagcagcgatatcaacttctcacggaagttcgtaatggaaaccctatgtcatcgcttttctctatcatgtccttgtttacagaggacgtacagcttcgtgtcccttcagatgaccagactgactcggccataccaaacggggggattacaccttccaggcttgctagtgtgaacagggtcagccgaaatactcccatttttctgagcgaaggtgattcgtttcgtgggtctaaagaggatctccaactgacgaaggagcctgaagtaatgactccaacctctccagagggcccggcacatctcccaaaaatccctccaatctcactagataattctccaaagccccgtgctcagcaacgcccaaccatgaaacgaactgccacttctgtgcatccagatattatcgcaagagccaccacggatacaacgatcgctatcatcccagcaagtgcttttcgacgcctaatcaaagtttacccaaaggcaacagcacatattgtgcatgtcattctttcgaggtttcaacgtgtgacacttgccactgcatacaactatctcggtttgatcaatgaagtgttgcttacagaaaaaagtatgatgaaatttacgacttgtcaactgccaaatattcttcgaggtgacgctttagaacgactcaaggagaagttcagccaagagcgagaacgtgctggcgaggaggagtccgataaaggtatcgctctgcacaattcatcttcaacaactcgccgccgaaggtcttcaacaagcttgcgcaaggaagctgcgttgcaagcgatgtccaggtctcgtcctcagtcggtagtggcttcaacgatcgtgcccccgcggcagcgacagtcaattcacgtgccaagtcccggggatcttctggctaatgtccagacagctcgggggagtagggctcttccatctggtacattagagattcccataacgcagccttggcagccttcggaatcagcgttgcggggagaggacaccagtccgctagcccagcgtgccttcaatccctttgcgactcagggacgagctcgtttgtctattgatcctcgagaatctgtcgatgaagacaatttattcagaatctccgtcttggaatgcgtctttaaagctctgggaatgagttcaggcggcacctcatcacgtggcatggaatctattgaagggtctccccgactcgtcacttacgatgccaaaagcaagaaggcagtcttcagtaacaatgccttcggctttatggacgcttttgatggatccagcgaatgggatgctgagtcgatgacatctggcggcctatcagcgagtgtcaatccaaatgcacagcttttagctgcagagatgaagcaggaagtcgaaatcgtcttctttcctcaagggtccatgcttgtcgaacaaggagaaagaagccctggtctctactatgttatcgatggctttttagatatatgtgttccttctgaagatcccggaagcgagattctgagttccgccagtaggacttcactgaatgccatgcatcaagcagattcgcgttctgcggttggtcgagcaccttcaaattttggttcgccagccaacacggctcgtgccaagagcaatcctgaaaacaaacgcagcgcagccgcgcaccgccgccgtgtcggacttgtaaagccaggcggtattgccggttacatcggcacagtgtcttcctaccggtccttcgtggatgttagggcgaaaacagatgtttatgtcggcttcattccacgagcgacgatagagaagatcgtggagaagtaccctatcatcctcttaacgatggcaaaaagattgacagaaatgctacctcgcttgcttctccacattgactttgctctcgaatgggttcaagtcaatgcaggccaggttctgttcaacaaagacgaagagagcgaagcaatatacttagttctcaacggacgtttacgtctgattgaggatcgacaggatggtggcatgagcgttcgagcagagttcggccagggtgatagcgttggtgaacttgaggtcatgaccgaatctgcccgtaccggagcgttacatgccattcgtgatacagaacttgtcaagttccctcgaactctgttcaatagtctggcacaggaacatccaaatatcaccatcaagatatcgaagatcattgcctcaagaatgcggcgattggttgatgattccgcaaccacaatgcgaagagacgctgcgacaggcacctcgattaataagagctcatcaacactcaatattaggactgtggcaattctccccgtcagagcgggtgtgccagtagttgagtttggaaaccgtttgatgaacgcactgtctcaagttggcactgtcaatggcgccatctctctgaaccaatccgctgtgcttagccatctcggcaagcatgctttcaacaggatgggaaaactcaagttatctcattacctggccgatctagaggaaaagtacggattagttgtctatgtcgccgatacaagtgtgacgactccgtggacacaaacctgcatcacccaggcagactgcattctactcgttggtctagcagaaggatcccccgagatcggagaatacgaacgcttcatgctcggtatgaagtcgactgctcggaaatcacttgttctgttgcacgctgatcgatactcacctcccggtttgactaggtcatggctgaaaaatcgagtctggatcaatggtgggcaccaccatatgcaaatgtcttttggcacaagtgcagtacctgttcatcctccaggtccggtgaagagaggcggaccttctctgaaagaacgcgtacaaatccttcaggcagagatccaaaagtacaccacccgcaagatccgtcatcggccgtattactcgccggacgctcctgtaaaaggtgactttcagagactggccaggagattgtgtggcaaatccattggcttggtactcggcggaggtggtgcgcgaggtattgcccacatcggcgtcatcaaagccatcgaggaagctggcatcccgattgatattgttggtggtacatcagtcggttcattgatgggtggcctctacgctcgtcacgcggatattgtccccgtgtatggccttgccaagaaattcgcagggagaatgtcgagcatgtggcgattcgctcttgatctgacctatccgtctgcctcatatacaacaggccatgaattcaatcgcggcatttttaaggcgtttggcaaacaccaactagaagattcctggcttgagttctattgcaatacaacaaacattagcaagagccgagctgaaatccatactagtggttatgcatggcgctatgttcgtgcatcaatgtctttggccggactcttacccccgctttgtgacgagggcagcatgttactcgacggaggatatgttgataacttgacagtctcgcatatgaagtcgcttggtgccgatgtgatccttgcagtcgatgtcggatctcttgacgacgatgttcctcagagttatggagattctttatcaggcatgtgggcgtttttcaataggtggaatccgttgtccacgacccccaatcctcccacattggcagaaatccaagctcgacttgcgtatgtgtccagcgttgacgctctggagagagccaagacaatgccaggatgtatctacatgcgcccccctatcgatgattatggaacactagaattcgcaaaattcgatgaaatctacgagcgagcctatcagtatggaaaagagttcctcgcccgtctgaaagaagagggcgtgctacctcttgtagaggagattgaggctaagaaagcgctccggcggaccatggcccctcgtcgcgcaagtatttagagagttgataatctactgtagcatgctgtaccatgcacttgacaactgatcttgttattgcccgtccataataatgttttgtatgtctgtatgtatgtatgtggtaacgagatactgattggactcgacgattgagtggctgaaggtttttgattgtggtgtggttgcagtatcgagattgctaaactgcacattcgtgtggccgatacgaaatgccgacgttcattggtggctcaggcatcatgacgacactatgaaaacagaaggattcagcctggaaatcctgcgcctagtatgagttcagttgataagaccacatcaatttcccacttcatgtaaaatcagtccatttccggccgtttcgcatatatctcgactactgaactatatcgacgaatctccatttcccgtcgagttcgagaaagaggcgcattgccaaaatgctgtcgatacagacccatggcattgggactgatgaactgtgttcgagccaacagcatactatgacaatatgcggtttacgatcggaccactccgcatttgtgcagatgaaggaacacaacatatccggacatcacggcatatgacctttttgtgctcaatcgccacttgaccggaaatcttctatccacaaacctactcggaagccgtttctatattccgatttgggaatctacgtatcgcgggatgcatttggcatcgactggtgcgggtcggcattcaattgacagctcagaggcaccacgatccatgatcctggtgttgtcttatgtgatgatgttaaggtaggcgttgtgcactctacgacagactggccttggacattctctgcatcattcctcgggcaggggtttggacttaggcttctaggtagacgggagcagccgcatgtcaggtggacggtgacgacagaggacagacacacgagatgacaaagacggaggagtgattgtgagacagacgggcgttaggtgtgggatttgacgaatcccctccactgcggtgaagataccggacccacgatacccctgtttgatggacggcaatccaattaaagcccaagatccggcactcgatcagtgacatcatcgctcagcgctcagcgagagacccttgctcggctctcaccgtcatgtcacgatgatttccgctgccaatgatggcatttggcacaggcctcgagtcatcatctccgagctgccgcgatatctcgtctcatcatacttaaaggagaagcgatctccacacacagatggtcttgtcacgatagatttgccataccacaacttttttgcttttattatacttcagatcagcaaactcctcgcaagacttaccataaagtcgtgaggcccaatatattgcacaatacaatcataactgcgcattacgtcccgctcctcattatcaacatccacatatcacaatcacattcgcgtcaaaatgtcaccgccagacccacgaaatctccttccgtctcgcgcagatcccgtgcatcgtcaacgtcgaaaagagctcgagaaagaacacccattcggcttcaaagaaatagcagtcttaagcatgatcggcatgggcttattatgggacatcgagaaacaagtacagaaacacgaggagaaacacgagaaagaagaggctgagcagaagaaacgggaagagcgagatcagaggcgcagagccaagtcgcagagcacacgcagcgactcgagaaatcctcgctccgatggcggccgaagtgagcggagtgagcggagagaaagaaggactcaagaggaatacacgtcaaatccgcggcgcaggcagtctgttgcgtatggacaggaatatcgtaatcgggactcccatcgcccggatcgctactatgacgagagaccgagatatgagccgagatatgaaagggatccgagatatgaactcgatccacggtacgaagtcgatcagcgatacgaagttgtgtacgaaccgagaaatgaagagagggagagaagggatcctgaaccggagatgagacggaggagtcgtcgtgactcttggtagtggctggttgaacagccacagagaatgggtaatttcatgtacttgaatatatcgttggcacattgccggcatggttcctgaatggagtcgccgtggcgaacagggagactgttacacgatgaaagcaaacttcaaaaatgcgggataggaacatcatcattgaagtaaatgtggaataactacctactctatcaaaaagcattggcgcaagcagcgttgcgttatttaagcatttaggaggggatagttagcaatgaaataacgacctatgactacctatcgcg

SEQ ID NO: 5070 - DNA, 4581 bp, Muscodor strobelii
  misc_feature: SGI cDNA ID NO. 561399
  misc_feature: Encodes the peptide sequence at SEQ ID NO 5071
atgtcttcagctattaccagtgtcatggacagcccggctgctacggccggcgccgtggcaacacgagtagaagaggtggtgcgttctcaaggctcgtcctcctggcttggactactaggacgattcatactattcatcttgcatattgcctccactatactatactggagtctgaagcttacgactatctcttttccgacgctactcttcacgttcttctccacaagcttgaccgttacgatgaacgcaacgactctagccttcattctatttctcgtcatatccggtgtgacatgggtagtgcggtaccggtacctaaatatgtattcacgtcttccgcctgagccacaacgtaaggaaccagaactggatcttttcccggatgcccacgacgaagacctaaaacctggcctatcaaactatctagatgagtttttgagcgccatcaagatttttggcttcttggaacgccctgtgtttcatgagttaacacgaagcatgcaaactcgaaagctcatcgccggtgagaccctaaacctggaagacgagaaaggtttctgcctcgttgttgatgggcttgtggagatttttgtaaaatcccaacaaccgcgctcagctgcagcttcgaacctggcttccggtgtctcattcgattcttctatgactgatgatgaagagcatgcgcaccctggtcagcagcgatatcaacttctcacggaagttcgtaatggaaaccctatgtcatcgcttttctctatcatgtccttgtttacagaggacgtacagcttcgtgtcccttcagatgaccagactgactcggccataccaaacggggggattacaccttccaggcttgctagtgtgaacagggtcagccgaaatactcccatttttctgagcgaaggtgattcgtttcgtgggtctaaagaggatctccaactgacgaaggagcctgaagtaatgactccaacctctccagagggcccggcacatctcccaaaaatccctccaatctcactagataattctccaaagccccgtgctcagcaacgcccaaccatgaaacgaactgccacttctgtgcatccagatattatcgcaagagccaccacggatacaacgatcgctatcatcccagcaagtgcttttcgacgcctaatcaaagtttacccaaaggcaacagcacatattgtgcatgtcattctttcgaggtttcaacgtgtgacacttgccactgcatacaactatctcggtttgatcaatgaagtgttgcttacagaaaaaagtatgatgaaatttacgacttgtcaactgccaaatattcttcgaggtgacgctttagaacgactcaaggagaagttcagccaagagcgagaacgtgctggcgaggaggagtccgataaaggtatcgctctgcacaattcatcttcaacaactcgccgccgaaggtcttcaacaagcttgcgcaaggaagctgcgttgcaagcgatgtccaggtctcgtcctcagtcggtagtggcttcaacgatcgtgcccccgcggcagcgacagtcaattcacgtgccaagtcccggggatcttctggctaatgtccagacagctcgggggagtagggctcttccatctggtacattagagattcccataacgcagccttggcagccttcggaatcagcgttgcggggagaggacaccagtccgctagcccagcgtgccttcaatccctttgcgactcagggacgagctcgtttgtctattgatcctcgagaatctgtcgatgaagacaatttattcagaatctccgtcttggaatgcgtctttaaagctctgggaatgagttcaggcggcacctcatcacgtggcatggaatctattgaagggtctccccgactcgtcacttacgatgccaaaagcaagaaggcagtcttcagtaacaatgccttcggctttatggacgcttttgatggatccagcgaatgggatgctgagtcgatgacatctggcggcctatcagcgagtgtcaatccaaatgcacagcttttagctgcagagatgaagcaggaagtcgaaatcgtcttctttcctcaagggtccatgcttgtcgaacaaggagaaagaagccctggtctctactatgttatcgatggctttttagatatatgtgttccttctgaagatcccggaagcgagattctgagttccgccagtaggacttcactgaatgccatgcatcaagcagattcgcgttctgcggttggtcgagcaccttcaaattttggttcgccagccaacacggctcgtgccaagagcaatcctgaaaacaaacgcagcgcagccgcgcaccgccgccgtgtcggacttgtaaagccaggcggtattgccggttacatcggcacagtgtcttcctaccggtccttcgtggatgttagggcgaaaacagatgtttatgtcggcttcattccacgagcgacgatagagaagatcgtggagaagtaccctatcatcctcttaacgatggcaaaaagattgacagaaatgctacctcgcttgcttctccacattgactttgctctcgaatgggttcaagtcaatgcaggccaggttctgttcaacaaagacgaagagagcgaagcaatatacttagttctcaacggacgtttacgtctgattgaggatcgacaggatggtggcatgagcgttcgagcagagttcggccagggtgatagcgttggtgaacttgaggtcatgaccgaatctgcccgtaccggagcgttacatgccattcgtgatacagaacttgtcaagttccctcgaactctgttcaatagtctggcacaggaacatccaaatatcaccatcaagatatcgaagatcattgcctcaagaatgcggcgattggttgatgattccgcaaccacaatgcgaagagacgctgcgacaggcacctcgattaataagagctcatcaacactcaatattaggactgtggcaattctccccgtcagagcgggtgtgccagtagttgagtttggaaaccgtttgatgaacgcactgtctcaagttggcactgtcaatggcgccatctctctgaaccaatccgctgtgcttagccatctcggcaagcatgctttcaacaggatgggaaaactcaagttatctcattacctggccgatctagaggaaaagtacggattagttgtctatgtcgccgatacaagtgtgacgactccgtggacacaaacctgcatcacccaggcagactgcattctactcgttggtctagcagaaggatcccccgagatcggagaatacgaacgcttcatgctcggtatgaagtcgactgctcggaaatcacttgttctgttgcacgctgatcgatactcacctcccggtttgactaggtcatggctgaaaaatcgagtctggatcaatggtgggcaccaccatatgcaaatgtcttttggcacaagtgcagtacctgttcatcctccaggtccggtgaagagaggcggaccttctctgaaagaacgcgtacaaatccttcaggcagagatccaaaagtacaccacccgcaagatccgtcatcggccgtattactcgccggacgctcctgtaaaaggtgactttcagagactggccaggagattgtgtggcaaatccattggcttggtactcggcggaggtggtgcgcgaggtattgcccacatcggcgtcatcaaagccatcgaggaagctggcatcccgattgatattgttggtggtacatcagtcggttcattgatgggtggcctctacgctcgtcacgcggatattgtccccgtgtatggccttgccaagaaattcgcagggagaatgtcgagcatgtggcgattcgctcttgatctgacctatccgtctgcctcatatacaacaggccatgaattcaatcgcggcatttttaaggcgtttggcaaacaccaactagaagattcctggcttgagttctattgcaatacaacaaacattagcaagagccgagctgaaatccatactagtggttatgcatggcgctatgttcgtgcatcaatgtctttggccggactcttacccccgctttgtgacgagggcagcatgttactcgacggaggatatgttgataacttgacagtctcgcatatgaagtcgcttggtgccgatgtgatccttgcagtcgatgtcggatctcttgacgacgatgttcctcagagttatggagattctttatcaggcatgtgggcgtttttcaataggtggaatccgttgtccacgacccccaatcctcccacattggcagaaatccaagctcgacttgcgtatgtgtccagcgttgacgctctggagagagccaagacaatgccaggatgtatctacatgcgcccccctatcgatgattatggaacactagaattcgcaaaattcgatgaaatctacgagcgagcctatcagtatggaaaagagttcctcgcccgtctgaaagaagagggcgtgctacctcttgtagaggagattgaggctaagaaagcgctccggcggaccatggcccctcgtcgcgcaagtatttag

SEQ ID NO: 5071 - protein, 1526 aa, Muscodor strobelii
  misc_feature: SGI Peptide ID NO. 561399
  misc_feature (860)..(950): Pfam Id: PF00027 Pfam Desc: Cyclic nucleotide-binding domain
  misc_feature (691)..(834): Pfam Id: PF00027 Pfam Desc: Cyclic nucleotide-binding domain
  misc_feature (1223)..(1387): Pfam Id: PF01734 Pfam Desc: Patatin-like phospholipase
  misc_feature (34)..(1526): NCBI GI: 46121839 Blast Desc: FG05297.1 [Gibberella zeae PH-1]
  misc_feature (2)..(1526): NCBI GI: 158563949 Blast Desc: FG05297.1 [Gibberella zeae PH-1]
  misc_feature (108)..(1526): NCBI GI: 145603292 Blast Desc: MGG_06143 [Magnaporthe grisea 70-15] gi|145011554|gb|EDJ96210.1| MGG_06143 [Magnaporthe grisea 70-15]
  misc_feature (89)..(1526): NCBI GI: 261359702 Blast Desc: Lysophospholipase NTE1 [Verticillium albo-atrum VaMs.102]
  misc_feature (14)..(1526): NCBI GI: 171690346 Blast Desc: protein product [Podospora anserina] gi|170945121|emb|CAP71232.1| protein product [Podospora anserina]
  misc_feature (30)..(1526): NCBI GI: 116196330 Blast Desc: CHGG_04763 [Chaetomium globosum CBS 148.51] gi|88180676|gb|EAQ88144.1| CHGG_04763 [Chaetomium globosum CBS 148.51]
  misc_feature (148)..(1526): NCBI GI: 164423562 Blast Desc: NCU08276 [Neurospora crassa OR74A] gi|157070147|gb|EAA32668.2| conserved [Neurospora crassa OR74A]
  misc_feature (108)..(1526): NCBI GI: 156035691 Blast Desc: SS1G_13049 [Sclerotinia sclerotiorum 1980] gi|154698454|gb|EDN98192.1| SS1G_13049 [Sclerotinia sclerotiorum 1980]
  misc_feature (39)..(1526): NCBI GI: 258578195 Blast Desc: IMP-specific 5'-nucleotidase 1 [Uncinocarpus reesii 1704] gi|237903545|gb|EEP77946.1| IMP-specific 5'-nucleotidase 1 [Uncinocarpus reesii 1704]
  misc_feature (4)..(1526): NCBI GI: 70981915 Blast Desc: Patatin-like serine hydrolase [Aspergillus fumigatus Af293] gi|74666377|sp|Q4WA15.1|NTE1_ASPFU RecName: Full=Lysophospholipase nte1; AltName: Full=Neuropathy target B
  misc_feature (52)..(1526): SWISSPROT Homolog: EC 3.1.1.5 Lysophospholipase
MSSAITSVMDSPAATAGAVATRVEEVVRSQGSSSWLGLLGRFILFILHIASTILYWSLKLTTISFPTLLFTFFSTSLTVTMNATTLAFILFLVISGVTWVVRYRYLNMYSRLPPEPQRKEPELDLFPDAHDEDLKPGLSNYLDEFLSAIKIFGFLERPVFHELTRSMQTRKLIAGETLNLEDEKGFCLVVDGLVEIFVKSQQPRSAAASNLASGVSFDSSMTDDEEHAHPGQQRYQLLTEVRNGNPMSSLFSIMSLFTEDVQLRVPSDDQTDSAIPNGGITPSRLASVNRVSRNTPIFLSEGDSFRGSKEDLQLTKEPEVMTPTSPEGPAHLPKIPPISLDNSPKPRAQQRPTMKRTATSVHPDIIARATTDTTIAIIPASAFRRLIKVYPKATAHIVHVILSRFQRVTLATAYNYLGLINEVLLTEKSMMKFTTCQLPNILRGDALERLKEKFSQERERAGEEESDKGIALHNSSSTTRRRRSSTSLRKEAALQAMSRSRPQSVVASTIVPPRQRQSIHVPSPGDLLANVQTARGSRALPSGTLEIPITQPWQPSESALRGEDTSPLAQRAFNPFATQGRARLSIDPRESVDEDNLFRISVLECVFKALGMSSGGTSSRGMESIEGSPRLVTYDAKSKKAVFSNNAFGFMDAFDGSSEWDAESMTSGGLSASVNPNAQLLAAEMKQEVEIVFFPQGSMLVEQGERSPGLYYVIDGFLDICVPSEDPGSEILSSASRTSLNAMHQADSRSAVGRAPSNFGSPANTARAKSNPENKRSAAAHRRRVGLVKPGGIAGYIGTVSSYRSFVDVRAKTDVYVGFIPRATIEKIVEKYPIILLTMAKRLTEMLPRLLLHIDFALEWVQVNAGQVLFNKDEESEAIYLVLNGRLRLIEDRQDGGMSVRAEFGQGDSVGELEVMTESARTGALHAIRDTELVKFPRTLFNSLAQEHPNITIKISKIIASRMRRLVDDSATTMRRDAATGTSINKSSSTLNIRTVAILPVRAGVPVVEFGNRLMNALSQVGTVNGAISLNQSAVLSHLGKHAFNRMGKLKLSHYLADLEEKYGLVVYVADTSVTTPWTQTCITQADCILLVGLAEGSPEIGEYERFMLGMKSTARKSLVLLHADRYSPPGLTRSWLKNRVWINGGHHHMQMSFGTSAVPVHPPGPVKRGGPSLKERVQILQAEIQKYTTRKIRHRPYYSPDAPVKGDFQRLARRLCGKSIGLVLGGGGARGIAHIGVIKAIEEAGIPIDIVGGTSVGSLMGGLYARHADIVPVYGLAKKFAGRMSSMWRFALDLTYPSASYTTGHEFNRGIFKAFGKHQLEDSWLEFYCNTTNISKSRAEIHTSGYAWRYVRASMSLAGLLPPLCDEGSMLLDGGYVDNLTVSHMKSLGADVILAVDVGSLDDDVPQSYGDSLSGMWAFFNRWNPLSTTPNPPTLAEIQARLAYVSSVDALERAKTMPGCIYMRPPIDDYGTLEFAKFDEIYERAYQYGKEFLARLKEEGVLPLVEEIEAKKALRRTMAPRRASI

SEQ ID NO: 5072 - DNA, 7332 bp, Muscodor strobelii; identical to SEQ ID NO: 5069
  misc_feature: SGI EST ID NO. CUFF.12818.0
  misc_feature: Variant of the nucleotide sequence at SEQ ID NO 5070

SEQ ID NO: 5073 - DNA, 933 bp, Muscodor strobelii
  misc_feature: SGI cDNA ID NO. 561400
  misc_feature: Reduced expression when VOC is produced
  misc_feature: Encodes the peptide sequence at SEQ ID NO 5074
atgtcgttgacaaattgccggttctacgaagaaccgtaccccgagatcgacagctttgttatggttaatgtcaagcagatcgccgatatgggagcatacgtcaagctcctcgagtacgataacatcgatggcatgatcctactctccgaactctccaggcgtcgtattcgaagtatccagaaactcattcgtgtcggtcgcaacgaagttgttgtcgtcctcagagtcgacaaggagaagggctatatcgatctgtccaaacgacgtgttggacccgaggatatcgtgaagtgcgaggagcgttacaataagagcaagatggtccactccatcatgcgccacgtcgccgagaagacccagatccccatcgagtccctgtacgagagcatagcctggcccctaactaagaagtttggtcactccatcgatgccttcaagctttccataaccaaccctgaagtatggaacgatgtcacattccccagcgacgctgtcgccgacgagctcaagtcctacattggcaagcgtctaactccccagcccaccaaggtccgtgctgatgtcgaggtcacctgcttcgagtacgagggcatcgacgccatcaagaaggctctccgcacagccgaggccggcaacacggaagataaccaggtccgagttaagctagtgtcgccgcctctctacgttttgacgagcatgtgtctcgacaagaatgttggcatctccagactggaagaggccattgtcaacatccgcaacagtatcacgagcgatggtggtaacctcacagtcaagatggaacccaaggctgtcacagattccgacgatgccgagttacaggccctcatggagaagcgcgagcgcgagaatgccgaagtcagtggagacgagagtgtcagcgagtccgatgataatgtccccgagactctgtaa

SEQ ID NO: 5074 - protein, 310 aa, Muscodor strobelii
  misc_feature: SGI Peptide ID NO. 561400
  misc_feature (125)..(237): Pfam Id: PF07541 Pfam Desc: Eukaryotic translation initiation factor 2 alpha subunit
  misc_feature (13)..(88): Pfam Id: PF00575 Pfam Desc: S1 RNA binding domain
  misc_feature (1)..(310): NCBI GI: 171690344 Blast Desc: protein product [Podospora anserina] gi|170945120|emb|CAP71231.1| protein product [Podospora anserina]
  misc_feature (1)..(310): NCBI GI: 145603294 Blast Desc: MGG_13200 [Magnaporthe grisea 70-15] gi|145011555|gb|EDJ96211.1| MGG_13200 [Magnaporthe grisea 70-15]
  misc_feature (1)..(310): NCBI GI: 85105173 Blast Desc: eukaryotic translation initiation factor 2 alpha subunit [Neurospora crassa OR74A] gi|28923489|gb|EAA32669.1| eukaryotic translation initiation factor 2 alpha subunit crassa
  misc_feature (1)..(307): NCBI GI: 116196328 Blast Desc: CHGG_04762 [Chaetomium globosum CBS 148.51] gi|88180675|gb|EAQ88143.1| CHGG_04762 [Chaetomium globosum CBS 148.51]
  misc_feature (1)..(310): NCBI GI: 46123685 Blast Desc: FG06220.1 [Gibberella zeae PH-1]
  misc_feature (1)..(310): NCBI GI: 154293416 Blast Desc: BC1G_14334 [Botryotinia fuckeliana B05.10] gi|150845315|gb|EDN20508.1| BC1G_14334 [Botryotinia fuckeliana B05.10]
  misc_feature (4)..(310): NCBI GI: 261353085 Blast Desc: eukaryotic translation initiation factor 2 subunit alpha [Verticillium albo-atrum VaMs.102]
  misc_feature (1)..(310): NCBI GI: 156035689 Blast Desc: SS1G_13048 [Sclerotinia sclerotiorum 1980] gi|154698453|gb|EDN98191.1| SS1G_13048 [Sclerotinia sclerotiorum 1980]
  misc_feature (1)..(305): NCBI GI: 189198469 Blast Desc: eukaryotic translation initiation factor 2 subunit alpha [Pyrenophora tritici-repentis Pt-1C-BFP] gi|187981520|gb|EDU48146.1| eukaryotic translation initiation 2
  misc_feature (1)..(305): NCBI GI: 169620155 Blast Desc: SNOG_13280 [Phaeosphaeria nodorum SN15] gi|111058044|gb|EAT79164.1| SNOG_13280 [Phaeosphaeria nodorum SN15]
  misc_feature: Useful for introducing or modulating the production of volatile compounds
MSLTNCRFYEEPYPEIDSFVMVNVKQIADMGAYVKLLEYDNIDGMILLSELSRRRIRSIQKLIRVGRNEVVVVLRVDKEKGYIDLSKRRVGPEDIVKCEERYNKSKMVHSIMRHVAEKTQIPIESLYESIAWPLTKKFGHSIDAFKLSITNPEVWNDVTFPSDAVADELKSYIGKRLTPQPTKVRADVEVTCFEYEGIDAIKKALRTAEAGNTEDNQVRVKLVSPPLYVLTSMCLDKNVGISRLEEAIVNIRNSITSDGGNLTVKMEPKAVTDSDDAELQALMEKRERENAEVSGDESVSESDDNVPETL

SEQ ID NO: 5075 - DNA, 1575 bp, Muscodor strobelii
  misc_feature: SGI EST ID NO. CUFF.13176.0
  misc_feature: Variant of the nucleotide sequence at SEQ ID NO 5073
gcagtgactcctccacacacccacaacgccacgcatcgtcacgccaaagcattcgtagctccgactgtctcgacattgcgcaagtattctacctgccgctacgactacatacctccagacagcaatagacgaaagtgcattcccagcgcgagcacgcaaccattccggagccgtctcccccgccccgtacgcaccacgcgacccaggccatcgccggccctcgcccaccacctcgccgcatacactcacactccacatccgtcgcccatcatgtcgttgacaaattgccggttctacgaagaaccgtaccccgagatcgacagctttgttatggttaatgtcaagcaggtgcgtctgtccgcgacctgcccactgcccactgcccactgccccaagccccaagcctgacttgtttgccccgtccagatcgccgatatgggagcatacgtcaagctcctcgagtacgataacatcgatggcatgatcctactctccgaactctccaggcgtcgtattcgaagtatccagaaactcattcgtgtcggtcgcaacgaagttgttgtcgtcctcagagtcgacaaggagaagggctatatcgatctgtccaaacgacgtgttggacccgaggatatcgtgaagtgcgaggagcgttacaataagagcaagatggtccactccatcatgcgccacgtcgccgagaagacccagatccccatcgagtccctgtacgagagcatagcctggcccctaactaagaagtttggtcactccatcgatgccttcaagctttccataaccaaccctgaagtatggaacgatgtcacattccccagcgacgctgtcgccgacgagctcaagtcctacattggcaagcgtctaactccccagcccaccaaggtccgtgctgatgtcgaggtcacctgcttcgagtacgagggcatcgacgccatcaagaaggctctccgcacagccgaggccggcaacacggaagataaccaggtccgagttaagctagtgtcgccgcctctctacgttttgacgagcatgtgtctcgacaagaatgttggcatctccagactggaagaggccattgtcaacatccgcaacagtatcacgagcgatggtggtaacctcacagtcaagatggaacccaaggctgtcacagattccgacgatgccgagttacaggccctcatggagaagcgcgagcgcgagaatgccgaagtcagtggagacgagagtgtcagcgagtccgatgataatgtccccgagactctgtaaacactcaagtagtctgccacgcgtttcgggatatatcatagaggtgtgccgaatttctcaggtcatagcatttggactggtttctcattatggcgagacaaaagttgcatccgaaatgtattccttaagtatggaaagtaccggcctcatagacagttgggtcatatgcttgtcccattgagtgcaatagtctaggttgaggcaccattagccagagcgtttagagtatctcggctagtagtcatgaatccgtaaaatgagccaaaaagtttcttacttgtagatgacctggcc

SEQ ID NO: 5076 - DNA, 609 bp, Muscodor strobelii
  misc_feature: SGI cDNA ID NO. 561401
  misc_feature: Encodes the peptide sequence at SEQ ID NO 5077
atggcgttccgatcagcctgggtcggcttccggcagaggttcggtcgcttcggccagtctcaagcacccagatcaccttggcgcacattccgagagagatatcctagggtcgcggagtacagctattacgcattcatgtttgcagcgtgcattccgtttgtcatctcagtcaacgacaatttgttcgagacggcaaccgtgaccggaccgtccatgtacccatttttcaacgccgagaaggaccagacgacacagggtgataccgtgctcaatttcaagtacaatgcgcagtactcgcttcagcgtggcatgatcgtcacattttggagcccacatagaccagacacgatggcagtcaagaggatcattgggctgccgggagatgtcatcagaacgcgcaaaccatattctgtaccagtcgtcactgttccaccaggacatatctgggttgaaggagatggcgaggatcgcgacacattcgatagtaattcatatgggcctatttcgacaggcttgatcattggaaaagtcacacatatcttgttgccattacatagagcgggacgtgtaagatggtgggagcacacagagaagatacggaaccaataa

SEQ ID NO: 5077 - protein, 202 aa, Muscodor strobelii
  misc_feature: SGI Peptide ID NO. 561401
  misc_feature (24)..(200): NCBI GI: 261353086 Blast Desc: mitochondrial inner membrane protease subunit 2 [Verticillium albo-atrum VaMs.102]
  misc_feature (1)..(195): NCBI GI: 256726857 Blast Desc: [Nectria haematococca mpVI 77-13-4]
  misc_feature (1)..(195): NCBI GI: 46123687 Blast Desc: FG06221.1 [Gibberella zeae PH-1]
  misc_feature (25)..(192): NCBI GI: 156035675 Blast Desc: SS1G_13041 [Sclerotinia sclerotiorum 1980] gi|154698446|gb|EDN98184.1| SS1G_13041 [Sclerotinia sclerotiorum 1980]
  misc_feature (72)..(200): NCBI GI: 145603296 Blast Desc: MGG_13201 [Magnaporthe grisea 70-15] gi|145011556|gb|EDJ96212.1| MGG_13201 [Magnaporthe grisea 70-15]
  misc_feature (25)..(194): NCBI GI: 242781672 Blast Desc: mitochondrial inner membrane protease subunit Imp2, [Talaromyces stipitatus ATCC 10500] gi|218719995|gb|EED19414.1| mitochondrial inner membrane protease subunit Imp2, [Talaromyces
  misc_feature (25)..(194): NCBI GI: 212526734 Blast Desc: mitochondrial inner membrane protease subunit Imp2, [Penicillium marneffei ATCC 18224] gi|210072922|gb|EEA27009.1| mitochondrial inner membrane protease subunit Imp2, [Penicillium
  misc_feature (23)..(198): NCBI GI: 115391437 Blast Desc: conserved [Aspergillus terreus NIH2624] gi|114194147|gb|EAU35847.1| conserved [Aspergillus terreus NIH2624]
  misc_feature (51)..(190): NCBI GI: 19112925 Blast Desc: mitochondrial inner membrane peptidase complex catalytic subunit 2 [Schizosaccharomyces pombe] gi|74665564|sp|Q9UST2.1|IMP2L_SCHPO RecName: Full=Mitochondrial 2
  misc_feature (30)..(195): NCBI GI: 121706198 Blast Desc: mitochondrial inner membrane protease subunit Imp2, [Aspergillus clavatus NRRL 1] gi|119399508|gb|EAW09936.1| mitochondrial inner membrane protease subunit Imp2, [Aspergillus
MAFRSAWVGFRQRFGRFGQSQAPRSPWRTFRERYPRVAEYSYYAFMFAACIPFVISVNDNLFETATVTGPSMYPFFNAEKDQTTQGDTVLNFKYNAQYSLQRGMIVTFWSPHRPDTMAVKRIIGLPGDVIRTRKPYSVPVVTVPPGHIWVEGDGEDRDTFDSNSYGPISTGLIIGKVTHILLPLHRAGRVRWWEHTEKIRNQ

SEQ ID NO: 5078 - DNA, 773 bp, Muscodor strobelii
  misc_feature: SGI EST ID NO. CUFF.12839.0
  misc_feature: Variant of the nucleotide sequence at SEQ ID NO 5076
cccgttcattcgtcaaagcttcaaattctcttaaggataattcaggatctcttcgatgtaacttcaatcaagcttttcctcgactgcgtctctatgccatggcgttccgatcagcctgggtcggcttccggcagaggttcggtcgcttcggccagtctcaagcacccagatcaccttggcgcacattccgagagagatatcctagggtcgcggagtacagctattacgcattcatgtttgcagcgtgcattccgtttgtcatctcagtcaacgacaatttgttcgagacggcaaccgtgaccggaccgtccatgtacccatttttcaacgccgagaaggaccagacgacacagggtgataccgtgctcaatttcaagtacaatgcgcagtactcgcttcagcgtggcatgatcgtcacattttggagcccacatagaccagacacgatggcagtcaagaggatcattgggctgccgggagatgtcatcagaacgcgcaaaccatattctgtaccagtcgtcactgttccaccaggacatatctgggttgaaggagatggcgaggatcgcgacacattcgatagtaattcatatgggcctatttcgacaggcttgatcattggaaaagtcacacatatcttgttgccattacatagagcgggacgtgtaagatggtgggagcacacagagaagatacggaaccaataaataaaaaactgttagaggtcacagtgttcgcattttgagaaatgctgatatgcaggcagatgaagt

SEQ ID NO: 5079 - DNA, 1101 bp, Muscodor strobelii
  misc_feature: SGI cDNA ID NO. 561402
  misc_feature: Reduced expression when VOC is produced
  misc_feature: Encodes the peptide sequence at SEQ ID NO 5080
atgacagctagcggcgatggcgactctgaagggcgcccgccgtatatccactccatgatcgccggaggccttgggggaaccaccggtgacatgttgatgcactccctcgacaccgtcaagactcggcagcaaggcgatccgcacgtgcctcctaaatacacatctctaggatcatcatactacaagatatggcggcaggagggtatcaggcgggggctgtacggcggctggctgccagccatgatgggctcattccccggcaccgtgcttttcttcggcacctacgaatggagtaaacggcacatgctcgactacggcatacagtcgcatgtgtcctatctcacggctgggtttcttggcgaccttgccgcatccatcgtctatgtgccctccgaggtgctaaaaacacgtctgcagcttcagggacgccacaataaccctttcttcaaatccggctacaactaccgcggcacattcgacgctgccaggaccatcgttcgaaccgaaggactcactgagctcttttctggatataaagcaacattataccgagaccttcccttttctgcattgcaattcatgttctatgagcaattccaaacgtgggcgcgagagtggaaagatagtcgagatatcggggttcagctggagctactcacgggcgcagctggaggaggattggcgggagtgatcacttgtccgctggatgtcgtgaagacgcgacttcagactcagatcgacccaccgccagctttacacaaacccaaagaccgttcagtgaccgatgtcaagtctgctgtcaaggaaacctctcccaagcttgccaaagacactccgtcacataactccatacgccctatttcgacatcatctccgtcgacatccacccctcgtccgggtgctatccccttggacgagaactcaatattcaagggattacggctcatatacaagacggaaggagttggagggtggtttcggggagtcgggccccgtttcgtgtggaccagcgtgcaaagcggctgcatgttattcttgtaccaatcgatattacgacagttggaaacactaatgccggtagagcgatcggaaatgtcttga

SEQ ID NO: 5080 - protein, 366 aa, Muscodor strobelii
  misc_feature: SGI Peptide ID NO. 561402
  misc_feature (14)..(106): Pfam Id: PF00153 Pfam Desc: Mitochondrial carrier protein
  misc_feature (213)..(358): Pfam Id: PF00153 Pfam Desc: Mitochondrial carrier protein
  misc_feature (109)..(207): Pfam Id: PF00153 Pfam Desc: Mitochondrial carrier protein
  misc_feature (1)..(365): NCBI GI: 46123689 Blast Desc: FG06222.1 [Gibberella zeae PH-1]
  misc_feature (6)..(366): NCBI GI: 85105177 Blast Desc: NCU08278 [Neurospora crassa OR74A] gi|28923490|gb|EAA32670.1| conserved [Neurospora crassa OR74A]
  misc_feature (2)..(365): NCBI GI: 171690340 Blast Desc: protein product [Podospora anserina] gi|170945118|emb|CAP71229.1| protein product [Podospora anserina]
  misc_feature (8)..(355): NCBI GI: 258565351 Blast Desc: conserved [Uncinocarpus reesii 1704] gi|237907121|gb|EEP81522.1| conserved [Uncinocarpus reesii 1704]
  misc_feature (13)..(356): NCBI GI: 240107215 Blast Desc: Mitochondrial carrier protein [Coccidioides posadasii C735 delta SOWgp]
  misc_feature (4)..(356): NCBI GI: 238841763 Blast Desc: solute carrier family 25 member 38 [Microsporum canis CBS 113480]
  misc_feature (6)..(360): NCBI GI: 212537007 Blast Desc: mitochondrial carrier protein, [Penicillium marneffei ATCC 18224] gi|210068401|gb|EEA22492.1| mitochondrial carrier protein, [Penicillium marneffei ATCC 18224]
  misc_feature (6)..(356): NCBI GI: 115400015 Blast Desc: conserved [Aspergillus terreus NIH2624] gi|114191262|gb|EAU32962.1| conserved [Aspergillus terreus NIH2624]
  misc_feature (12)..(364): NCBI GI: 154281847 Blast Desc: conserved [Ajellomyces capsulatus NAm1] gi|150411915|gb|EDN07303.1| conserved [Ajellomyces capsulatus NAm1]
  misc_feature (11)..(365): NCBI GI: 225563294 Blast Desc: mitoferrin [Ajellomyces capsulatus G186AR]
  misc_feature: Useful for introducing or modulating the production of volatile compounds
MTASGDGDSEGRPPYIHSMIAGGLGGTTGDMLMHSLDTVKTRQQGDPHVPPKYTSLGSSYYKIWRQEGIRRGLYGGWLPAMMGSFPGTVLFFGTYEWSKRHMLDYGIQSHVSYLTAGFLGDLAASIVYVPSEVLKTRLQLQGRHNNPFFKSGYNYRGTFDAARTIVRTEGLTELFSGYKATLYRDLPFSALQFMFYEQFQTWAREWKDSRDIGVQLELLTGAAGGGLAGVITCPLDVVKTRLQTQIDPPPALHKPKDRSVTDVKSAVKETSPKLAKDTPSHNSIRPISTSSPSTSTPRPGAIPLDENSIFKGLRLIYKTEGVGGWFRGVGPRFVWTSVQSGCMLFLYQSILRQLETLMPVERSEMS

SEQ ID NO: 5081 - DNA, 1675 bp, Muscodor strobelii
  misc_feature: SGI EST ID NO. CUFF.12842.0
  misc_feature: Variant of the nucleotide sequence at SEQ ID NO 5079
gttgaagtatgccgatagcagcagatacgtcagtcccggtcgcgctagaattttttgaatgccataccgagaggaccctagcctgagtcgctgtgctggcgacgtcgtctggccgcatactgcgcgatcagtatcccacctccatcaccaacaaatctcgtcccttcgccgatacctttttcctgcgccccgtgcgccaccactattttgtttcactgcattccgagaccatgaggcgcacttgagccgcaccgtctttaccgatcccgttgacgatggactggaggaaacataactgctgcgaacacatctacttgtttacgaccgggctgcagatagaagatgacagctagcggcgatggcgactctgaagggcgcccgccgtatatccactccatgatcgccggaggccttgggggaaccaccggtgacatgttgatgcactccctcgacaccgtcaagactcggcagcaaggcgatccgcacgtgcctcctaaatacacatctctaggatcatcatactacaagatatggcggcaggagggtatcaggcgggggctgtacggcggctggctgccagccatgatgggctcattccccggcaccgtgcttttcttcggcacctacgaatggagtaaacggcacatgctcgactacggcatacagtcgcatgtgtcctatctcacggctgggtttcttggcgaccttgccgcatccatcgtctatgtgccctccgaggtgctaaaaacacgtctgcagcttcagggacgccacaataaccctttcttcaaatccggctacaactaccgcggcacattcgacgctgccaggaccatcgttcgaaccgaaggactcactgagctcttttctggatataaagcaacattataccgagaccttcccttttctgcattgcaattcatgttctatgagcaattccaaacgtgggcgcgagagtggaaagatagtcgagatatcggggttcagctggagctactcacgggcgcagctggaggaggattggcgggagtgatcacttgtccgctggatgtcgtgaagacgcgacttcagactcagatcgacccaccgccagctttacacaaacccaaagaccgttcagtgaccgatgtcaagtctgctgtcaaggaaacctctcccaagcttgccaaagacactccgtcacataactccatacgccctatttcgacatcatctccgtcgacatccacccctcgtccgggtgctatccccttggacgagaactcaatattcaagggattacggctcatatacaagacggaaggagttggagggtggtttcggggagtcgggccccgtttcgtgtggaccagcgtgcaaagcggctgcatgttattcttgtaccaatcgatattacgacagttggaaacactaatgccggtagagcgatcggaaatgtcttgataagtcgggcgggtatgacatggcttcttggctggtgtatgaccatctgtataaaacaaggggcatttacaaggcgttggggaatacgatatagacaagggagaaggagtagataatatgtactctagtagagatctcaccacatatatggatgtaaatgtactatagaacacgagaagctggagagaaagtaccagcagtaacaacactcaagaaagcatacaacctatca

SEQ ID NO: 5082 - DNA, 2988 bp, Muscodor strobelii
  misc_feature: SGI cDNA ID NO. 561403
  misc_feature: Reduced expression when VOC is produced
  misc_feature: Encodes the peptide sequence at SEQ ID NO 5083
atgtcgacgcctttgcccgttctctcaaaggccgccatacgagcgctgcgcggattagcgctgggaacttcgtgtgccatcggcgccatcgtcgaggaccgccggcggcgcatctgcacgctgaggaaggccgtcgccaacaaggagaagctcaagtcctccaagcactactaccacggcagcgcccagctggccaaggaacatctcgacggcacatccgcacatccatccatccatcccacaggcactgtctcgtgggttgaagacgagtatcgacgcagcctccatgccgacaacaccctcttcacctctcctcctaccgaaacctccaactccgcacatccctcaaggcacgacacactcaaccaccgtccgaataggccgtctcctgctgcagagccttcgactctctctatctcaccctctcaaccacccatacctcatgccgccgcgatttctgaaccgccaggcgggttctctcttcgaaaagtccgcgacaatgtgcgaaccccggactggctgcgagctagaccgtccaacacaggcaacaatgcaaaccatcagagccccatcccagcggctccggggaagaaacgtatgcagacacccgtcaccgagattgaagacatgctagcccaggccgacgacccctcacggcttacccgcgctatgtctgcattcattagctactctcgccctgatatctacgatagatactaccaagtgtggccggggctgtcaacgcgcatcaccagagagctgcaagagaacgatcggtgggaagacgccggtcgcgtcttgacttcgaccatcgagttgggaccgctcgatgaagccgagtatttcgcccacgacccgatccccataatggaccacttcattcgcttacgagaatccgcttcttccaatacttggtccgagtatatcaggttcgctgctaacatcttcctggccgacttcaaagattacccagtgtcacatgcgaaagacattgaacgcattggaagacggttgatggctgaattgctcgctgcaaatttgcatattctcgctcgtatggtgtaccgcaggaccttggctttgaccgagcagcctcctgcatttgttcgatgggccatcgtgcaactgtataagcaccgtgactacctcaatgttgtcaaagcttttctaaacacctactcttacatggagatggaccctgccaactttacccagaccttggatcatgtcatagaatctgttcagcgcttgaaaggattgcactctgcggaaatccttgatgctctcgcccgtatcaagaagccgactaaattgagatcgcgctggattatgaaactgcttgaatccttttcagaacgacatcgcgacttcagtgaatcaactcaactttttgagaaagtcgtggaacttggattactagaaagagttggccacccccaggccgtgtgtcgtaccatggtggagctttcagtcaaggctgggaacgaggagacggccaccaaattcttcgagatggcggtggaatacgatgcgaccatggagcatgatattcagctccgctcttttcttgccttgtccagagctatgcaacaagactgggaggctgtctacgagattttcgcccagatgcaacgccacaacgctgaagatcaagctacgtacgatcgcgcgtttgtcatgatcctgaaaatattcgtgcgggataacagggaagttcacgagatcgaaaaagtgcatgacttcgttactcagtatcaacgcgaactgggcgtcggatttcatcctcatatgatgacactaatcgctgaccagtatggcaaagttcgcgacgtagaaggcttcctgggctggcttgccgaatccgtcagagctgggttcaaacccgaggccggtttctgtaactcggtgatgcacaattgtgccagcaaatggaaactcaacttcgccgagatacaaaagatttattatgctttcgaggctctaaacccagactttcgagatgaagctacacacagaatcgtgagccggacgtatcgtggaggcgatcgcgtgaaatcgcgggccaatgatccgagccaagctcctcgtcgccgattaccagcgtccactaggatagacaggatggcacaaacgggaagaagcacaaaccagcggaatgtctacgaggccatgcatcaacagctcattctgggcaagccaaagacggctgcaaggacttaccaaagggccatgcactttggcatgctgttcagcgaggagtgcttctatctggctgttgtggcccagctccggcagaccaaccggggtttggggccggcgttggatctcatcgaagaagctcatgttaacggacacgacgtaacacgtgccgtgacagcgttcatccgcttccaaatcgatgagtttcagggatctaccagcgaagctttcccttttatgggtgggtggattgaccactttgaagaaagacaaatcgccatctcgccctccgtacttactcacctggcgatagcgtctaacagatactgccattttgaaagagctgtcactttatgtaccctggcctacgagagagcgggtgctaccactctcgctttctcccggcagaacattgtggcgctttcaacggcctacgccgggtgcttcgacctccaaggactacaaaaactgttcgatcaactgctccaaagcgagtacgcgcacgatctttatgtgctgagacacgttcagtcgcttcggagatggagaatgaagttgtccgatagtcgcgtcgggctcatgatcctagagctgatcgaggagacggaggatatgatgaagaacaagcggactgcgacgagagaggaagggaaatatatcgcggctgagactctgaatatcatgcgccatgctttggcggattttcagagggatgagtcctcacatggtgggatggagggccgtgatctgttctcgaaaagcagcatcgagattatgggtgctgcgtga

SEQ ID NO: 5083 - protein, 995 aa, Muscodor strobelii
  misc_feature: SGI Peptide ID NO. 561403
  misc_feature (1)..(967): NCBI GI: 164423560 Blast Desc: NCU08279 [Neurospora crassa OR74A] gi|157070146|gb|EAA32671.2| [Neurospora crassa OR74A]
  misc_feature (243)..(799): NCBI GI: 171690338 Blast Desc: protein product [Podospora anserina] gi|170945117|emb|CAP71228.1| protein product [Podospora anserina]
  misc_feature (486)..(888): NCBI GI: 116196322 Blast Desc: CHGG_04759 [Chaetomium globosum CBS 148.51] gi|88180672|gb|EAQ88140.1| CHGG_04759 [Chaetomium globosum CBS 148.51]
  misc_feature (1)..(980): NCBI GI: 156035715 Blast Desc: SS1G_13061 [Sclerotinia sclerotiorum 1980] gi|154698466|gb|EDN98204.1| SS1G_13061 [Sclerotinia sclerotiorum 1980]
  misc_feature (1)..(608): NCBI GI: 145603300 Blast Desc: MGG_06140 [Magnaporthe grisea 70-15] gi|145011558|gb|EDJ96214.1| MGG_06140 [Magnaporthe grisea 70-15]
  misc_feature (1)..(618): NCBI GI: 154294015 Blast Desc: BC1G_14041 [Botryotinia fuckeliana B05.10] gi|150845086|gb|EDN20279.1| BC1G_14041 [Botryotinia fuckeliana B05.10]
  misc_feature (399)..(960): NCBI GI: 261353082 Blast Desc: [Verticillium albo-atrum VaMs.102]
  misc_feature (417)..(880): NCBI GI: 46123677 Blast Desc: FG06216.1 [Gibberella zeae PH-1]
  misc_feature (437)..(890): NCBI GI: 256726859 Blast Desc: NECHADRAFT_58033 [Nectria haematococca mpVI 77-13-4]
  misc_feature (1)..(63): NCBI GI: 171690338 Blast Desc: protein product [Podospora anserina] gi|170945117|emb|CAP71228.1| protein product [Podospora anserina]
  misc_feature: Useful for introducing or modulating the production of volatile compounds
MSTPLPVLSKAAIRALRGLALGTSCAIGAIVEDRRRRICTLRKAVANKEKLKSSKHYYHGSAQLAKEHLDGTSAHPSIHPTGTVSWVEDEYRRSLHADNTLFTSPPTETSNSAHPSRHDTLNHRPNRPSPAAEPSTLSISPSQPPIPHAAAISEPPGGFSLRKVRDNVRTPDWLRARPSNTGNNANHQSPIPAAPGKKRMQTPVTEIEDMLAQADDPSRLTRAMSAFISYSRPDIYDRYYQVWPGLSTRITRELQENDRWEDAGRVLTSTIELGPLDEAEYFAHDPIPIMDHFIRLRESASSNTWSEYIRFAANIFLADFKDYPVSHAKDIERIGRRLMAELLAANLHILARMVYRRTLALTEQPPAFVRWAIVQLYKHRDYLNVVKAFLNTYSYMEMDPANFTQTLDHVIESVQRLKGLHSAEILDALARIKKPTKLRSRWIMKLLESFSERHRDFSESTQLFEKVVELGLLERVGHPQAVCRTMVELSVKAGNEETATKFFEMAVEYDATMEHDIQLRSFLALSRAMQQDWEAVYEIFAQMQRHNAEDQATYDRAFVMILKIFVRDNREVHEIEKVHDFVTQYQRELGVGFHPHMMTLIADQYGKVRDVEGFLGWLAESVRAGFKPEAGFCNSVMHNCASKWKLNFAEIQKIYYAFEALNPDFRDEATHRIVSRTYRGGDRVKSRANDPSQAPRRRLPASTRIDRMAQTGRSTNQRNVYEAMHQQLILGKPKTAARTYQRAMHFGMLFSEECFYLAVVAQLRQTNRGLGPALDLIEEAHVNGHDVTRAVTAFIRFQIDEFQGSTSEAFPFMGGWIDHFEERQIAISPSVLTHLAIASNRYCHFERAVTLCTLAYERAGATTLAFSRQNIVALSTAYAGCFDLQGLQKLFDQLLQSEYAHDLYVLRHVQSLRRWRMKLSDSRVGLMILELIEETEDMMKNKRTATREEGKYIAAETLNIMRHALADFQRDESSHGGMEGRDLFSKSSIEIMGAA

SEQ ID NO: 5084 - DNA, 1545 bp, Muscodor strobelii
  misc_feature: SGI cDNA ID NO. 561404
  misc_feature: Reduced expression when VOC is produced
  misc_feature: Encodes the peptide sequence at SEQ ID NO 5085
atgaatcgaacaacaataacctcgacgctcgtcgaggacttctccgtccggcggaccaagtaccacgaggcagacgttgtcgttgtaggcgcaggtgttttcgggtgcgccatcgccaacacgctcgcaaaccagggtcgcagcgtcatattactagagcgatggatgaaagaaccgaaccgcatcgtcggcgagctgctacagccaggcggatatgaaacattaaagaaattagggctggagcactgtgtcgaagacatcgatgcgatcaccgtctctggcatggacgtggtgtggtatggaaaggacatgtgcatgaaatacccatacgagggcgaaggcaaacgaccaccagcacaactcagctcagcaaacggccacacaaatgggcatgccaatggccacacgaacggcagcgcgaagaaagaagaaccgaccagaccacagggcaggagtttccaccacggccgcttcatccgccaactacggacaacctgtctcaaaaacccaaacataaccgtcttcgagaccgaagccatcgcaaccatcaaatccgactcctcccccgagattctaggggtagaaacccgaaccaccaacccagacacggggaaaaaagaagcagactgcttcttcggccaactcaccatcatagccgacggctacgcctccaaattccgcaaagaatacataacccgctcccccatcgtgcggtccaaattctacgccctagaactaatcgactgcaccctcccgcaccgcggctacggccacgtcgtaatcggaaaaaagaccttatgtctcctctaccagatcggcacacacgagacgcgagccctgataaacgtcccctcagacctccccgaagcatcagtcgcagcaggaggcgtacgaggctatctcacaaacacagtcctcccccaactgccgcccagcatccaacccagtttccgcgccgctttggaaaaagacgataagatccccccctcgatgccgaactcctggctcccccccaccaaacagggcgatacgccaggcctcgtgttgttgggcgacgcgatgaatatgcgccatccgctgacagggggcggtatgacagttgcactaaacgacgtccttatcctctctgatctcctctccccaacttccatacccaatttatcagatcatgctgcgatacgcaacgcgatgtctaccttgcactctaggcgtaaacatctgacctccataataaacgtcctagcacaagccctctacagcctcttcgcggcggaagacgccaacctagcgaaattgcagagggggtgttttaagtacttcgagatgggctggagtgcggaccccatggggtttttgggcgggttgatacagagcccgctgatgcttgcttatcattttttcacggtggcttttgtggcgatttgggaggattggaaggatgcgggactttggcttggtccgttgttgctttggagggcttgggtttgtctttggactgctgcggtggtttttttgccggttatgtggagggagcttcttgggtag

SEQ ID NO: 5085 - protein, 514 aa, Muscodor strobelii
  misc_feature: SGI Peptide ID NO. 561404
  misc_feature (212)..(491): Pfam Id: PF08491 Pfam Desc: Squalene epoxidase
  misc_feature (25)..(54): Pfam Id: PF01266 Pfam Desc: FAD dependent oxidoreductase
  misc_feature (17)..(511): NCBI GI: 39975869 Blast Desc: MGG_06139 [Magnaporthe grisea 70-15] gi|145011559|gb|EDJ96215.1| MGG_06139 [Magnaporthe grisea 70-15]
  misc_feature (17)..(513): NCBI GI: 116196320 Blast Desc: CHGG_04758 [Chaetomium globosum CBS 148.51] gi|88180671|gb|EAQ88139.1| CHGG_04758 [Chaetomium globosum CBS 148.51]
  misc_feature (17)..(512): NCBI GI: 156035761 Blast Desc: SS1G_13084 [Sclerotinia sclerotiorum 1980] gi|154698489|gb|EDN98227.1| SS1G_13084 [Sclerotinia sclerotiorum 1980]
  misc_feature (17)..(512): NCBI GI: 171690336 Blast Desc: protein product [Podospora anserina] gi|170945116|emb|CAP71227.1| protein product [Podospora anserina]
  misc_feature (17)..(512): NCBI GI: 154294065 Blast Desc: BC1G_14066 [Botryotinia fuckeliana B05.10] gi|150845111|gb|EDN20304.1| BC1G_14066 [Botryotinia fuckeliana B05.10]
  misc_feature (17)..(511): NCBI GI: 85104779 Blast Desc: NCU08280 [Neurospora crassa OR74A] gi|28923382|gb|EAA32570.1| NCU08280 [Neurospora crassa OR74A]
  misc_feature (17)..(511): NCBI GI: 261353081 Blast Desc: squalene monooxygenase [Verticillium albo-atrum VaMs.102]
  misc_feature (9)..(511): NCBI GI: 256726860 Blast Desc: [Nectria haematococca mpVI 77-13-4]
  misc_feature (1)..(511): NCBI GI: 90185988 Blast Desc: squalene epoxidase [Hypocrea lixii]
  misc_feature (9)..(511): NCBI GI: 46123675 Blast Desc: FG06215.1 [Gibberella zeae PH-1]
  misc_feature (38)..(513): SWISSPROT Homolog: EC 1.14.99.7 Squalene monooxygenase
  misc_feature: Useful for introducing or modulating the production of volatile compounds
MNRTTITSTLVEDFSVRRTKYHEADVVVVGAGVFGCAIANTLANQGRSVILLERWMKEPNRIVGELLQPGGYETLKKLGLEHCVEDIDAITVSGMDVVWYGKDMCMKYPYEGEGKRPPAQLSSANGHTNGHANGHTNGSAKKEEPTRPQGRSFHHGRFIRQLRTTCLKNPNITVFETEAIATIKSDSSPEILGVETRTTNPDTGKKEADCFFGQLTIIADGYASKFRKEYITRSPIVRSKFYALELIDCTLPHRGYGHVVIGKKTLCLLYQIGTHETRALINVPSDLPEASVAAGGVRGYLTNTVLPQLPPSIQPSFRAALEKDDKIPPSMPNSWLPPTKQGDTPGLVLLGDAMNMRHPLTGGGMTVALNDVLILSDLLSPTSIPNLSDHAAIRNAMSTLHSRRKHLTSIINVLAQALYSLFAAEDANLAKLQRGCFKYFEMGWSADPMGFLGGLIQSPLMLAYHFFTVAFVAIWEDWKDAGLWLGPLLLWRAWVCLWTAAVVFLPVMWRELLG

SEQ ID NO: 5086 - DNA, 378 bp, Muscodor strobelii
  misc_feature: SGI cDNA ID NO. 561405
  misc_feature: Encodes the peptide sequence at SEQ ID NO 5087
atgcgttccttccacctcgtcctcatgatcctcaccccgcccgccacgtcccgcatccgcgacacccagtgcggcttcaagctcttctcccgcgccgccctgccccacatcgtcccctacatgcacgctgagggctggatcttcgacatcgagatgctcatgctcgccgagtccgcccccgccgtccccgtccttggcttcgacggcgctgttatcggcagctccccgggcatcaaggtcgccgaggtgcccatcgactggcacgaggtcggcggcagcaagctgaacgtcatacaggacagcatcaagatggcgctgggcctggccattctgcgagcaagctggatgatgggtgtctatcgtcgacggctgacgtag

SEQ ID NO: 5087 - protein, 125 aa, Muscodor strobelii
  misc_feature: SGI Peptide ID NO. 561405
  misc_feature (1)..(125): NCBI GI: 256727426 Blast Desc: glycosyltransferase family 2 [Nectria haematococca mpVI 77-13-4]
  misc_feature (1)..(125): NCBI GI: 46123673 Blast Desc: FG06214.1 [Gibberella zeae PH-1]
  misc_feature (1)..(125): NCBI GI: 39975873 Blast Desc: conserved [Magnaporthe grisea 70-15] gi|59802877|gb|AAX07652.1| dolichyl-phosphate beta-glucosyltransferase-like protein [Magnaporthe grisea] grisea
  misc_feature (1)..(124): NCBI GI: 85106656 Blast Desc: NCU06386 [Neurospora crassa OR74A] gi|28923824|gb|EAA32988.1| NCU06386 [Neurospora crassa OR74A]
  misc_feature (1)..(125): NCBI GI: 261353080 Blast Desc: dolichyl-phosphate beta-glucosyltransferase [Verticillium albo-atrum VaMs.102]
  misc_feature (1)..(125): NCBI GI: 116196318 Blast Desc: CHGG_04757 [Chaetomium globosum CBS 148.51] gi|88180670|gb|EAQ88138.1| CHGG_04757 [Chaetomium globosum CBS 148.51]
  misc_feature (1)..(125): NCBI GI: 171690316 Blast Desc: protein product [Podospora anserina] gi|170945106|emb|CAP71217.1| protein product [Podospora anserina]
  misc_feature (1)..(123): NCBI GI: 154294071 Blast Desc: BC1G_14069 [Botryotinia fuckeliana B05.10] gi|150845114|gb|EDN20307.1| BC1G_14069 [Botryotinia fuckeliana B05.10]
  misc_feature (1)..(123): NCBI GI: 156035775 Blast Desc: SS1G_13091 [Sclerotinia sclerotiorum 1980] gi|154698496|gb|EDN98234.1| SS1G_13091 [Sclerotinia sclerotiorum 1980]
  misc_feature (1)..(122): NCBI GI: 154271526 Blast Desc: dolichyl-phosphate beta-glucosyltransferase [Ajellomyces capsulatus NAm1] gi|150409286|gb|EDN04736.1| dolichyl-phosphate beta-glucosyltransferase [Ajellomyces NAm1]
  misc_feature (1)..(121): SWISSPROT Homolog: EC 2.4.1.117 Dolichyl-phosphate beta-glucosyltransferase
MRSFHLVLMILTPPATSRIRDTQCGFKLFSRAALPHIVPYMHAEGWIFDIEMLMLAESAPAVPVLGFDGAVIGSSPGIKVAEVPIDWHEVGGSKLNVIQDSIKMALGLAILRASWMMGVYRRRLT

SEQ ID NO: 5088 - DNA, 595 bp, Muscodor strobelii
  misc_feature: SGI EST ID NO. CUFF.12845.0
  misc_feature: Variant of the nucleotide sequence at SEQ ID NO 5086
gcagcgagcaggtcgtccggcgctctgctctgcgcaacttcctcatgcgttccttccacctcgtcctcatgatcctcaccccgcccgccacgtcccgcatccgcgacacccagtgcggcttcaagctcttctcccgcgccgccctgccccacatcgtcccctacatgcacgctgagggctggatcttcgacatcgagatgctcatgctcgccgagtccgcccccgccgtccccgtccttggcttcgacggcgctgttatcggcagctccccgggcatcaaggtcgccgaggtgcccatcgactggcacgaggtcggcggcagcaagctgaacgtcatacaggacagcatcaagatggcgctgggcctggccattctgcgagcaagctggatgatgggtgtctatcgtcgacggctgacgtagagatgagagatgattagatatgactttagagagcagctagctacctgacttttgagcgaaaacgaaagctgctactgagattagacaaaatgcgttgtattatcttgtttgctgttgctatataccccgactaaaatacagcattgcgttgcgttcatcaagatgtcttcttt

SEQ ID NO: 5089 - DNA, 909 bp, Muscodor strobelii
  misc_feature: SGI cDNA ID NO. 561406
  misc_feature: Reduced expression when VOC is produced
  misc_feature: Encodes the peptide sequence at SEQ ID NO 5090
atggcccaattgcaccctaatggcaaccacgaccacggcggatgtgacgcaccttccgaagctgtggtagaagaactcggcgaaaaagtagtcagaagccactcagagtggcaaaaggtgctgcggacgctaagcaacctgtttgatacgtattgtcatgacgataaggcgggtcgactatccctcgctagggcattgtcggtctggaagactcttgaaccggacaatattgaagacatggaagaggaaattgccgcagtggacaacaacttcgcgaatgtattgcgaatagggcggattctctatgatatggcctacaacatcaacaaagatgagggagcagcccccttcgagaaactatatgatgccgaaacgctcaaatacgatgagctccagaaccagatcgtccgcaattataaacagttgaagcaagctacgaaacaaactggcctgtgggaggactgggaaaggatggaagaatactggactgggcaggctatcacgcatggcagttcggtgggaagaccggatcgagtcatcccgacaattccgaataagaacgcgcctacgacttcgaataataattctctcgcaattccgaataaggatccgtctcagaatggcataaacgccggctttggccctggatctcatacaatcgagatcccgggtctatcactcgaacctctgcacttttcggtttcgttgtccccttgtatcagatcaccttcttcttccacggcaactctcgccgagtctccgactgagacgggttctttcacactcgaggctgagaccacaacagagaaggagcgcggatcatctgtacccggaagcccagccacggtgaaatattcaccacccacatcaccgacgaagagcctgtctgctcctgccaaggtcaagtag

SEQ ID NO: 5090 - protein, 302 aa, Muscodor strobelii
  misc_feature: SGI Peptide ID NO. 561406
  misc_feature: Useful for introducing or modulating the production of volatile compounds
MAQLHPNGNHDHGGCDAPSEAVVEELGEKVVRSHSEWQKVLRTLSNLFDTYCHDDKAGRLSLARALSVWKTLEPDNIEDMEEEIAAVDNNFANVLRIGRILYDMAYNINKDEGAAPFEKLYDAETLKYDELQNQIVRNYKQLKQATKQTGLWEDWERMEEYWTGQAITHGSSVGRPDRVIPTIPNKNAPTTSNNNSLAIPNKDPSQNGINAGFGPGSHTIEIPGLSLEPLHFSVSLSPCIRSPSSSTATLAESPTETGSFTLEAETTTEKERGSSVPGSPATVKYSPPTSPTKSLSAPAKVK

SEQ ID NO: 5091 - DNA, 2071 bp, Muscodor strobelii
  misc_feature: SGI EST ID NO. CUFF.12891.0
  misc_feature: Variant of the nucleotide sequence at SEQ ID NO 5089
catttccaccgacgacagaatagaaaagcagaaaccggaattcaattggatctttttggcaatcatcaaacacccaatccattttttacttggtcatctagttcgcttctcacctcctcttgcaacgatggacaacccgcaggttgagatcacccgagtgatcaaggacctcaccgagggcaccaaagaggaacaggagcatgctatcatgacatacttcctccccgatgcctactttgttcatccattctgccgtgtccaacccatgaagtctaaagacatcaaattgcccttcgtgcatcaaccatggacgatcaattcgcgctatttcctctggctcatctaccagtggtatcatatcctcagtccaaagatcaagctcgaggtcgattcgactgcatttgacaagcgaaacaacttactctacgccactattcgacagaccttcaccctctggattgtgcccttctctctctggcaagcaaatgtgaagctcgtatgtctactcgaactagctcacctcccggaagaccgcgacggtcaacccgtcatgaacgggagcgctcataggaacggtaacgcaaatctacccaagaaatacttcatcaaagggcagcaagaccattaccaaatcaatgaatttctcaaattcatcgctccctttggtgctgcttctgtttggtatgcctggcagctcttcgctacgttcatctgcgctgttggggtctactgtctctggcctatcacagctatctacgagacatttgttcgaaggccgtcccccagccagcagaagagggactagaagcaccctcctcagctgcggatttcaaagcctttgcactggatggcccaattgcaccctaatggcaaccacgaccacggcggatgtgacgcaccttccgaagctgtggtagaagaactcggcgaaaaagtagtcagaagccactcagagtggcaaaaggtgctgcggacgctaagcaacctgtttgatacgtattgtcatgacgataaggcgggtcgactatccctcgctagggcattgtcggtctggaagactcttgaaccggacaatattgaagacatggaagaggaaattgccgcagtggacaacaacttcgcgaatgtattgcgaatagggcggattctctatgatatggcctacaacatcaacaaagatgagggagcagcccccttcgagaaactatatgatgccgaaacgctcaaatacgatgagctccagaaccagatcgtccgcaattataaacagttgaagcaagctacgaaacaaactggcctgtgggaggactgggaaaggatggaagaatactggactgggcaggctatcacgcatggcagttcggtgggaagaccggatcgagtcatcccgacaattccgaataagaacgcgcctacgacttcgaataataattctctcgcaattccgaataaggatccgtctcagaatggcataaacgccggctttggccctggatctcatacaatcgagatcccgggtctatcactcgaacctctgcacttttcggtttcgttgtccccttgtatcagatcaccttcttcttccacggcaactctcgccgagtctccgactgagacgggttctttcacactcgaggctgagaccacaacagagaaggagcgcggatcatctgtacccggaagcccagccacggtgaaatattcaccacccacatcaccgacgaagagcctgtctgctcctgccaaggtcaagtagtatgcgactagaaacactgcgtctccggctagatcaaggccgaagtctcgatctcgtggctctagcgactaaggggatggtatgataggattgtattgattaggtgttatgctggagggctttgtattgtttcaattgtttgtttgtgttagggtgcggttgagaatagggttttcgaagaacttggttccttgctgctatgggatggcttgaatgtgtagtattatcaaagtcttgagtgggtgatatagttaccaataacaacgcctctaagagggcttctgtagctgttacgccgtcattttcaaggcacac

SEQ ID NO: 5092 - DNA, 678 bp, Muscodor strobelii
  misc_feature: SGI cDNA ID NO. 561407
  misc_feature: Reduced expression when VOC is produced
  misc_feature: Encodes the peptide sequence at SEQ ID NO 5093
atggacaacccgcaggttgagatcacccgagtgatcaaggacctcaccgagggcaccaaagaggaacaggagcatgctatcatgacatacttcctccccgatgcctactttgttcatccattctgccgtgtccaacccatgaagtctaaagacatcaaattgcccttcgtgcatcaaccatggacgatcaattcgcgctatttcctctggctcatctaccagtggtatcatatcctcagtccaaagatcaagctcgaggtcgattcgactgcatttgacaagcgaaacaacttactctacgccactattcgacagaccttcaccctctggattgtgcccttctctctctggcaagcaaatgtgaagctcgtatgtctactcgaactagctcacctcccggaagaccgcgacggtcaacccgtcatgaacgggagcgctcataggaacggtaacgcaaatctacccaagaaatacttcatcaaagggcagcaagaccattaccaaatcaatgaatttctcaaattcatcgctccctttggtgctgcttctgtttggtatgcctggcagctcttcgctacgttcatctgcgctgttggggtctactgtctctggcctatcacagctatctacgagacatttgttcgaaggccgtcccccagccagcagaagagggactag

SEQ ID NO: 5093 - protein, 225 aa, Muscodor strobelii
  misc_feature: SGI Peptide ID NO. 561407
  misc_feature (1)..(206): NCBI GI: 46124321 Blast Desc: FG06538.1 [Gibberella zeae PH-1]
  misc_feature (7)..(207): NCBI GI: 261352508 Blast Desc: conserved [Verticillium albo-atrum VaMs.102]
  misc_feature (7)..(206): NCBI GI: 256726413 Blast Desc: [Nectria haematococca mpVI 77-13-4]
  misc_feature (1)..(196): NCBI GI: 39941324 Blast Desc: MGG_05573 [Magnaporthe grisea 70-15] gi|145022245|gb|EDK06265.1| MGG_05573 [Magnaporthe grisea 70-15]
  misc_feature (1)..(206): NCBI GI: 259485219 Blast Desc: TPA: conserved [Aspergillus nidulans FGSC A4]
  misc_feature (1)..(206): NCBI GI: 67538338 Blast Desc: AN5339.2 [Aspergillus nidulans FGSC A4] gi|40743309|gb|EAA62499.1| AN5339.2 [Aspergillus nidulans FGSC A4]
  misc_feature (1)..(211): NCBI GI: 255946628 Blast Desc: Pc22g00360 [Penicillium chrysogenum Wisconsin 54-1255] gi|211591098|emb|CAP97324.1| Pc22g00360 [Penicillium chrysogenum Wisconsin 54-1255]
  misc_feature (1)..(206): NCBI GI: 116196132 Blast Desc: CHGG_04664 [Chaetomium globosum CBS 148.51] gi|88180577|gb|EAQ88045.1| CHGG_04664 [Chaetomium globosum CBS 148.51]
  misc_feature (1)..(209): NCBI GI: 115492789 Blast Desc: conserved [Aspergillus terreus NIH2624] gi|114197882|gb|EAU39582.1| conserved [Aspergillus terreus NIH2624]
  misc_feature (1)..(213): NCBI GI: 189211249 Blast Desc: conserved [Pyrenophora tritici-repentis Pt-1C-BFP] gi|187978048|gb|EDU44674.1| conserved [Pyrenophora tritici-repentis Pt-1C-BFP]
  misc_feature: Useful for introducing or modulating the production of volatile compounds
MDNPQVEITRVIKDLTEGTKEEQEHAIMTYFLPDAYFVHPFCRVQPMKSKDIKLPFVHQPWTINSRYFLWLIYQWYHILSPKIKLEVDSTAFDKRNNLLYATIRQTFTLWIVPFSLWQANVKLVCLLELAHLPEDRDGQPVMNGSAHRNGNANLPKKYFIKGQQDHYQINEFLKFIAPFGAASVWYAWQLFATFICAVGVYCLWPITAIYETFVRRPSPSQQKRD

SEQ ID NO: 5094 - DNA, 2071 bp, Muscodor strobelii; identical to SEQ ID NO: 5091
  misc_feature: SGI EST ID NO. CUFF.12891.0
  misc_feature: Variant of the nucleotide sequence at SEQ ID NO 5092

SEQ ID NO: 5095 - DNA, 543 bp, Muscodor strobelii
  misc_feature: SGI cDNA ID NO. 561408
  misc_feature: Elevated expression when VOC is produced
  misc_feature: Encodes the peptide sequence at SEQ ID NO 5096
atgtctgagcacaatcccgctacgatgatggctctgtgcccagaagacgaaccatcaccaagaccaccaagcgtcgatgaatattcggtttacccagagcttcacgaggatgactttgatggcggtaactggtaccatcttgtgcggacggttccttctaaagacgccgacgtgaaggagtacagaggcagatgggcctatttcctttggtcgcgatacccagagttcaacgacctctgcttaaagaagcaggccatacacgacctccagcgtctaatcaaggattatcggttgaaagaacgaggcattcagactcttggagagaggcttgatgctactctgcaaagcagtacaccgccggctgcgcgtcagcagaggaatggaggaaatgcaaatggaggattcgactatatggcccatgaagagtttatgcgaggcaccagagccgctggggctcctcctaaggcaaccaataatcgagctagctgggatgggatggctgcttgtactattgctgctgccaccgccgctaatcattattaa

SEQ ID NO: 5096 - protein, 180 aa, Muscodor strobelii
  misc_feature: SGI Peptide ID NO. 561408
  misc_feature: Useful for introducing or modulating the production of volatile compounds
MSEHNPATMMALCPEDEPSPRPPSVDEYSVYPELHEDDFDGGNWYHLVRTVPSKDADVKEYRGRWAYFLWSRYPEFNDLCLKKQAIHDLQRLIKDYRLKERGIQTLGERLDATLQSSTPPAARQQRNGGNANGGFDYMAHEEFMRGTRAAGAPPKATNNRASWDGMAACTIAAATAANHY

SEQ ID NO: 5097 - DNA, 1878 bp, Muscodor strobelii
  misc_feature: SGI EST ID NO. CUFF.12852.0
  misc_feature: Variant of the nucleotide sequence at SEQ ID NO 5095
cccatttcgaagctgccttcttcggtcacactccgcaactgacacccggaatctcacctcctctcacctacaaagagacacccccacgtcgactagtgtgccaggcattcaagatgatcaaggcagctcggcagccagaccttaagagtttgagtgagactacaacatcaaattgtcagccaggtttgcgaaactagcaacgatctactactcatgatattgtctcaaagctgaatccgtcatataccctaccgggtatcccagaagcctctgaaccgttcatttgcttcatagccgggcgacaacgcattgtgaacaagctgaaaatgtgagacgcattaccgagagagtgttacatcttcttattcatcattacatgtatgcaaacaactgaggctgtggcattggcggcatgtctgtcacttacccccaacacaaaataataccaatggcaactactaccgtggaggtaatgttaaaggagtcataccttactttgtagtaggatgcatgagcgacacttccaccagacatgaaaagattccaattgtagctacctatcccgtaggtacgggggatgtcattacctagcatctttctgtattcagagggagagtgacctatctatcctagtatacctatccttatctaagacagcctgttcaacgaacgcgatcatcgtcacatcttcatccctccaggatcacagtccatcattacagcttttcaatcgaagttttcctagccgtcgctttaggtgtagcatcgcagttttaccgtcgaaataatcgatacttttcgccatatctcccatcatgtctgagcacaatcccgctacgatgatggctctgtgcccagaagacgaaccatcaccaagaccaccaagcgtcgatgaatattcggtttacccagagcttcacgaggatgactttgatggcggtaactggtaccatcttgtgcggacggttccttctaaagacgccgacgtgaaggaggtgcgcctttggctgggccgtcttttcgcacgctaccatcgacccaacgttctacgcatcgtcaacggattttattgggacggcaataaacttcaccgcttctacgatctcagctgtcgtccctagtacagaggcagatgggcctatttcctttggtcgcgatacccagagttcaacgacctctgcttaaagaagcaggccatacacgacctccagcgtctaatcaaggattatcggttgaaagaacgaggcattcagactcttggagagaggcttgatgctactctgcaaagcagtacaccgccggctgcgcgtcagcagaggaatggaggaaatgcaaatggaggattcgactatatggcccatgaagagtttatgcgaggcaccagagccgctggggctcctcctaaggcaaccaataatcgagctagctgggatgggatggctgcttgtactattgctgctgccaccgccgctaatcattattaatgttatcttacagtgatggacagaatcacctacacagtatttgtaaactagaatgatgatacaatacctaatacgacgaatcgagggatgcacaaccctcggatcattgtgggataatcattcagaagacttgtaggtagctgtctagttacaagaagggagtgaccgagcctagtttggatcttgtgactttcgaataaacctgcgaataaagctggtatgtatacacacctaaacctgtgtatcatgctcaagggagcgtacagtatcacctcatatgatgacacgaataagccgggcagctagcgacaacaattggagacctgtctctcactacaggttgagacaataatcgtaggcaagtgtctgtcacgttttggttgaagtctgaaag

SEQ ID NO: 5098 - DNA, 2958 bp, Muscodor strobelii
  misc_feature: SGI cDNA ID NO. 561409
  misc_feature: Encodes the peptide sequence at SEQ ID NO 5099
atggacatggatcactcgccgacgtcgcctccggcgcatccctcgaaacgtccgcgtcccacgtctccggccgccgtcaaagactccccgacgtctgtggcgacgggccccatgtccccggcggccgaggcgcacgatggcatgggatcgtccaagtccgggcagagcagcagctttcggaatgtgagcgcatgtaatcgctgccgcctgcgcaagaatcgctgcgaccagaagctgccgagctgtgcgagttgtgagaaggcaagggttgcatgtgtcggctacgaccccatcaccaagagagagattccacgcagctatgtatattacctcgagacccgcgtcgaccagctcgaaagtctgctccgcgcacagaacatcgagttcccgcctgccacaaacctcgaatactgctcaagaccgggcaccgacgggggccacgcgcgatccccgaccgaaggctcgctgaccatgctatccgatgccgtcgaagcctcggctatctcgcagccgtatcacaatggcgacgattcgggccggccggccaagataatgcgggggaatgacggcacacggcagaggtatctgggctccgcgaatggtgtctcctttgcgcgtgtcgttttcgcagctgtgcagtcctccgtcggtgaccatcgatccagttctgataagggtggcataaggccatacaggccgatcgcaggaaacggggcgccaggaggcacttcgatgcgcgactcattcttcgggctccatacgcgcccaaccatcagccctgccgagtttcccgacaaaggcctggcgctcaagctggtcgagctgtatttcgaatatgctaatcctcagatacccatcctccaccgcgtcgacttcatgcagatgtttgagctcgcatatgccgaccaagggagagtgcgaggtccgagggagctgtacatgctgaatatggtctttgctattggcggcggtatcatcatggatagccaggcaacatctaaagtttccggccaagagaagaagcaggcacagcccgaggaatatcacgcaagcgccatcattcatctcgaggcctgtctcaatggtggtggccttgaggaactccaagccgtgcttcttttggcaagctttgctttgcttaggcccgtgccaccaggcttatggtatattgtgggtgttgccatgagattggctgttgacctgggcctgcactatgaagatggaaaagatgtggaattcgaccttgaaaacacgaaaattggcaatgcaagtggtcctgacgacaaatcgcgtgaagctatttctcgagaaaggggtcggcgcgaatacgtgcgcgatcttcgcaggcgactttggtggtgcacgtatgcttttgacagactggtcagcacttgcgtcggccggccatttggcgtatcagaccaagtcatcaccactgagttcccctcgatgcttgacgatcggtatattacccaaggagggtttgctagaccatcatcgggcgacgagcctacttataagattgttgcgaagcattatctacggcttcgattgctgcagtcggagatattgcaagtcttacagtaccagcaagctcgcgcagcgagaataagtgggcagaatctgcgaaatgagtatatgcatactgaactgccgtcacccttcttgtctcgattcggttcagatccattccgatcgtggagaaaggacatagacggacgactatactcgtggaaaagcacagctcctacaaaacaagactctggcgtggccttttctcctgaatttttggagctgaattactggcaggccatcatcatgctttatcggcaaagtctaagcgtccccgccatgttcgagagcgagtatcatacatcaaaggaggtcaacagcccgtcaatatactcgcaagagttacaagaggaccaggaacgagtatatcttaaggtggcagaggcaggccaaaagatattacggctctacagaacacttcacctgcaaggactcgtcaattacacgtatctagccacacatcatttgtttatggcaggaatctcatatttatatgctatatggcattctatggttgtgagaagtcgcttgacaatggatgaagtggatttcactatattagccgcgacgtcagtgttcacagaccttatcgacaaatgtccaccagcagaggcttgccgtgatgcattcgatcggacggcgaaagcaaccatcaagatggccaactcaagtggcgggttcggacaagtactaaaccgaaataaacgtggctcaaggggcatggtagatagaatcgactacatgaacgccagagaagcgacatcaaatcgccacatggcacatactcacacacaagcagatcaacctctgcctcgctcagctaatctatacgacacatcaggttacgatccttatggcgctcaaaacagaggagcaaagatgaacgcgatgcctgcacctcctttccacctccacatacctaatatcaaatcagaacacgacggatatcctatgaatccctccatgaccacaaacagccctcttgaaggcccgcccatacccgataactcagcaatcgatcctgtcctactccctccccaaagtccacaagtgaactcccctgcatctggtgctagcgggacaccgaaacccgcacatcagcaattcggcacgccaaatgcttcgaatacgaacttcaacatgatgcgttcaccgggtgctggttacaatgccggagcgggtgcgctgaattttgcggatctgcagggtatggatttcttgcagaatctgcaggatccggggaataatgagggcgatatgcagatggatatggggtttgggattggctgggagggcgtgcatcatgattttagcgagggtcaacaggtcgatttgtttgatgggtttttctttggggctgggggcgggaatggtggggggctttga

SEQ ID NO: 5099 - protein, 985 aa, Muscodor strobelii
  misc_feature: SGI Peptide ID NO. 561409
  misc_feature (63)..(102): Pfam Id: PF00172 Pfam Desc: Fungal Zn(2)-Cys(6) binuclear cluster domain
  misc_feature (364)..(488): Pfam Id: PF04082 Pfam Desc: Fungal specific transcription factor domain
  misc_feature (443)..(488): Pfam Id: PF04082 Pfam Desc: Fungal specific transcription factor domain
  misc_feature (364)..(404): Pfam Id: PF04082 Pfam Desc: Fungal specific transcription factor domain
  misc_feature (44)..(752): NCBI GI: 189192791 Blast Desc: PTRG_02401 [Pyrenophora tritici-repentis Pt-1C-BFP] gi|187978298|gb|EDU44924.1| PTRG_02401 [Pyrenophora tritici-repentis Pt-1C-BFP]
  misc_feature (3)..(984): NCBI GI: 119494811 Blast Desc: C6 transcription factor (UaY), [Neosartorya fischeri NRRL 181] gi|119412372|gb|EAW22313.1| C6 transcription factor (UaY), [Neosartorya fischeri NRRL 181]
  misc_feature (3)..(984): NCBI GI: 70996320 Blast Desc: C6 transcription factor (UaY) [Aspergillus fumigatus Af293] gi|66850550|gb|EAL90877.1| C6 transcription factor (UaY), [Aspergillus fumigatus Af293] gi|159131669|gb|EDP56782.1| C6
  misc_feature (59)..(981): NCBI GI: 121700887 Blast Desc: C6 transcription factor (UaY), [Aspergillus clavatus NRRL 1] gi|119396851|gb|EAW07282.1| C6 transcription factor (UaY), [Aspergillus clavatus NRRL 1]
  misc_feature (2)..(978): NCBI GI: 67517229 Blast Desc: UAY_EMENI Positive regulator of purine utilization [Aspergillus nidulans FGSC A4] gi|146291093|sp|P49413.2|UAY_EMENI RecName: Full=Positive regulator of purine utilization UAY_EMENI
  misc_feature (53)..(752): NCBI GI: 226288926 Blast Desc: fungal specific transcription factor domain containing protein [Paracoccidioides brasiliensis Pb18]
  misc_feature (2)..(978): NCBI GI: 695414 Blast Desc: positive regulator of purine utilisation [Emericella nidulans]
  misc_feature (53)..(752): NCBI GI: 225681861 Blast Desc: fungal specific transcription factor domain containing protein [Paracoccidioides brasiliensis Pb03]
  misc_feature (9)..(983): NCBI GI: 212533567 Blast Desc: C6 transcription factor (UaY), [Penicillium marneffei ATCC 18224] gi|210072304|gb|EEA26393.1| C6 transcription factor (UaY), [Penicillium marneffei ATCC 18224]
  misc_feature (53)..(752): NCBI GI: 226284413 Blast Desc: fungal specific transcription factor domain containing protein [Paracoccidioides brasiliensis Pb01]
MDMDHSPTSPPAHPSKRPRPTSPAAVKDSPTSVATGPMSPAAEAHDGMGSSKSGQSSSFRNVSACNRCRLRKNRCDQKLPSCASCEKARVACVGYDPITKREIPRSYVYYLETRVDQLESLLRAQNIEFPPATNLEYCSRPGTDGGHARSPTEGSLTMLSDAVEASAISQPYHNGDDSGRPAKIMRGNDGTRQRYLGSANGVSFARVVFAAVQSSVGDHRSSSDKGGIRPYRPIAGNGAPGGTSMRDSFFGLHTRPTISPAEFPDKGLALKLVELYFEYANPQIPILHRVDFMQMFELAYADQGRVRGPRELYMLNMVFAIGGGIIMDSQATSKVSGQEKKQAQPEEYHASAIIHLEACLNGGGLEELQAVLLLASFALLRPVPPGLWYIVGVAMRLAVDLGLHYEDGKDVEFDLENTKIGNASGPDDKSREAISRERGRREYVRDLRRRLWWCTYAFDRLVSTCVGRPFGVSDQVITTEFPSMLDDRYITQGGFARPSSGDEPTYKIVAKHYLRLRLLQSEILQVLQYQQARAARISGQNLRNEYMHTELPSPFLSRFGSDPFRSWRKDIDGRLYSWKSTAPTKQDSGVAFSPEFLELNYWQAIIMLYRQSLSVPAMFESEYHTSKEVNSPSIYSQELQEDQERVYLKVAEAGQKILRLYRTLHLQGLVNYTYLATHHLFMAGISYLYAIWHSMVVRSRLTMDEVDFTILAATSVFTDLIDKCPPAEACRDAFDRTAKATIKMANSSGGFGQVLNRNKRGSRGMVDRIDYMNAREATSNRHMAHTHTQADQPLPRSANLYDTSGYDPYGAQNRGAKMNAMPAPPFHLHIPNIKSEHDGYPMNPSMTTNSPLEGPPIPDNSAIDPVLLPPQSPQVNSPASGASGTPKPAHQQFGTPNASNTNFNMMRSPGAGYNAGAGALNFADLQGMDFLQNLQDPGNNEGDMQMDMGFGIGWEGVHHDFSEGQQVDLFDGFFFGAGGGNGGGL

SEQ ID NO: 5100 - DNA, 4092 bp, Muscodor strobelii
  misc_feature: SGI EST ID NO. CUFF.12971.0
  misc_feature: Variant of the nucleotide sequence at SEQ ID NO 5098
ggccagccgtgctctgggtatcaaagacacacaggtcgactggttggggagtaataggtccatgcaagtaaataggcgatattgtaggtaggcaaggcaaggcaccggctccctgacgtgcatgtctctccatactatagacgaagattatgtgatcgcgctgtccgtctgcggatgattgattctttgcttgcgtctttgcaacaccttgacacgtcggatctcacaggatctcacaggcatcacttccccgctcgacttcatatgtgcgacatctcgacggcttgcttggctactgtcgacctccgatctctgacgtttgactgcacatccgctggaaacacagcccgcgcgatggagtgggagatggtcacgcccagcttctgcgagtgaatctgaccctgtctgcatgctgccttggctgggcgcattgccaacgtatccgtagaatttaattcacccgcagcgcgtcgcaccgtcgcaacgtcttgccggctgcgagcgttcccactgtcccggctggtccattcaagcttctatagcgaattccgcgtcttcgttccgctccagttccacgatggacatggatcactcgccgacgtcgcctccggcgcatccctcgaaacgtccgcgtcccacgtctccggccgccgtcaaagactccccgacgtctgtggcgacgggccccatgtccccggcggccgaggcgcacgatggcatgggatcgtccaagtccgggcagagcagcagctttcggaatgtgagcgcatgtaatcgctgccgcctgcgcaagaatcgctgcgaccagaagctgccgagctgtgcgagttgtgagaaggcaagggttgcatgtgtcggctacgaccccatcaccaagagagagattccacgcaggtcagccgctacccattttacttggctctgctcatcgatagacaaagatgctgttgaaactgacttcccttcagctatgtatattacctcgagacccgcgtcgaccagctcgaaagtctgctccgcgcacagaacatcgagttcccgcctgccacaaacctcgaatactgctcaagaccgggcaccgacgggggccacgcgcgatccccgaccgaaggctcgctgaccatgctatccgatgccgtcgaagcctcggctatctcgcagccgtatcacaatggcgacgattcgggccggccggccaagataatgcgggggaatgacggcacacggcagaggtatctgggctccgcgaatggtgtctcctttgcgcgtgtcgttttcgcagctgtgcagtcctccgtcggtgaccatcgatccagttctgataagggtggcataaggccatacaggccgatcgcaggaaacggggcgccaggaggcacttcgatgcgcgactcattcttcgggctccatacgcgcccaaccatcagccctgccgagtttcccgacaaaggcctggcgctcaagctggtcgagctgtatttcgaatatgctaatcctcagatacccatcctccaccgcgtcgacttcatgcagatgtttgagctcgcatatgccgaccaagggagagtgcgaggtccgagggagctgtacatgctgaatatggtctttgctattggcggcggtatcatcatggatagccaggcaacatctaaagtttccggccaagagaagaagcaggcacagcccgaggaatatcacgcaagcgccatcattcatctcgaggcctgtctcaatggtggtggccttgaggaactccaagccgtgcttcttttggcaagctttgctttgcttaggcccgtgccaccaggcttatggtatattgtgggtgttgccatgagattggctgttgacctgggcctgcactatgaagatggaaaagatgtggaattcgaccttgaaaacacgaaaattggcaatgcaagtggtcctgacgacaaatcgcgtgaagctatttctcgagaaaggggtcggcgcgaatacgtgcgcgatcttcgcaggcgactttggtggtgcacgtatgcttttgacagactggtcagcacttgcgtcggccggccatttggcgtatcagaccaagtcatcaccactgagttcccctcgatgcttgacgatcggtatattacccaaggagggtttgctagaccatcatcgggcgacgagcctacttataagattgttgcgaagcattatctacggcttcgattgctgcagtcggagatattgcaagtcttacagtaccagcaagctcgcgcagcgagaataagtgggcagaatctgcgaaatgagtatatgcatactgaactgccgtcacccttcttgtctcgattcggttcagatccattccgatcgtggagaaaggacatagacggacgactatactcgtggaaaagcacagctcctacaaaacaagactctggcgtggccttttctcctgaatttttggagctgaattactggcaggccatcatcatgctttatcggcaaagtctaagcgtccccgccatgttcgagagcgagtatcatacatcaaaggaggtcaacagcccgtcaatatactcgcaagagttacaagaggaccaggaacgagtatatcttaaggtggcagaggcaggccaaaagatattacggctctacagaacacttcacctgcaaggactcgtcaattacacgtatctagccacacatcatttgtttatggcaggaatctcatatttatatgctatatggcattctatggttgtgagaagtcgcttgacaatggatgaagtggatttcactatattagccgcgacgtcagtgttcacagaccttatcgacaaatgtccaccagcagaggcttgccgtgatgcattcgatcggacggcgaaagcaaccatcaagatggccaactcaagtggcgggttcggacaagtactaaaccgaaataaacgtggctcaaggggcatggtagatagaatcgactacatgaacgccagagaagcgacatcaaatcgccacatggcacatactcacacacaagcagatcaacctctgcctcgctcagctaatctatacgacacatcaggttacgatccttatggcgctcaaaacagaggagcaaagatgaacgcgatgcctgcacctcctttccacctccacatacctaatatcaaatcagaacacgacggatatcctatgaatccctccatgaccacaaacagccctcttgaaggcccgcccatacccgataactcagcaatcgatcctgtcctactccctccccaaagtccacaagtgaactcccctgcatctggtgctagcgggacaccgaaacccgcacatcagcaattcggcacgccaaatgcttcgaatacgaacttcaacatgatgcgttcaccgggtgctggttacaatgccggagcgggtgcgctgaattttgcggatctgcagggtatggatttcttgcagaatctgcaggatccggggaataatgagggcgatatgcagatggatatggggtttgggattggctgggagggcgtgcatcatgattttagcgagggtcaacaggtcgatttgtttgatgggtttttctttggggctgggggcgggaatggtggggggctttgatgaggactggagagagggggggaacagggggggataggggggttgaaaagaagggaaatgatatgtggttctatgggttctgtcatatttgttgttgatgatttatgcattgcatgatggggtggtcatcggaaccggagcgacatgagtatctatattagatggatttgtgtttgatacggtatgcatgattgaattaataggcgaacaaaggatgagtgatgtgttctacggggtatgggttgttgtggtttgtatgatatcacttctcgacttgtcgttgccagataccagactggcagtgccatccttgttgaatggatgggtggcatgatggcaagatggctggaatgaggcgtttctgagaggataaaatgcttgtttgtatcatgatagttacctgcctacttattctgggttgtgatgtgtcgtatttgtgagacacggatagcgtttgaattttgaagtatgagaatgatgctg

SEQ ID NO: 5101 - DNA, 2079 bp, Muscodor strobelii
  misc_feature: SGI cDNA ID NO. 561410
  misc_feature: Encodes the peptide sequence at SEQ ID NO 5102
atggagaatgaaaacgtctaccttggggtgtggaccaactatgctaaggggaagatcctaggagccacattgactacaacaccaagacagggtgcccttctgattgcttttacaagcatattgatctccttcgtagcatcaagagcatggaagttattgtgtctcattcttcaccgaatatattcaacatcaaagccacgcggccctatatattgtcaacgccaggtacttcttcgaaattcgtcgtctccggattcaggagtcttatcggccatccaaattctcctcgcatggagggactccggagatcaagcacggatcttagcttttatctcgccgattattgtatatggtgttatttgtatcgcaatattcaccgtagcaggtggattttcgtcgcagatagctaatacagccagcaatgaagtgttgctaaagagcaataactgtgggatccccagcgttgcatcaattcacgatattgctggatacaaatacttctccgatcgactcaacaaagcagttaattatgcccagcagtgttactccgcaaatagtaccggtatcctcgactgcaataagttcattacgaagactctcccatatcccgacgtcaactacgaagccgattgccctttcgaggacactatttgccgaggaaaccaatcttccttgcgcttagattcaggtagcaatccaacatctaatgacttatggccgacttatacatacgagtatgaagacttagacaaccaatattacatgatcgatagtgatattaaagggcctctcccagcagcaaactacttactgaacgtgattgaatccaacacatttcagggaaagccatacgccgaacccgctcattttgttccgatctctaaacttgaacgatcagatggtgacttgtatatgccgtttttgtctggaaatggtgtttgcttcttcgagtcaatgaatgacgactggtaccgagccactacccaagcaccgcggtctgcaatagattcacatggacacccgcaaaatatctacaaaacaagcgaggcagccagtccactgggttgcgttcaacagcaccagtggtgcaatcttgcgtactcaggagcagacaaatgcgggccactcgtctcatttattgatgcaatctacggcgcgtctgaactgttcggactgtctagtgcagacctggatgaaacgcgaccctcgtctaactcgtcgataggatcactcttcgcttgggccctttttattaaaacattttggccagggcccttagaagtacccagtcatctcggtgctatctcattggcttcgcagagtctactacaggggggcatacaggagccgctaccccttactcaatggcagattgacatcatgaattggtggaacatctcacaggcctacttccaatctcagtatgtcgacactgcaaccggaccgacaacaacgaagaatccgcctcgtaacagcggcataatcattgtgatctcgttcactgtcgagccggcagtggcattccttgctaaacaccgtaagattaaagaatatgagtttctcgagtggaccaccaaccagttcctacagcttcatcgcctagcgcaagaggaaatcggacaagtaaaatggtcaagaggtgcagacaaagtgccaattacatcgatatataacattcttgctcctatcgatattacagacccacgacaccctatccttgctcggcagaaagaccgtcatgacggcattgaagctcacgcagattctaatggaggggcaagtcaggagtgcacgaatactcctgtcgaagccgcccatgaacctccatctccaagtcctactgtgatccttccgtcccagaccatgccggagggagacaaccatgatgattccgatgaaaacgacatgtccgaaggcagtatcccttacgatcagctcagccaacatgtcgctgtccaaaatccccccattctacatagtaacagtcaacatgagctcaaccaacatgccgctgttcacaacgacccgactcaaaagacactccagcgcaatggtgcccgagaagacaccattgcttaa

SEQ ID NO: 5102 - protein, 692 aa, Muscodor strobelii
  misc_feature: SGI Peptide ID NO. 561410
  misc_feature (3)..(577): NCBI GI: 169615058 Blast Desc: SNOG_10683 [Phaeosphaeria nodorum SN15] gi|111060957|gb|EAT82077.1| SNOG_10683 [Phaeosphaeria nodorum SN15]
  misc_feature (2)..(573): NCBI GI: 189194015 Blast Desc: conserved [Pyrenophora tritici-repentis Pt-1C-BFP] gi|187978910|gb|EDU45536.1| conserved [Pyrenophora tritici-repentis Pt-1C-BFP]
  misc_feature (3)..(554): NCBI GI: 115399382 Blast Desc: [Aspergillus terreus NIH2624] gi|114192163|gb|EAU33863.1| [Aspergillus terreus NIH2624]
  misc_feature (6)..(560): NCBI GI: 169772941 Blast Desc: [Aspergillus oryzae RIB40] gi|83768800|dbj|BAE58937.1| protein product [Aspergillus oryzae]
  misc_feature (5)..(540): NCBI GI: 121699395 Blast Desc: ACLA_082720 [Aspergillus clavatus NRRL 1] gi|119396149|gb|EAW06581.1| ACLA_082720 [Aspergillus clavatus NRRL 1]
  misc_feature (3)..(554): NCBI GI: 119474227 Blast Desc: NFIA_004500 [Neosartorya fischeri NRRL 181] gi|119407142|gb|EAW17092.1| conserved [Neosartorya fischeri NRRL 181]
  misc_feature (3)..(554): NCBI GI: 70986226 Blast Desc: conserved [Aspergillus fumigatus Af293] gi|66846236|gb|EAL86569.1| conserved [Aspergillus fumigatus Af293]
  misc_feature (3)..(554): NCBI GI: 159128250 Blast Desc: conserved [Aspergillus fumigatus A1163]
  misc_feature (4)..(553): NCBI GI: 256723662 Blast Desc: NECHADRAFT_86728 [Nectria haematococca mpVI 77-13-4]
  misc_feature (5)..(382): NCBI GI: 115433432 Blast Desc: [Aspergillus terreus NIH2624] gi|114189705|gb|EAU31405.1| [Aspergillus terreus NIH2624]
MENENVYLGVWTNYAKGKILGATLTTTPRQGALLIAFTSILISFVASRAWKLLCLILHRIYSTSKPRGPIYCQRQVLLRNSSSPDSGVLSAIQILLAWRDSGDQARILAFISPIIVYGVICIAIFTVAGGFSSQIANTASNEVLLKSNNCGIPSVASIHDIAGYKYFSDRLNKAVNYAQQCYSANSTGILDCNKFITKTLPYPDVNYEADCPFEDTICRGNQSSLRLDSGSNPTSNDLWPTYTYEYEDLDNQYYMIDSDIKGPLPAANYLLNVIESNTFQGKPYAEPAHFVPISKLERSDGDLYMPFLSGNGVCFFESMNDDWYRATTQAPRSAIDSHGHPQNIYKTSEAASPLGCVQQHQWCNLAYSGADKCGPLVSFIDAIYGASELFGLSSADLDETRPSSNSSIGSLFAWALFIKTFWPGPLEVPSHLGAISLASQSLLQGGIQEPLPLTQWQIDIMNWWNISQAYFQSQYVDTATGPTTTKNPPRNSGIIIVISFTVEPAVAFLAKHRKIKEYEFLEWTTNQFLQLHRLAQEEIGQVKWSRGADKVPITSIYNILAPIDITDPRHPILARQKDRHDGIEAHADSNGGASQECTNTPVEAAHEPPSPSPTVILPSQTMPEGDNHDDSDENDMSEGSIPYDQLSQHVAVQNPPILHSNSQHELNQHAAVHNDPTQKTLQRNGAREDTIA

SEQ ID NO: 5103 - DNA, 244 bp, Muscodor strobelii
  misc_feature: SGI EST ID NO. CUFF.12885.0
  misc_feature: Variant of the nucleotide sequence at SEQ ID NO 5101
tctcctttagtcaccgaaggatatacaattaaacacacagcaaaagacaagacttctataagatacttgtacggcaacttgatcgctgacaatcttacaacccttgcagcttatacatacgagtatgaagacttagacaaccaatattacatgatcgatagtgatattaaagggcctctcccagcagcaaactacttactgaacgtgattgaatccaacacatttcagggaaagccatacgccg

SEQ ID NO: 5104 - DNA, 421 bp, Muscodor strobelii
  misc_feature: SGI cDNA ID NO. 561411
  misc_feature: Reduced expression when VOC is produced
  misc_feature: Encodes the peptide sequence at SEQ ID NO 5105
atgtctcgtagaccacctccgtcgggcagcagcagcatggcccagcagcaaacccgccagaacgagtatttcgtacctagagacggcatagatcgcgaggtcatcaccgccgacatatgtcgctacctcggtaacgacgccctggtccgcccgggcaattacgagaaccccgacaacggtcagatcattcaaggctatttcatcaatgcctaccgcaacctgacctcagcaatgattcaggatctgaaagccgactctgcgcggtgggatcaggagaggcggcaacagtcagcaaatcggaatagcgctggcggagtccaataccgtaactcggacatccaccagtcgcggcagtactatggtcccacggaggctggaatgcccccgccggccgcgggcggagatccctatgacaacccaa

SEQ ID NO: 5105 - protein, 140 aa, Muscodor strobelii
  misc_feature: SGI Peptide ID NO. 561411
  misc_feature (19)..(124): NCBI GI: 256734251 Blast Desc: NECHADRAFT_36283 [Nectria haematococca mpVI 77-13-4]
  misc_feature (2)..(124): NCBI GI: 46130618 Blast Desc: FG08913.1 [Gibberella zeae PH-1]
  misc_feature (18)..(140): NCBI GI: 261353433 Blast Desc: conserved [Verticillium albo-atrum VaMs.102]
  misc_feature (19)..(97): NCBI GI: 85111825 Blast Desc: NCU01938 [Neurospora crassa OR74A] gi|28925889|gb|EAA34886.1| [Neurospora crassa OR74A]
  misc_feature (19)..(92): NCBI GI: 171676161 Blast Desc: protein product [Podospora anserina] gi|170936146|emb|CAP60806.1| protein product [Podospora anserina]
  misc_feature (19)..(92): NCBI GI: 116193779 Blast Desc: CHGG_06607 [Chaetomium globosum CBS 148.51] gi|88182520|gb|EAQ89988.1| CHGG_06607 [Chaetomium globosum CBS 148.51]
  misc_feature (5)..(108): NCBI GI: 149210429 Blast Desc: MGCH7_ch7g689 [Magnaporthe grisea 70-15] gi|86196644|gb|EAQ71282.1| MGCH7_ch7g689 [Magnaporthe grisea 70-15]
  misc_feature (5)..(108): NCBI GI: 145609870 Blast Desc: MGG_02925 [Magnaporthe grisea 70-15] gi|145017250|gb|EDK01613.1| MGG_02925 [Magnaporthe grisea 70-15]
  misc_feature (18)..(140): NCBI GI: 189192054 Blast Desc: conserved [Pyrenophora tritici-repentis Pt-1C-BFP] gi|187973972|gb|EDU41471.1| conserved [Pyrenophora tritici-repentis Pt-1C-BFP]
  misc_feature (19)..(139): NCBI GI: 240277796 Blast Desc: transcription factor RfeG [Ajellomyces capsulatus H143]
  misc_feature: Useful for introducing or modulating the production of volatile compounds
MSRRPPPSGSSSMAQQQTRQNEYFVPRDGIDREVITADICRYLGNDALVRPGNYENPDNGQIIQGYFINAYRNLTSAMIQDLKADSARWDQERRQQSANRNSAGGVQYRNSDIHQSRQYYGPTEAGMPPPAAGGDPYDNP

SEQ ID NO: 5106 - DNA, 1578 bp, Muscodor strobelii
  misc_feature: SGI EST ID NO. CUFF.12921.1
  misc_feature: Variant of the nucleotide sequence at SEQ ID NO 5104
cagcttggcacgcgcgcaggccgtcgtcattggcttttcggtggcgaacaagaaactcttctgtccgcatccatctcaccagcatcaagtcagacccagcctgcctgaccacctatcatctgcctcacgcgataagagagacatcaggactggatactcactcctgtcagctcggcacacaaaagcggtatcactgcaccattgtcgtttcatcgcagagtaatctacgccaagcccagcggttgccttgtctcgtcctgctctcatcatcatctttcattggggctccctctggtgaccctgtgtcccctgtgaaaataagctgcgcaacatcgccactctttcgcttatagcgataacacgaccaaaaatacagcctgcaaaactctcctgtatcactccatagcctatagcaggaggcggccgttgagccttgtcgggtttggcattcttcgaccatactgcaaagttgggcattgtgtgcagtcagactatcggccgtcacctcagaattcccatcctctgctatttgacaagtcaaaaatctcgtgggacatagtcttgttcaacctccaccctgccagaactgctcgcatacttccaaggtgtgatactccaatatctgccaccattcgtactttaagcaccaggtaggaccccactgtgaggcccacctcgttctcgccccctccattcaccgttggctggcgcctgtgttattccatgcctgtgcctgtcgagcctctgcctaccgctgcacactgagtctgcaggccgagacccgctacaacgtctccaaaccaaccgaggggcagagaggccaggtcaacccagccccagtaacggcccccagtcggctcaggcagcccagcccaaatccaagttacccaactcttttctcctctcctcctccgcccacctctctcgcgcctgcgtccttcttccatccctctttccctctccaaccacccgttgtgttgtcttttactgtcgacgcgcatttctctttctttttctgttctgtaccttaatatcccccggcgtgcgacgacccttcctccctccacaccatgtctcgtagaccacctccgtcgggcagcagcagcatggcccagcagcaaacccgccagaacgagtatttcgtacctagagacggcatagatcgcgaggtcatcaccgccgacatatgtcgctacctcggtaacgacgccctggtccgcccgggcaattacgaggtaggcttgtcctgtattctgcgatgcccgccgctggatgtcgaggaccttgcaacctgggtcgcctaacatggactcgaactgtagaaccccgacaacggtcagatcattcaaggctatttcatcaatgcctaccgcaacctgacctcagcaatgattcaggatctgaaagccgactctgcgcggtgggatcaggagaggcggcaacagtcagcaaatcggaatagcgctggcggagtccaataccgtaactcggacatccaccagtcgcggcagtactatggtcccacggaggctggaatgcccccgccggccgcgggcggagatccctatgacaacccaa

SEQ ID NO: 5107 - DNA, 1959 bp, Muscodor strobelii
  misc_feature: SGI cDNA ID NO. 561412
  misc_feature: Encodes the peptide sequence at SEQ ID NO 5108
atgtcatctccctccccaaccttccaagtctcgtctccagcacttggcactggacgccggaagtcgcagttcacttaccgccagctgagcttattgtcatcttactcaacatcttcgcccttacgtgtgatcgcacatgttgatcttgatgcgttctatgcccaatgtgagatggtcagactgggcgtggatgaagaacagcctctggctgtgcagcaatggcaagggctcattgcaatcaactatccagcgcgaaaatacggcattggtcgtcattgtactgtcacagaagccaaaaagttgtgcccaaatctcattgcgcagcacgttgctacttggaaagaaggcgaggagaaatgggcttaccatgacgatgcagcttctcatatcgggactcataaagtttcactagacccttacagactggagagtcggaaaatcttggcccaggtcaaagattgtctacctgacaatatgcgaaaagtcgagaaagcgagtatagatgaagtgttcattgacttgtcgtcacaaattcactccattcttctccaaagattcccggaacttggcgacccacctccttacgatgacccgaccgaaaagcttccgctcccttcggttactgcgcttgattggcaagccgatgcgctgatagatcttgatgatgctgagtctgaagtcgatgacccggactgggacgatgtggcccttcttattggttccgagatcgtccgagacatacgagccgagatctttcgaacgttgagatacacttgttctgccggggtagcaagcaataagatgctgagcaaattgggctctgggcacaaaaagcccaatcagcagaccattatacgaaacagggctgttcagcatttcctatcggacatgaaattcacaaaaattcgaaacttgggaggcaagcttggggaccaggtaaaatcaacattcaacactgagaccgtgaaggatatgttagctgtgtcgctagatcaactgaaattgaaactaggagatgatacgggcgcatggctcttcaacactattcgcggcatagacacaagcgaggtcaattcgagaacacagatcaagtcaatgctctctgccaagtcttttcagcccgctatcaataccatggaacaagcgaataaatggttaacgatcttttcgggcgacattttctcccgattaattgaagaaggcgtgctggagaacaagcgccgcccaaagacaatgaatttgcatcaccgtcacgccggccagacccgatcaaagtcatgtagtattccccagggcaagcctctcactgaggcgatcctgttgcagcttgcacaacagctgatgaaccagatcgctggcgaaggaagagtatggccttgtgcaaacttgagtcttagtgtcggaggcttcgaggacggcatcactggtaatatgggcatcggcgctttcctactgagaggtgacgaagcacgtgcgtcgaagtcgacatctcaggatcctccacagacgagatcttcttcacatgaacccccagaaaagaagcgtcgcattgaaacctcgggcatacagcgcttcttcgctaagagcgaactatcgactgggtctgatgacctgtcggacacgaggactgctgagacagggaattcgcatgaacaagtggaacatcaggtagtagaatcgtacagccgtcaggcatccatcacagattacttctgtgagcgctgcaatgcaaggcttcaggatgcagactcacttgcagagcacatggattggcacttcgccaaagatctccaagatgaagatcgtggcagatccgtattcgctagcggcaagcctgccgttccacgcacccacacgagcacaacttcgtcgcagaagaaaggacctaaagggggtggcaccagcggcagtggagccaacaagttagagcagggtcagagccggctgaaatttgggtaa

SEQ ID NO: 5108 - protein, 652 aa, Muscodor strobelii
  misc_feature: SGI Peptide ID NO. 561412
  misc_feature (47)..(472): Pfam Id: PF00817 Pfam Desc: impB/mucB/samB family
  misc_feature (47)..(387): Pfam Id: PF00817 Pfam Desc: impB/mucB/samB family
  misc_feature (1)..(652): NCBI GI: 85111821 Blast Desc: NCU01936 [Neurospora crassa OR74A] gi|28925887|gb|EAA34884.1| NCU01936 [Neurospora crassa OR74A]
  misc_feature (8)..(652): NCBI GI: 46130620 Blast Desc: FG08914.1 [Gibberella zeae PH-1]
  misc_feature (9)..(652): NCBI GI: 256734252 Blast Desc: [Nectria haematococca mpVI 77-13-4]
  misc_feature (1)..(652): NCBI GI: 154309314 Blast Desc: BC1G_07551 [Botryotinia fuckeliana B05.10] gi|150852375|gb|EDN27567.1| BC1G_07551 [Botryotinia fuckeliana B05.10]
  misc_feature (1)..(652): NCBI GI: 261353432 Blast Desc: DNA polymerase IV [Verticillium albo-atrum VaMs.102]
  misc_feature (1)..(651): NCBI GI: 39970915 Blast Desc: MGG_02924 [Magnaporthe grisea 70-15] gi|149210427|ref|XP_001522588.1| MGCH7_ch7g688 [Magnaporthe grisea 70-15] gi|86196643|gb|EAQ71281.1| MGCH7_ch7g688 grisea
  misc_feature (58)..(652): NCBI GI: 156058306 Blast Desc: SS1G_03164 [Sclerotinia sclerotiorum 1980] gi|154700952|gb|EDO00691.1| SS1G_03164 [Sclerotinia sclerotiorum 1980]
  misc_feature (11)..(652): NCBI GI: 171676163 Blast Desc: protein product [Podospora anserina] gi|170936147|emb|CAP60807.1| protein product [Podospora anserina]
  misc_feature (1)..(527): NCBI GI: 189192050 Blast Desc: sister chromatid cohesion protein Eso1 [Pyrenophora tritici-repentis Pt-1C-BFP] gi|187973970|gb|EDU41469.1| sister chromatid cohesion protein Eso1 [Pyrenophora tritici-repentis
  misc_feature (1)..(652): NCBI GI: 116193781 Blast Desc: CHGG_06608 [Chaetomium globosum CBS 148.51] gi|88182521|gb|EAQ89989.1| CHGG_06608 [Chaetomium globosum CBS 148.51]
  misc_feature (43)..(527): SWISSPROT Homolog: EC 2.7.7.7 DNA-directed DNA polymerase
MSSPSPTFQVSSPALGTGRRKSQFTYRQLSLLSSYSTSSPLRVIAHVDLDAFYAQCEMVRLGVDEEQPLAVQQWQGLIAINYPARKYGIGRHCTVTEAKKLCPNLIAQHVATWKEGEEKWAYHDDAASHIGTHKVSLDPYRLESRKILAQVKDCLPDNMRKVEKASIDEVFIDLSSQIHSILLQRFPELGDPPPYDDPTEKLPLPSVTALDWQADALIDLDDAESEVDDPDWDDVALLIGSEIVRDIRAEIFRTLRYTCSAGVASNKMLSKLGSGHKKPNQQTIIRNRAVQHFLSDMKFTKIRNLGGKLGDQVKSTFNTETVKDMLAVSLDQLKLKLGDDTGAWLFNTIRGIDTSEVNSRTQIKSMLSAKSFQPAINTMEQANKWLTIFSGDIFSRLIEEGVLENKRRPKTMNLHHRHAGQTRSKSCSIPQGKPLTEAILLQLAQQLMNQIAGEGRVWPCANLSLSVGGFEDGITGNMGIGAFLLRGDEARASKSTSQDPPQTRSSSHEPPEKKRRIETSGIQRFFAKSELSTGSDDLSDTRTAETGNSHEQVEHQVVESYSRQASITDYFCERCNARLQDADSLAEHMDWHFAKDLQDEDRGRSVFASGKPAVPRTHTSTTSSQKKGPKGGGTSGSGANKLEQGQSRLKFG

SEQ ID NO: 5109 - DNA, 3631 bp, Muscodor strobelii
  misc_feature: SGI EST ID NO. CUFF.12894.1
  misc_feature: Variant of the nucleotide sequence at SEQ ID NO 5107
cagcctcattgtagacagactcggcaggctcgatgtacgtgggggtaacgactcacaaccatcggcccttcaatttttctcctcgtgtcacgaatttgcgagactcgcaaagccatcatacctacatgtagctacttctgctccgttaaactttggttcatgctcaatatctgctgaaagtctcgtctgccccactctctttgccatcgctcaaagaatcaaaatgatcgtcgcaggacttcgacatgtactacttgcagcctgctcttggacccagctattgacccccaattgttagacgctagactccggtctgcaccacacaataataacacataggatcgactctttcgcgtctaaccgacgttatcgttagcatgtcatctccctccccaaccttccaagtctcgtctccagcacttggcactggacgccggaagtcgcagttcacttaccgccagctgagcttattgtcatcttactcaacatcttcgcccttacgtgtgatcgcacatgttgatcttgatgcgttctatgcccaatgtgagatggtcagactgggcgtggatgaagaacagcctctggctgtgcagcaatggcaagggctcattgcaatcaactatccagcgcgaaaatacggcattggtcgtcattgtactgtcacagaagccaaaaagttgtgcccaaatctcattgcgcagcacgttgctacttggaaagaaggcgaggagaaatgggcttaccatgacgatgcagcttctcatatcgggactcataaagtttcactagacccttacagactggagagtcggaaaatcttggcccaggtcaaagattgtctacctgacaatatgcgaaaagtcgagaaagcgagtatagatgaagtgttcattgacttgtcgtcacaaattcactccattcttctccaaagattcccggaacttggcgacccacctccttacgatgacccgaccgaaaagcttccgctcccttcggttactgcgcttgattggcaagccgatgcgctgatagatcttgatgatgctgagtctgaagtcgatgacccggactgggacgatgtggcccttcttattggttccgagatcgtccgagacatacgagccgagatctttcgaacgttgagatacacttgttctgccggggtagcaagcaataagatgctgagcaaattgggctctgggcacaaaaagcccaatcagcagaccattatacgaaacagggctgttcagcatttcctatcggacatgaaattcacaaaaattcgaaacttgggaggcaagcttggggaccaggtaaaatcaacattcaacactgagaccgtgaaggatatgttagctgtgtcgctagatcaactgaaattgaaactaggagatgatacgggcgcatggctcttcaacactattcgcggcatagacacaagcgaggtcaattcgagaacacagatcaagtcaatgctctctgccaagtcttttcagcccgctatcaataccatggaacaagcgaataaatggttaacgatcttttcgggcgacattttctcccgattaattgaagaaggcgtgctggagaacaagcgccgcccaaagacaatgaatttgcatcaccgtcacgccggccagacccgatcaaagtcatgtagtattccccagggcaagcctctcactgaggcgatcctgttgcagcttgcacaacagctgatgaaccagatcgctggcgaaggaagagtatggccttgtgcaaacttgagtcttagtgtcggaggcttcgaggacggcatcactggtaatatgggcatcggcgctttcctactgagaggtgacgaagcacgtgcgtcgaagtcgacatctcaggatcctccacagacgagatcttcttcacatgaacccccagaaaagaagcgtcgcattgaaacctcgggcatacagcgcttcttcgctaagagcgaactatcgactgggtctgatgacctgtcggacacgaggactgctgagacagggaattcgcatgaacaagtggaacatcaggtagtagaatcgtacagccgtcaggcatccatcacagattacttctgtgagcgctgcaatgcaaggcttcaggatgcagactcacttgcagagcacatggattggcacttcgccaaagatctccaagatgaagatcgtggcagatccgtattcgctagcggcaagcctgccgttccacgcacccacacgagcacaacttcgtcgcagaagaaaggacctaaagggggtggcaccagcggcagtggagccaacaagttagagcagggtcagagccggctgaaatttgggtaacaaggcaagctataccattgctcatttaaacacagctgtaccagttattggctctccgcctgacaatgtctggctatcgctcgggattatagttccgttccaacaaggccactctctaggtcatcgccctgcggtcggtaaagaggaagcgacatcctcgaagatgtccattctggatcgagaaacgatcccgagtgatccaatcgatatcaacggaatcccggcgcaatcgggtacgtaacgcgccagtaagcggaccgtcgtcacgatgactctaaattctccagaacgcgtatataatctctgagcgcacggcctagacgcatgagactaaggaaaatcagaggcatagcagcgagaccaggagggttccgagacaatgaaacatattgaatggtgtttccttcaaacaaaagataggcaagcttttgccaaatggtctcgtgctggccacctgccgatgtctcatcgcgatgctgcagctcgacaggtacgcgacatcgtcaggtgcatgtaatgcaatgccttgttcagtattatgagaatacgcagcacaagcacacgatgtctcgggccagtcatgtaacgagttccgcctttcgcagaaatatggatttatcgattggtcgactggtctcattccattcttgggcagctaaaagtggaatgcagctaaagagagcacgagttgggttctgccgcattgatacccaacccagcatgcctaccgctgtctaaggaaagcaagcatctcctggtcctccgttcatacaattgcgtgtctggcttgaatcctcttaagattatcacacaaggaaccccatgcaacagtcttatgatcttttgtgatcttgttcatagctctatatcggggatagccatgatgtactgtctagtctcgtggtggatattcacacttgctgcaattcctctgctgaacggttgaacggtctatgctgtcaagcgagaacatgttgttactgtatgatgactattagaaaacttaaatatgtataagttgacctaaagaatgctttatcgtaaacgcgaagcaaatatccgaacaaaacacaatccataaatgacgagaacttcaagggctttccacgttagcgtctgttgggccagatattaggatgcaactttatatctatctacctataggcaatatcaatacagttaatgggcagcttgtatttgctcaactgattagccattgagaatgtttgaatattgaattggggtagctttgcagtggcctcaactccaagtgatgtaatgccgcctgttgtctt

SEQ ID NO: 5110 - DNA, 1158 bp, Muscodor strobelii
  misc_feature: SGI cDNA ID NO. 561413
  misc_feature: Encodes the peptide sequence at SEQ ID NO 5111
atgctgagcaaattgggctctgggcacaaaaagcccaatcagcagaccattatacgaaacagggctgttcagcatttcctatcggacatgaaattcacaaaaattcgaaacttgggaggcaagcttggggaccaggtaaaatcaacattcaacactgagaccgtgaaggatatgttagctgtgtcgctagatcaactgaaattgaaactaggagatgatacgggcgcatggctcttcaacactattcgcggcatagacacaagcgaggtcaattcgagaacacagatcaagtcaatgctctctgccaagtcttttcagcccgctatcaataccatggaacaagcgaataaatggttaacgatcttttcgggcgacattttctcccgattaattgaagaaggcgtgctggagaacaagcgccgcccaaagacaatgaatttgcatcaccgtcacgccggccagacccgatcaaagtcatgtagtattccccagggcaagcctctcactgaggcgatcctgttgcagcttgcacaacagctgatgaaccagatcgctggcgaaggaagagtatggccttgtgcaaacttgagtcttagtgtcggaggcttcgaggacggcatcactggtaatatgggcatcggcgctttcctactgagaggtgacgaagcacgtgcgtcgaagtcgacatctcaggatcctccacagacgagatcttcttcacatgaacccccagaaaagaagcgtcgcattgaaacctcgggcatacagcgcttcttcgctaagagcgaactatcgactgggtctgatgacctgtcggacacgaggactgctgagacagggaattcgcatgaacaagtggaacatcaggtagtagaatcgtacagccgtcaggcatccatcacagattacttctgtgagcgctgcaatgcaaggcttcaggatgcagactcacttgcagagcacatggattggcacttcgccaaagatctccaagatgaagatcgtggcagatccgtattcgctagcggcaagcctgccgttccacgcacccacacgagcacaacttcgtcgcagaagaaaggacctaaagggggtggcaccagcggcagtggagccaacaagttagagcagggtcagagccggctgaaatttgggtaa

SEQ ID NO: 5111 - protein, 385 aa, Muscodor strobelii
  misc_feature: SGI Peptide ID NO. 561413
  misc_feature (1)..(120): Pfam Id: PF00817 Pfam Desc: impB/mucB/samB family
  misc_feature (1)..(385): NCBI GI: 261353432 Blast Desc: DNA polymerase IV [Verticillium albo-atrum VaMs.102]
  misc_feature (1)..(385): NCBI GI: 85111821 Blast Desc: NCU01936 [Neurospora crassa OR74A] gi|28925887|gb|EAA34884.1| NCU01936 [Neurospora crassa OR74A]
  misc_feature (1)..(385): NCBI GI: 154309314 Blast Desc: BC1G_07551 [Botryotinia fuckeliana B05.10] gi|150852375|gb|EDN27567.1| BC1G_07551 [Botryotinia fuckeliana B05.10]
  misc_feature (1)..(385): NCBI GI: 116193781 Blast Desc: CHGG_06608 [Chaetomium globosum CBS 148.51] gi|88182521|gb|EAQ89989.1| CHGG_06608 [Chaetomium globosum CBS 148.51]
  misc_feature (1)..(385): NCBI GI: 156058306 Blast Desc: SS1G_03164 [Sclerotinia sclerotiorum 1980] gi|154700952|gb|EDO00691.1| SS1G_03164 [Sclerotinia sclerotiorum 1980]
  misc_feature (1)..(385): NCBI GI: 46130620 Blast Desc: FG08914.1 [Gibberella zeae PH-1]
  misc_feature (1)..(385): NCBI GI: 256734252 Blast Desc: [Nectria haematococca mpVI 77-13-4]
  misc_feature (1)..(384): NCBI GI: 39970915 Blast Desc: MGG_02924 [Magnaporthe grisea 70-15] gi|149210427|ref|XP_001522588.1| MGCH7_ch7g688 [Magnaporthe grisea 70-15] gi|86196643|gb|EAQ71281.1| MGCH7_ch7g688 grisea
  misc_feature (1)..(385): NCBI GI: 171676163 Blast Desc: protein product [Podospora anserina] gi|170936147|emb|CAP60807.1| protein product [Podospora anserina]
  misc_feature (1)..(385): NCBI GI: 145237696 Blast Desc: An07g04130 [Aspergillus niger] gi|134075969|emb|CAK48163.1| protein product [Aspergillus niger]
MLSKLGSGHKKPNQQTIIRNRAVQHFLSDMKFTKIRNLGGKLGDQVKSTFNTETVKDMLAVSLDQLKLKLGDDTGAWLFNTIRGIDTSEVNSRTQIKSMLSAKSFQPAINTMEQANKWLTIFSGDIFSRLIEEGVLENKRRPKTMNLHHRHAGQTRSKSCSIPQGKPLTEAILLQLAQQLMNQIAGEGRVWPCANLSLSVGGFEDGITGNMGIGAFLLRGDEARASKSTSQDPPQTRSSSHEPPEKKRRIETSGIQRFFAKSELSTGSDDLSDTRTAETGNSHEQVEHQVVESYSRQASITDYFCERCNARLQDADSLAEHMDWHFAKDLQDEDRGRSVFASGKPAVPRTHTSTTSSQKKGPKGGGTSGSGANKLEQGQSRLKFG

SEQ ID NO: 5112 - DNA, 3631 bp, Muscodor strobelii; identical to SEQ ID NO: 5109
  misc_feature: SGI EST ID NO. CUFF.12894.1
  misc_feature: Variant of the nucleotide sequence at SEQ ID NO 5110

SEQ ID NO: 5113 - DNA, 2703 bp, Muscodor strobelii
  misc_feature: SGI cDNA ID NO. 561414
  misc_feature: Encodes the peptide sequence at SEQ ID NO 5114
atggccaccccggcagcaccaagcatgctgtccgtgtcgcctgcgcccggcgtgtccacgccaaagccaacgatgtcatcatccacgcctggtcccgaagcccatgcccatgccaacaaggccaatgccaatgccaatgctagcaccaacatcagcgccagtaatagcaccagctccgtgccgtcgctggtccaggacgcaattccagttcccagccctctgcatcccacttataagtcaaaggatcctacagccgcatcaacacccgtttcctctcccaatcaccccaatcactccaattccaatcccgtaacaggctcaggccccggcgctctctcaggcgctaccacctctgcaacctctgccccgcgacctattccgtcatcgtcgtcaaagccctctcactcaggtatatcagcgcccgactcccagcaccctcgtaatccgcccactcgtttaaccatcccacctgcagacacaccctcgtcaccggcgccctcgtctgtcaatacttcgtcatactgcagctctctgcagtctccaatcgactctttgcgccggcagcacacggacctcaccaccccgattcccgaggaatgcgacgaggaaacgtgcagtgagtcgttccccaacgagcccgtcacgcccgtcagcggccgccaatcgcgagactttcgctttggtgaaacccacgagttttaccagcagcaccgcgactcagtcccctacagtctgaacggcacgcccacaggcatcccagagcacccagatgattctctggtgcagattagcaaggacttcctagaggtgccactggcgcaatcggctcccacgccccgttcacctgatctggttgcgcaaaccacaccgcgagcgccacttacactggtgactggtgaatgtgcaacagcaacatcaccactcaaacaggtcacaactaacaccacaaaggagcagcgacccggcacctccaactcaacgcgacctccttctcgcagaggatcgtcagctttgtcgcgcaccatgtcagctatcttcagacgcagtaattctcacctggtggagaatggcgctgcaaacggcccgacctcagcctttagggagccgagctacagtgcacgcacatccgagactaatcttgcaaatgccaacaagttagcgactcccatgagtgctagtaaaggcactcgccgattctcatttcagcgatcggcacaaacaacgaggtctaacacaccgccatcacccggttcacccctggaaatggccataagctccaaggacaacaaggcacagatgcctaattcgtcggatttctttgataacaccacgaagaaatcaagagcgcagaccggtggtctgttccaaagagtcaacttctccagtagtactaatcgccatccccgccgtgcaagaagtgtcgaacgcaagaagaagaaccacgaggagcatcaagatgacaagctgaagcgcgagccatgggccatcccgccagatgccggcaccggcatgaaagcacggagactaagcttgagcctacccgatgacttcttcgttgatgtcgctgagttgctcaaagaatttgagtaccaacacaagctgctcggtcggcacggtaaacacttgggcaagggtgccacctctaaagtcacactgatggtgcgcaaaggttgccccggagagatgtatgctgtgaaggagttccggtccaagagctcgtctgagacagccgaagagtacgagaagaagatcaagtccgaatacagcatcgccaagagtctgcaccacccaaatgtcatcgagaccgttcgattgtgtacagatcatggacgatggaatcacgttatggagtactgttcggagggcgatctgttcaacttagtctcaaagaagtatctcaaggaccccggccatgacgttgatcgactgtgcctgttcaagcagctttgccaaggcattaattaccttcacaataacggcatcgcacatcgtgatatcaaactggaaaaccttctgatcacaaaggacagcaagctcaaaatcaccgacttcggtgtttctgaggtgttctcgggcacacaccctggtttacgggaatcagggggtcagtgtggcgtgaacatgggtgacgtgcgcttgtgtaagccaggtatctgcggcagtttgccatatatcgcacccgaggtgttgagcaagcagaaagattatgaccctcgtccactggatatctggagctcagccgtcgtgatgatttatcttctctttggtgctaacctttgggagaaggcccagccaggccttactggcgagtcacagcgatactacaacgacatcaacacccagtgggacaagattgaggcaaagaaggctgccgacccagagggtcctgcaaaagatgcatatccaaaggttatgccattcgagctctttgtcaagcctgtggctcttcgtcgtctcctcctcaccatgctgcacaacgacccgcacaagcgtcccaccatgagcgaagttgtcagtggcagatggatgaaaggtgtcgaatgctgccagccagagagctacgaagatccggtgaaattcatcgacgcctctaaaaaggatggtgcaaaaggcagtgcaggcaaaattttctgccacaaccatttacctattgtcgctacgtcacacggtctgccacctatgccaggcaaagctggttactag

SEQ ID NO: 5114 - protein, 900 aa, Muscodor strobelii
  misc_feature: SGI Peptide ID NO. 561414
  misc_feature (536)..(843): Pfam Id: PF00069 Pfam Desc: Protein kinase domain
  misc_feature (564)..(687): Pfam Id: PF07714 Pfam Desc: Protein tyrosine kinase
  misc_feature (187)..(900): NCBI GI: 116193773 Blast Desc: CHGG_06604 [Chaetomium globosum CBS 148.51] gi|88182517|gb|EAQ89985.1| CHGG_06604 [Chaetomium globosum CBS 148.51]
  misc_feature (145)..(900): NCBI GI: 256733739 Blast Desc: [Nectria haematococca mpVI 77-13-4]
  misc_feature (160)..(900): NCBI GI: 46130604 Blast Desc: FG08906.1 [Gibberella zeae PH-1]
  misc_feature (210)..(900): NCBI GI: 39970955 Blast Desc: MGG_02944 [Magnaporthe grisea 70-15] gi|149210487|ref|XP_001522618.1| MGCH7_ch7g718 [Magnaporthe grisea 70-15] gi|86196673|gb|EAQ71311.1| MGCH7_ch7g718 grisea
  misc_feature (167)..(900): NCBI GI: 171676157 Blast Desc: protein product [Podospora anserina] gi|170936144|emb|CAP60804.1| protein product [Podospora anserina]
  misc_feature (190)..(883): NCBI GI: 85112035 Blast Desc: NCU01940 [Neurospora crassa OR74A] gi|28925997|gb|EAA34988.1| NCU01940 [Neurospora crassa OR74A]
  misc_feature (196)..(883): NCBI GI: 154308291 Blast Desc: BC1G_07891 [Botryotinia fuckeliana B05.10] gi|150852976|gb|EDN28168.1| BC1G_07891 [Botryotinia fuckeliana B05.10]
  misc_feature (336)..(896): NCBI GI: 156058886 Blast Desc: SS1G_03455 [Sclerotinia sclerotiorum 1980] gi|154701242|gb|EDO00981.1| SS1G_03455 [Sclerotinia sclerotiorum 1980]
  misc_feature (422)..(755): NCBI GI: 261353439 Blast Desc: serine/threonine-protein kinase ppk24 [Verticillium albo-atrum VaMs.102]
  misc_feature (198)..(864): NCBI GI: 189210710 Blast Desc: serine/threonine-protein kinase hal4 [Pyrenophora tritici-repentis Pt-1C-BFP] gi|187977779|gb|EDU44405.1| serine/threonine-protein kinase hal4 [Pyrenophora Pt-1C-BFP]
MATPAAPSMLSVSPAPGVSTPKPTMSSSTPGPEAHAHANKANANANASTNISASNSTSSVPSLVQDAIPVPSPLHPTYKSKDPTAASTPVSSPNHPNHSNSNPVTGSGPGALSGATTSATSAPRPIPSSSSKPSHSGISAPDSQHPRNPPTRLTIPPADTPSSPAPSSVNTSSYCSSLQSPIDSLRRQHTDLTTPIPEECDEETCSESFPNEPVTPVSGRQSRDFRFGETHEFYQQHRDSVPYSLNGTPTGIPEHPDDSLVQISKDFLEVPLAQSAPTPRSPDLVAQTTPRAPLTLVTGECATATSPLKQVTTNTTKEQRPGTSNSTRPPSRRGSSALSRTMSAIFRRSNSHLVENGAANGPTSAFREPSYSARTSETNLANANKLATPMSASKGTRRFSFQRSAQTTRSNTPPSPGSPLEMAISSKDNKAQMPNSSDFFDNTTKKSRAQTGGLFQRVNFSSSTNRHPRRARSVERKKKNHEEHQDDKLKREPWAIPPDAGTGMKARRLSLSLPDDFFVDVAELLKEFEYQHKLLGRHGKHLGKGATSKVTLMVRKGCPGEMYAVKEFRSKSSSETAEEYEKKIKSEYSIAKSLHHPNVIETVRLCTDHGRWNHVMEYCSEGDLFNLVSKKYLKDPGHDVDRLCLFKQLCQGINYLHNNGIAHRDIKLENLLITKDSKLKITDFGVSEVFSGTHPGLRESGGQCGVNMGDVRLCKPGICGSLPYIAPEVLSKQKDYDPRPLDIWSSAVVMIYLLFGANLWEKAQPGLTGESQRYYNDINTQWDKIEAKKAADPEGPAKDAYPKVMPFELFVKPVALRRLLLTMLHNDPHKRPTMSEVVSGRWMKGVECCQPESYEDPVKFIDASKKDGAKGSAGKIFCHNHLPIVATSHGLPPMPGKAGY

SEQ ID NO: 5115 - DNA, 4863 bp, Muscodor strobelii
  misc_feature: SGI EST ID NO. CUFF.13185.0
  misc_feature: Variant of the nucleotide sequence at SEQ ID NO 5113
cgccttcatcccacgaaaactgcctctgacagcgggagtagaatcatcggcttcgactagctggccctattcacacgattctctatttcacacaaattcccatccttctgttgacacggattcccagattgacttacatcctcggcaacatcaatatcagttatactacccagtcccccctgtcggctcggattgtcccaccaactcttagaagcagaggcaacttcgatcttcaagtctcgacttatcaactgccactcaggggaaattatttacaacatcttctggttgctttaatttgttgttcgaaaagcacctgctggggtatcctctccgcctggtctggctaggtggtagtcttcacttattaataccgcatttctgcttgcctaggggcacaggttatagataggcgtgcacgattgggtatttggccgactccatcgacgtttcgggacattgacggtggtccaatcgcagggaagccgtcaccaaagtagactcgacacgttccaccttgctcaaccattcccttaacgttacctggttgcagacggtggatcattagaccctggtcaagggcaggggacgcgagaaagacatccatcgtcgcccaccttctgaccatcgtcacttatacatcccgccccagaagcgccctttcctgcagcgtgcattagggcctggagccgccagttccaaattcaatctgtgataatcgtcactaaacactccagggctgctgtccgcctgttacatggcctggagcgccagaaaccttaacacatccccatcccacaatccacacctgttgtacctccgcggtgctcttatacggcttagggcccctcctttcactttctcctgtcgttattattttctctcgtctggaccatattctctttctcacattgcactgcactaggagatagtgtaaatggttccctttagtatttgttttctgcttcagcactcagtcgagtcacagcctcctgcgttgagctgtagcttgagtggtcggcctttgtgtcccattacccgaccgcgagcttgaaggtgatcctgctgcccacacggtcgtcttcgtcaagagttgcagggcagtcacaagggcacacggtctatgagcctctgttgccagactctggggcgcgttatctaacactggcactcagtcggcttgaaaatcacgcacagttcaccgaatagacggtccgctagagccccaacaaacacagggctcccatagtgggtttcccgcctagccgactccagtcatccactcatggccaccccggcagcaccaagcatgctgtccgtgtcgcctgcgcccggcgtgtccacgccaaagccaacgatgtcatcatccacgcctggtcccgaagcccatgcccatgccaacaaggccaatgccaatgccaatgctagcaccaacatcagcgccagtaatagcaccagctccgtgccgtcgctggtccaggacgcaattccagttcccagccctctgcatcccacttataagtcaaaggatcctacagccgcatcaacacccgtttcctctcccaatcaccccaatcactccaattccaatcccgtaacaggctcaggccccggcgctctctcaggcgctaccacctctgcaacctctgccccgcgacctattccgtcatcgtcgtcaaagccctctcactcaggtatatcagcgcccgactcccagcaccctcgtaatccgcccactcgtttaaccatcccacctgcagacacaccctcgtcaccggcgccctcgtctgtcaatacttcgtcatactgcagctctctgcagtctccaatcgactctttgcgccggcagcacacggacctcaccaccccgattcccgaggaatgcgacgaggaaacgtgcagtgagtcgttccccaacgagcccgtcacgcccgtcagcggccgccaatcgcgagactttcgctttggtgaaacccacgagttttaccagcagcaccgcgactcagtcccctacagtctgaacggcacgcccacaggcatcccagagcacccagatgattctctggtgcagattagcaaggacttcctagaggtgccactggcgcaatcggctcccacgccccgttcacctgatctggttgcgcaaaccacaccgcgagcgccacttacactggtgactggtgaatgtgcaacagcaacatcaccactcaaacaggtcacaactaacaccacaaaggagcagcgacccggcacctccaactcaacgcgacctccttctcgcagaggatcgtcagctttgtcgcgcaccatgtcagctatcttcagacgcagtaattctcacctggtggagaatggcgctgcaaacggcccgacctcagcctttagggagccgagctacagtgcacgcacatccgagactaatcttgcaaatgccaacaagttagcgactcccatgagtgctagtaaaggcactcgccgattctcatttcagcgatcggcacaaacaacgaggtctaacacaccgccatcacccggttcacccctggaaatggccataagctccaaggacaacaaggcacagatgcctaattcgtcggatttctttgataacaccacgaagaaatcaagagcgcagaccggtggtctgttccaaagagtcaacttctccagtagtactaatcgccatccccgccgtgcaagaagtgtcgaacgcaagaagaagaaccacgaggagcatcaagatgacaagctgaagcgcgagccatgggccatcccgccagatgccggcaccggcatgaaagcacggagactaagcttgagcctacccgatgacttcttcgttgatgtcgctgagttgctcaaagaatttgagtaccaacacaagctgctcggtcggcacggtaaacacttgggcaagggtgccacctctaaagtcacactgatggtgcgcaaaggttgccccggagagatgtatgctgtgaaggagttccggtccaagagctcgtctgagacagccgaagagtacgagaagaagatcaagtccgaatacagcatcgccaagagtctgcaccacccaaatgtcatcgagaccgttcgattgtgtacagatcatggacgatggaatcacgttatggagtactgttcggagggcgatctgttcaacttagtctcaaagaagtatctcaaggaccccggccatgacgttgatcgactgtgcctgttcaagcagctttgccaaggcattaattaccttcacaataacggcatcgcacatcgtgatatcaaactggaaaaccttctgatcacaaaggacagcaagctcaaaatcaccgacttcggtgtttctgaggtgttctcgggcacacaccctggtttacgggaatcagggggtcagtgtggcgtgaacatgggtgacgtgcgcttgtgtaagccaggtatctgcggcagtttgccatatatcgcacccgaggtgttgagcaagcagaaagattatgaccctcgtccactggatatctggagctcagccgtcgtgatgatttatcttctctttggtgctaacctttgggagaaggcccagccaggccttactggcgagtcacagcgatactacaacgacatcaacacccagtgggacaagattgaggcaaagaaggctgccgacccagagggtcctgcaaaagatgcatatccaaaggttatgccattcgagctctttgtcaagcctgtggctcttcgtcgtctcctcctcaccatgctgcacaacgacccgcacaagcgtcccaccatgagcgaagttgtcagtggcagatggatgaaaggtgtcgaatgctgccagccagagagctacgaagatccggtgaaattcatcgacgcctctaaaaaggatggtgcaaaaggcagtgcaggcaaaattttctgccacaaccatttacctattgtcgctacgtcacacggtctgccacctatgccaggcaaagctggttactagatttgaactcgtcgcctaaagctctactaccaataagccaattttcaccaatatccttctttttgctgtactcctttctttctgttttgtttcacagtcaatgtccacaggacggcgttacggcaggtatatatcatggccacggatggtcgcattgcggacggttaggggttcatcgcattcggtcatgacatgttagaagcatgatctagcttcactttgccatcaacttacatacgtttatttgcacatctttacaagaccgatatcacaactgcaagtttcccgcgtacggggccagagacactagccacggtcgcactatggatttgggtcgctgaggaagattcgccgactttcaaagacatagggaatacgtaacacagctgcgatagcttttttgccaaccttcttgtactagataggtctttccctatacagaaagaagccagaaggaaacaatcgactgttttgaggagaaaataatggtggtagataagaaagcagaggtcgattggctcatggctgtaatctagctaccggcaaccggtttgaaacaagccccaaattcaaacacactttgccataaaaacagacaacggcattcgtagcttgatatgctcttgcaaccgttagtagtaaggcaattctccatcggccacaccctctacctcatagtatattttgcaggcaaggtaggtatggtatcagtagttttgtaacgatgtcgatccgatggtctgtcccgccacggcgtcattgaagtatcctccccaagctctccatgagtgtaacaccaatgcagcttcaccaccatcacctttgctctccgcaagacgttggatgatatatctatgcttactggctaatttttc

SEQ ID NO: 5116 - DNA, 579 bp, Muscodor strobelii
  misc_feature: SGI cDNA ID NO. 561415
  misc_feature: Encodes the peptide sequence at SEQ ID NO 5117
atgatactaagtgttgtttctctcttgagggaccatccggatgtcggttaccgccttcgcatcctactttatgacttcgaaaattactgcacgaatccagactccgccaagcggctctctactaccatcgatgagctatacatcagcagcccttatttcaccgacgacgaagcgaaactgatcaagcaagcgatcgtaaatcatagggtcacggtcacatacgacgagttggatattgcctttgaagacgacgaagacatgatgaaagagggtatctggctaccaatatcagcgccatggaataccgtcgaggaacaccttcatgcgcgaatggcacatttcttcgaaaagcgacgagatacttatgatgcgcgaccatgcggcccttctggtctagggccgatataccgagccgtctttggaatcgataagtctgagtacctggacaacgacgaattcgcaaaccggcttcaacaggatgagtccttcacatctacagaaccccaacgtgggtcacgaaggcggccgtcagatcaggagaataatgcaaagtggtttcaacggtataaagctcattag

SEQ ID NO: 5117 - protein, 192 aa, Muscodor strobelii
  misc_feature: SGI Peptide ID NO. 561415
  misc_feature (13)..(153): NCBI GI: 240273750 Blast Desc: conserved [Ajellomyces capsulatus H143]
  misc_feature (13)..(153): NCBI GI: 225555506 Blast Desc: conserved [Ajellomyces capsulatus G186AR]
  misc_feature (13)..(158): NCBI GI: 145247512 Blast Desc: An12g09530 [Aspergillus niger] gi|134080744|emb|CAL00858.1| [Aspergillus niger]
  misc_feature (6)..(178): NCBI GI: 238840222 Blast Desc: conserved [Microsporum canis CBS 113480]
  misc_feature (13)..(179): NCBI GI: 238505044 Blast Desc: conserved [Aspergillus flavus NRRL3357] gi|220689865|gb|EED46215.1| conserved [Aspergillus flavus NRRL3357]
  misc_feature (13)..(159): NCBI GI: 169780766 Blast Desc: [Aspergillus oryzae RIB40] gi|83773587|dbj|BAE63714.1| protein product [Aspergillus oryzae]
MILSVVSLLRDHPDVGYRLRILLYDFENYCTNPDSAKRLSTTIDELYISSPYFTDDEAKLIKQAIVNHRVTVTYDELDIAFEDDEDMMKEGIWLPISAPWNTVEEHLHARMAHFFEKRRDTYDARPCGPSGLGPIYRAVFGIDKSEYLDNDEFANRLQQDESFTSTEPQRGSRRRPSDQENNAKWFQRYKAH

SEQ ID NO: 5118 - DNA, 160 bp, Muscodor strobelii
  misc_feature: SGI EST ID NO. CUFF.12947.0
  misc_feature: Variant of the nucleotide sequence at SEQ ID NO 5116
cgggatatgatactaagtgttgtttctctcttgagggaccatccggatgtcggttaccgccttcgcatcctactttatgacttcgaaaattactgcacgaatccagactccgccaagcggctctctactaccatcgatgagctatacatcagcagccctt

SEQ ID NO: 5119 - DNA, 528 bp, Muscodor strobelii
  misc_feature: SGI cDNA ID NO. 561416
  misc_feature: Encodes the peptide sequence at SEQ ID NO 5120
atgccgcattatcaagtcttacactcctacatactctcaagggagcagaagtcattgatagcgcaagccatcacggatcttcatgcccatacctttacgacgcctaaactctttgtgcacgtgtcttttcatgcgaccgacacctcatctggtgatttcttcatagccggtcaggttctgactgaagcaggcaattacatcatagctaatatcaggacatcgccgaagagatcaaaatcggatttcgattctctaggcaaggatattgaagacgcctggtatcgggtcatcggaaatctggacggtggcagatataacaaggctgctgcattgcgaatgatccgtttcatgacggcggtcaccctccgtgagcaaggcctcgagcttcctgaggctggggcagaagcggcatggatgaaagagatgcgaccatatctagaaagaagggcagaaaatggcgatgccgacgtcaaggctatgcttcaggaggtcgatacaagacctgatctcgcgggatggaagaattaa

SEQ ID NO: 5120 - protein, 175 aa, Muscodor strobelii
  misc_feature: SGI Peptide ID NO. 561416
  misc_feature (1)..(170): NCBI GI: 256724856 Blast Desc: NECHADRAFT_102460 [Nectria haematococca mpVI 77-13-4]
  misc_feature (1)..(147): NCBI GI: 46110659 Blast Desc: FG02211.1 [Gibberella zeae PH-1]
  misc_feature (1)..(130): NCBI GI: 145244172 Blast Desc: An11g06050 [Aspergillus niger] gi|134079278|emb|CAK40760.1| [Aspergillus niger]
  misc_feature (1)..(170): NCBI GI: 256735597 Blast Desc: [Nectria haematococca mpVI 77-13-4]
  misc_feature (1)..(143): NCBI GI: 254822337 Blast Desc: cis-3-chloroacrylic acid dehalogenase, [Mycobacterium intracellulare ATCC 13950]
  misc_feature (1)..(170): NCBI GI: 189206231 Blast Desc: [Pyrenophora tritici-repentis Pt-1C-BFP] gi|187975543|gb|EDU42169.1| [Pyrenophora tritici-repentis Pt-1C-BFP]
  misc_feature (1)..(141): NCBI GI: 118470587 Blast Desc: cis-3-chloroacrylic acid dehalogenase, [Mycobacterium smegmatis str. MC2 155] gi|118171874|gb|ABK72770.1| cis-3-chloroacrylic acid dehalogenase, [Mycobacterium smegmatis
MPHYQVLHSYILSREQKSLIAQAITDLHAHTFTTPKLFVHVSFHATDTSSGDFFIAGQVLTEAGNYIIANIRTSPKRSKSDFDSLGKDIEDAWYRVIGNLDGGRYNKAAALRMIRFMTAVTLREQGLELPEAGAEAAWMKEMRPYLERRAENGDADVKAMLQEVDTRPDLAGWKN

SEQ ID NO: 5121 - DNA, 1250 bp, Muscodor strobelii
  misc_feature: SGI EST ID NO. CUFF.12953.0
  misc_feature: Variant of the nucleotide sequence at SEQ ID NO 5119
cttcaacgtcaatatctcacttaatttgacagtacgattgcaacagaaatataaatccaataattgaccattggacttattagctatgccgcattatcaagtcttacactcctacatactctcaagggagcagaagtcattgatagcgcaagccatcacggatcttcatgcccatacctttacgacgcctaaactctttgtgcacgtgtcttttcatgcgaccgacacctcatctggtgatttcttcatagccggtcaggttctgactgaagcaggcaattacatcatagctaatatcaggacatcgccgaagagatcaaaatcggatttcgattctctaggcaaggatattgaagacgcctggtatcgggtcatcggaaatctggacggtggcagatataacaaggctgctgcattgcgaatgatccgtttcatgacggcggtcaccctccgtgagcaaggcctcgagcttcctgaggctggggcagaagcggcatggatgaaagagatgcgaccatatctagaaagaagggcagaaaatggcgatgccgacgtcaaggctatgcttcaggaggtcgatacaagacctgatctcgcgggatggaagaattaaaatttcgctgatgggagcattgagatcattgcagtgcgtgaagcctaaatctcaggatatcctgttatgttggaacagaacgacgaacacagggtttatagaaaatgacagctgagtcttgcatggcaacgttgatcgggaaccattcggctactaagatcaaaatgcaccgttcttgtggaagtggcaatcaaggtgcccatgtctggtgacttcaaagagccattaatggagctcactatgtcaattagcatatgtgtattgacttcgggatgatggtagcgaagtacccagggtgtttgtttcccttctgtcctctctcgcttttcaatacattttcctacgacatagtcagtgacataataagtatgaaagacttgttgaacaatgtgcacaaagctctagagcagaggaccatcttgcattgatcctaatgacagattctgacatgtgcttcgttccacaagtacaactccgagaagagacgatgaagaggggggtcaagccaagaaatggtcgcatttcgtaaatgtgcaggaacatcgagcaagccccttggcgtcgcggatggacagaggactgatattttgctgttgcctactgcactggaacccccaaggccgtagacacaccctag

SEQ ID NO: 5122 - DNA, 441 bp, Muscodor strobelii
  misc_feature: SGI cDNA ID NO. 561417
  misc_feature: Encodes the peptide sequence at SEQ ID NO 5123
atgactagcctcctccaatctgtcatcctcctcctccttggcctcattccccttgccgcaggatggggcgccgaattctacgctggcgaaacaggctgttatgatggaccgaaacactcgggcgtgtttaattatactggcaaagacctgcagttcgagtatattactgacgagatcccctgcttgaaccttggacaacttcctgcagacgagaacgtaacctgtaccctctacaatagccccgttgataatccaccagcgctgccatgcgtaataaacggatcatttgttgccagatctgtgcacctatatgatatcatgtattacgtagggtgggaaagtactggctgcacaggcaaagattatatatggcagatcgatccatcgaaagacggccgccaccccggtgtagctgtccgtagtttcaagtgcatagcttga

SEQ ID NO: 5123 - protein, 146 aa, Muscodor strobelii
  misc_feature: SGI Peptide ID NO. 561417
MTSLLQSVILLLLGLIPLAAGWGAEFYAGETGCYDGPKHSGVFNYTGKDLQFEYITDEIPCLNLGQLPADENVTCTLYNSPVDNPPALPCVINGSFVARSVHLYDIMYYVGWESTGCTGKDYIWQIDPSKDGRHPGVAVRSFKCIA

SEQ ID NO: 5124 - DNA, 1277 bp, Muscodor strobelii
  misc_feature: SGI EST ID NO. CUFF.13017.0
  misc_feature: Variant of the nucleotide sequence at SEQ ID NO 5122
gcaacttctatgtgagtcacggcttataccgaatacctgtttcggctgtcaatcacatctgtgtctagactatcatcaagcctctgcaatcaatgaatatacatgagacaggcctcagatcaaaaatccgatatcgtccttgctgtgatcaatctgccgatagctagtccgaatcactaatcgcgtgtcactccgaagctcgccacacagtctgcgaatcacgcatgtcgtcaacgcagataagtcacgtaacttgaaatgaatgagctagctcgttgcagcactaaattcttgaatgtacatattctcacgagagcatgttagtattcgcgatctttcactctactcccgcattttatgctcggcaacaccatactctcagatatccttttatgcgcgaaccacggccctcgcaaatatgactagcctcctccaatctgtcatcctcctcctccttggcctcattccccttgccgcaggatggggcgccgaattctacgctggcgaaacaggctgttatgatggaccgaaacactcgggcgtgtttaattatactggcaaagacctgcagttcgagtatattactgacgagatcccctgcttgaaccttggacaacttcctgcagacgagaacgtaacctgtaccctctacaatagccccgttgataatccaccagcgctgccatgcgtaataaacggatcatttgttgccagatctgtgcacctatatgatatcatgtattacgtagggtgggaaagtactggctgcacaggcaaagattatatatggcagatcgatccatcgaaagacggccgccaccccggtgtagctgtccgtagtttcaagtgcatagcttgataatgggaatgcattgtgatggacctgaagctagaggctcatgatcgagtgctcgattggtagaccaataaccctgtggtcaatcgggtattatggctttcataaaagcatatacaaacgcaaattctgtcaattgatctgatgtatcactgtcccgtatatgcccataattttggcttgtgctttgatcgacacagacaacgagagcaatcttgtattgcgatggcttcacttttaatatcgcccgtgctgcgtagattcatcgccagggtcgggaacacattcgacacataccggacctgaatcttgaaattagacactcgatgtcagtgtcatatagtttcaaagaatgcatgaatcgcaaaacattgatcagaagtttttgtatttcaaattggggtgtctaaccagaagtcgg

SEQ ID NO: 5125 - DNA, 309 bp, Muscodor strobelii
  misc_feature: SGI cDNA ID NO. 561418
  misc_feature: Elevated expression when VOC is produced
  misc_feature: Encodes the peptide sequence at SEQ ID NO 5126
atgtgtctgcagtggtggtgcgcaggcggtgctgctctctggatctgcaatgatggaaaatatttcactcaggcgaataaaatggtgatcgcggatatgatgaatcattgtattgacgcgtgtcctgatcctcagaactcaagcatgtcacagtgtcagatattcccggatgatccatacaataaatacaacattatcgtcaaaggggacaccgattgcttttggggcgaaagaccgacttctggtccggtatgtgtcgaatgtgttcccgaccctggcgatgaatctacgcagcacgggcgatattaa

SEQ ID NO: 5126 - protein, 102 aa, Muscodor strobelii
  misc_feature: SGI Peptide ID NO. 561418
  misc_feature: Useful for introducing or modulating the production of volatile compounds
MCLQWWCAGGAALWICNDGKYFTQANKMVIADMMNHCIDACPDPQNSSMSQCQIFPDDPYNKYNIIVKGDTDCFWGERPTSGPVCVECVPDPGDESTQHGRY

SEQ ID NO: 5127 - DNA, 987 bp, Muscodor strobelii
  misc_feature: SGI EST ID NO. CUFF.13018.3
  misc_feature: Variant of the nucleotide sequence at SEQ ID NO 5125
caacgtcattccagaccactacgaatagtaaatagggctaacatgatttgatacactagatcgtgtctataggcatgtgtctgcagtggtggtgcgcaggcggtgctgctctctggatctgcaatgatggaaaatatttcactcaggcgaataaaatggtgatcgcggatatgatgaatcattgtattgacgcgtgtcctgatcctcagaactcaagcatgtcacagtgtcagatattcccggatgatccatacaataaatacaacattatcgtcaaaggggacaccgattgcttttggggcgaaagaccgacttctggttagacaccccaatttgaaatacaaaaacttctgatcaatgttttgcgattcatgcattctttgaaactatatgacactgacatcgagtgtctaatttcaagattcaggtccggtatgtgtcgaatgtgttcccgaccctggcgatgaatctacgcagcacgggcgatattaaaagtgaagccatcgcaatacaagattgctctcgttgtctgtgtcgatcaaagcacaagccaaaattatgggcatatacgggacagtgatacatcagatcaattgacagaatttgcgtttgtatatgcttttatgaaagccataatacccgattgaccacagggttattggtctaccaatcgagcactcgatcatgagcctctagcttcaggtccatcacaatgcattcccattatcaagctatgcacttgaaactacggacagctacaccggggtggcggccgtctttcgatggatcgatctgccatatataatctttgcctgtgcagccagtactttcccactatcacgacgagagattagcccacttctcatatcaagttctgtagtagggagaattgaaggaggttgtctattcattgttgaaaggggcgtaggcaagcgcctgacttacccctacgtaatacatgatatcatataggtgcacagatctggc

SEQ ID NO: 5128 - DNA, 1725 bp, Muscodor strobelii
  misc_feature: SGI cDNA ID NO. 561419
  misc_feature: Reduced expression when VOC is produced
  misc_feature: Encodes the peptide sequence at SEQ ID NO 5129
atgtcgagactcccttccgactcttttctcccctcaggagccatagacgttgatcgttcgatgccatccttctctcgactcaatggctcctcgtcatccgtcatatcgcctctgtctctttcacatgctccaaatcaacactcgtactttgatgccaggtctgtgcctccaaactacgtccattcgccctcatcctttgcaggccctggctctcgacggtatctttctccagatcagactcaccagccgtctgcacacgacccgcggtcgtccagtatatctccgaaccggcaatctaacggatctgccatcacgtcacccctcatggctcccacgaccaataccggcgccatgtcgccgttcgaacatctcagtcccactaccgctgcgagcttgcttcagcgcagggaggagcacaaccgaaaggctcttgagagctggaaagccgaacgcactcacctggaagcctctcgggctcgtgctgaggagatgtttactgaagaacgaaccttgatggacgaggagagactgatatgggtcgaccagaagcagaagcttgaaatggaagtagctgagtggaagagacgagccgagaaagctgagaataacttcgatcagctgtttgccgtcctcgcaaaagtgcaggagtcaacaagtgacatgtcggcttcgaatcgtgccataagagaaggcatcaacaaggcctgtgcctctctattggggcttgacggagcgatggacaaacaattaagatctatgcgaaccagtggctccggcagttcaggacatagtggtccaccaacctcaaagtttcgcagcccagcagatggtctctcgcctagtagtgtgcccgggagagggtcaaccatgcccgagtcgaaaccattcgagccgcttgacccacgaatgcagagtggcagcccccaggccacgccttccggccaagaacagccatccattccgtctatcgatgtccacgagataaatcccgaactggaggggattcggctcaaggcgccggccattcagaaacccacattcactgatggaaaaccaccatcgccactgttgcctgccgacaccgtcacggctctttctcctggtgataagaccaagaaagcactgcaagcgcccgagcaggcccgcttgacaatgcatgctggtcatacccccaatcattctatgtcattctcccagttgccaactatggactctactttggccccgaatacagctgggagctcgggcacctcaaccccgacctatcttagaggccaagtgaaatccgacacaacacatgagagaaaatcaaccgcggagtcttccacagccccgcacattgagcaggaatcagacatgggtgacgtggctgtctacgagccaagcgacgaggcaccagcgttaaagggtccattatgccttaagaatcgaccagcagccgacgaagttttccttcgacgactctcggataagctagaggaagtcaaggctaacgacgtccggccttccgtgcttactgaggaagattcgcaggaagaagggccgaaggagccgaccgaagaatctgcacatcctggtcctagtgctgccaccgaaaacgaaggcaaacaagacgactcagacggcggaatggagaccatcgaacaagatataccgttaaagctcaagaagagcaataacttcggtcagccgctgggtgagctaggcaataagtccggattctaa

SEQ ID NO: 5129 - protein, 574 aa, Muscodor strobelii
  misc_feature: SGI Peptide ID NO. 561419
  misc_feature (1)..(568): NCBI GI: 85112043 Blast Desc: NCU01944 [Neurospora crassa OR74A] gi|28926001|gb|EAA34992.1| [Neurospora crassa OR74A]
  misc_feature (1)..(568): NCBI GI: 88866502 Blast Desc: [Neurospora crassa]
  misc_feature (128)..(568): NCBI GI: 256733734 Blast Desc: NECHADRAFT_99762 [Nectria haematococca mpVI 77-13-4]
  misc_feature (2)..(566): NCBI GI: 171676151 Blast Desc: protein product [Podospora anserina] gi|170936141|emb|CAP60801.1| protein product [Podospora anserina]
  misc_feature (2)..(564): NCBI GI: 46129447 Blast Desc: FG08899.1 [Gibberella zeae PH-1]
  misc_feature (1)..(566): NCBI GI: 145609868 Blast Desc: MGG_02928 [Magnaporthe grisea 70-15] gi|145017247|gb|EDK01610.1| MGG_02928 [Magnaporthe grisea 70-15]
  misc_feature (137)..(566): NCBI GI: 149210435 Blast Desc: MGCH7_ch7g692 [Magnaporthe grisea 70-15] gi|86196647|gb|EAQ71285.1| MGCH7_ch7g692 [Magnaporthe grisea 70-15]
  misc_feature (1)..(422): NCBI GI: 261353437 Blast Desc: conserved [Verticillium albo-atrum VaMs.102]
  misc_feature (320)..(568): NCBI GI: 116193765 Blast Desc: CHGG_06600 [Chaetomium globosum CBS 148.51] gi|88182513|gb|EAQ89981.1| CHGG_06600 [Chaetomium globosum CBS 148.51]
  misc_feature (322)..(567): NCBI GI: 154308303 Blast Desc: [Botryotinia fuckeliana B05.10] gi|150852982|gb|EDN28174.1| [Botryotinia fuckeliana B05.10]
  misc_feature: Useful for introducing or modulating the production of volatile compounds
MSRLPSDSFLPSGAIDVDRSMPSFSRLNGSSSSVISPLSLSHAPNQHSYFDARSVPPNYVHSPSSFAGPGSRRYLSPDQTHQPSAHDPRSSSISPNRQSNGSAITSPLMAPTTNTGAMSPFEHLSPTTAASLLQRREEHNRKALESWKAERTHLEASRARAEEMFTEERTLMDEERLIWVDQKQKLEMEVAEWKRRAEKAENNFDQLFAVLAKVQESTSDMSASNRAIREGINKACASLLGLDGAMDKQLRSMRTSGSGSSGHSGPPTSKFRSPADGLSPSSVPGRGSTMPESKPFEPLDPRMQSGSPQATPSGQEQPSIPSIDVHEINPELEGIRLKAPAIQKPTFTDGKPPSPLLPADTVTALSPGDKTKKALQAPEQARLTMHAGHTPNHSMSFSQLPTMDSTLAPNTAGSSGTSTPTYLRGQVKSDTTHERKSTAESSTAPHIEQESDMGDVAVYEPSDEAPALKGPLCLKNRPAADEVFLRRLSDKLEEVKANDVRPSVLTEEDSQEEGPKEPTEESAHPGPSAATENEGKQDDSDGGMETIEQDIPLKLKKSNNFGQPLGELGNKSGF

SEQ ID NO: 5130 - DNA, 3084 bp, Muscodor strobelii
  misc_feature: SGI EST ID NO. CUFF.12986.0
  misc_feature: Variant of the nucleotide sequence at SEQ ID NO 5128
aggaaaagggaaccccaattaagccggccctgtcaccttctcccatctcatcttgtcctgtttctcattattccgtttgatgtacgtacatagcacgcccacgcctatgcagcccagatttctcttccatcttttcaaatgtgcacgcgactattcgaaataagcaaatatctcaattcgacaaatccgaaccatcaatccgaaccattaagacggactgcgttctgcacgtcaactacaagctgttcagacgaaaaacgacgtgaatacgtcactccccgtttatcacccgtactcccgtgtacacccgtcactcaaccttacctcggccaacacgggattacctagcaaccttcaaccattttcagacgcaagcaacgcattctcgtttgatatcggtcgtctgtgcttcactttagtgagaaaacaactgtgctctggtcatacagactgaatgacgctactccctgtcgcattaaagcgtcaagtcacaagccaagtttggtacgatttggaccacgcgactgcctccagcgtcaaatgtttaatgcactagctttgattctcgacctcgattgacaccgatcttgccaatttggagcttcacgcctgctcctgcgaaaatgctcaccatgtcgagactcccttccgactcttttctcccctcaggagccatagacgttgatcgttcgatgccatccttctctcgactcaatggctcctcgtcatccgtcatatcgcctctgtctctttcacatgctccaaatcaacactcgtactttgatgccaggtctgtgcctccaaactacgtccattcgccctcatcctttgcaggccctggctctcgacggtatctttctccagatcagactcaccagccgtctgcacacgacccgcggtcgtccagtatatctccgaaccggcaatctaacggatctgccatcacgtcacccctcatggctcccacgaccaataccggcgccatgtcgccgttcgaacatctcagtcccactaccgctgcgagcttgcttcagcgcagggaggagcacaaccgaaaggctcttgagagctggaaagccgaacgcactcacctggaagcctctcgggctcgtgctgaggagatgtttactgaagaacgaaccttgatggacgaggagagactgatatgggtcgaccagaagcagaagcttgaaatggaagtagctgagtggaagagacgagccgagaaagctgagaataacttcgatcagctgtttgccgtcctcgcaaaagtgcaggagtcaacaagtgacatgtcggcttcgaatcgtgccataagagaaggcatcaacaaggcctgtgcctctctattggggcttgacggagcgatggacaaacaattaagatctatgcgaaccagtggctccggcagttcaggacatagtggtccaccaacctcaaagtttcgcagcccagcagatggtctctcgcctagtagtgtgcccgggagagggtcaaccatgcccgagtcgaaaccattcgagccgcttgacccacgaatgcagagtggcagcccccaggccacgccttccggccaagaacagccatccattccgtctatcgatgtccacgagataaatcccgaactggaggggattcggctcaaggcgccggccattcagaaacccacattcactgatggaaaaccaccatcgccactgttgcctgccgacaccgtcacggctctttctcctggtgataagaccaagaaagcactgcaagcgcccgagcaggcccgcttgacaatgcatgctggtcatacccccaatcattctatgtcattctcccagttgccaactatggactctactttggccccgaatacagctgggagctcgggcacctcaaccccgacctatcttagaggccaagtgaaatccgacacaacacatgagagaaaatcaaccgcggagtcttccacagccccgcacattgagcaggaatcagacatgggtgacgtggctgtctacgagccaagcgacgaggcaccagcgttaaagggtccattatgccttaagaatcgaccagcagccgacgaagttttccttcgacgactctcggataagctagaggaagtcaaggctaacgacgtccggccttccgtgcttactgaggaagattcgcaggaagaagggccgaaggagccgaccgaagaatctgcacatcctggtcctagtgctgccaccgaaaacgaaggcaaacaagacgactcagacggcggaatggagaccatcgaacaagatataccgttaaagctcaagaagagcaataacttcggtcagccgctgggtgagctaggcaataagtccggattctaacggatagacgacctcataatcatccgaataacctatttcccaatcacccgaatcactcattactcagtctcacgaatcacttattagtcgtcgacatgaatcagctattgcagctatcacactttccctttgttacactctgcttcatcgcctctacgcgaggatcgagaagcgtaccccacgatcttatctctggcgacggcattgcattcgattactagcattgaaacggaactcaaatacccccgcgcgttgtcttttcttatcaacacttcggaaggaaaatggttgatcacatggtgtttgggatgcaggactgcacatttcggtggctcgcgttggatcattttctattagactgaaggacgattcccccattctgcaagaagcaattgtgccacctggctgtaaggtggcggtttttattagttgtcatagccaaaaagagaaggacaatcatgtatattggagggtgttcacggtcattgggcgagtgaagacaaaaaagatattttcagctggcatacagctcaacattgcatatatttattccctttccggtggcttgggggagcaccgcattaggcctcacctcatcgatctggacatggtccaaaagaggagatgaattgtctgtatatacttgtttgtaagaagatgcatcattgcttgccgatgatagcaaatttcgaatatcataatgccaactctcggcagttgagcaaac

SEQ ID NO: 5131 - DNA, 1296 bp, Muscodor strobelii
  misc_feature: SGI cDNA ID NO. 561420
  misc_feature: Encodes the peptide sequence at SEQ ID NO 5132
atgacgacgcggtatcgggtcgaatatgccctcaagactcataggagagatcagcttatagaatggatcaaaggactgctggcggtgcctttcgtgttgtactcccagccgacgggcatgtttgataccaatggcttcagtatcacacagatgtcggaggaggcccacagacgatatgctgagataatgcgtgatgttgaatacatgcttgacgaccacattgcacaccaaggagacgcgaatcctgttccctcaaaactcaaactgctcgttccgccaatcggcaattttttcacgaggttacctctagaagcagcattcaaatttcaagatcgaaagcgctacatatcctcacggcgttttgtctcaccttcgttcaacgatgttcgactcattctgaacacagcccaactgatggctgtcactacttatggcacactccaactcgcgactttcgatggagacgtgacattgtatgacgatggcgagagtcttgagcctaacagtcctgtaattccgcgcatgctcgatctgttacgcaagaatgtcaagatcggcattgtcacggcagctgggtacacgaccgaagaccggtattacgcccgtctgcacggtcttctggacgcgatagctcagtccagcctacttacaccgcagcagagacagaacattgtcatcatgggcggggaggccaatttcatgttcgagttttgtcccacttcgcctcacttgcttgcacctgtgccacgcgagcggtggttgacggcggagatggccacatggtctgagacgagcattacggcgttgttagatgtcgccgaggctgcattacgtgattgcatcaagaccatgaacttacctgcgacattaatgcgcaaggatcgcgccgtcggcatcattcctacgaatcctaaagtacgcattccccgcgagtctctagaagagaccgtgctcgtagtgcagaaaattctcgagctcagtgtgggcggcactgatcgcaagaacaaagtcgtgcctttctgcgcattcaatggcggacgcgacgtatttgtggacattggtgacaagagttggggtgtgaccgtatgtcaagagtggttcggggcaaggaatggaggccgaccgacagccatcaagcccgaggagacgttgcatgttggcgaccaatttctcagtgccggaagcaatgatttcaaggcgaggagcgtggcaaccacggcttggattgccaatccggaggaaactgtagagctgctagatgagttggccgatttcatgacgaagaagctgagctag

SEQ ID NO: 5132 - protein, 431 aa, Muscodor strobelii
  misc_feature: SGI Peptide ID NO. 561420
  misc_feature (1)..(419): Pfam Id: PF06437 Pfam Desc: IMP-specific 5'-nucleotidase
  misc_feature (1)..(431): NCBI GI: 145609832 Blast Desc: conserved [Magnaporthe grisea 70-15] gi|145017213|gb|EDK01576.1| conserved [Magnaporthe grisea 70-15]
  misc_feature (1)..(431): NCBI GI: 171676149 Blast Desc: protein product [Podospora anserina] gi|170936140|emb|CAP60800.1| protein product [Podospora anserina]
  misc_feature (21)..(431): NCBI GI: 74618058 Blast Desc: ISN1_NEUCR RecName: Full=IMP-specific 5'-nucleotidase 1 gi|88866503|gb|ABD57298.1| [Neurospora crassa]
  misc_feature (21)..(431): NCBI GI: 164429568 Blast Desc: IMP-specific 5'-nucleotidase 1 [Neurospora crassa OR74A] gi|157073532|gb|EDO65462.1| IMP-specific 5'-nucleotidase 1 [Neurospora crassa OR74A]
  misc_feature (1)..(431): NCBI GI: 256734247 Blast Desc: [Nectria haematococca mpVI 77-13-4]
  misc_feature (1)..(431): NCBI GI: 46140229 Blast Desc: FG11629.1 [Gibberella zeae PH-1] gi|82592916|sp|Q4HTS9.1|ISN1_GIBZE RecName: Full=IMP-specific 5'-nucleotidase 1
  misc_feature (51)..(431): NCBI GI: 149210507 Blast Desc: MGCH7_ch7g728 [Magnaporthe grisea 70-15] gi|86196683|gb|EAQ71321.1| MGCH7_ch7g728 [Magnaporthe grisea 70-15]
  misc_feature (1)..(428): NCBI GI: 154303796 Blast Desc: BC1G_08782 [Botryotinia fuckeliana B05.10] gi|150854366|gb|EDN29558.1| BC1G_08782 [Botryotinia fuckeliana B05.10]
  misc_feature (1)..(431): NCBI GI: 116193763 Blast Desc: conserved [Chaetomium globosum CBS 148.51] gi|88182512|gb|EAQ89980.1| conserved [Chaetomium globosum CBS 148.51]
  misc_feature (1)..(423): NCBI GI: 240110364 Blast Desc: IMP-specific 5'-nucleotidase family protein [Coccidioides posadasii C735 delta SOWgp]
MTTRYRVEYALKTHRRDQLIEWIKGLLAVPFVLYSQPTGMFDTNGFSITQMSEEAHRRYAEIMRDVEYMLDDHIAHQGDANPVPSKLKLLVPPIGNFFTRLPLEAAFKFQDRKRYISSRRFVSPSFNDVRLILNTAQLMAVTTYGTLQLATFDGDVTLYDDGESLEPNSPVIPRMLDLLRKNVKIGIVTAAGYTTEDRYYARLHGLLDAIAQSSLLTPQQRQNIVIMGGEANFMFEFCPTSPHLLAPVPRERWLTAEMATWSETSITALLDVAEAALRDCIKTMNLPATLMRKDRAVGIIPTNPKVRIPRESLEETVLVVQKILELSVGGTDRKNKVVPFCAFNGGRDVFVDIGDKSWGVTVCQEWFGARNGGRPTAIKPEETLHVGDQFLSAGSNDFKARSVATTAWIANPEETVELLDELADFMTKKLS

SEQ ID NO: 5133 - DNA, 1574 bp, Muscodor strobelii
  misc_feature: SGI EST ID NO. CUFF.12990.0
  misc_feature: Variant of the nucleotide sequence at SEQ ID NO 5131
ctttgacatcatagagaaggcttcataccaaaagtcaaagacccaaaaacatacataaccttatttccgggttgattcatttatcctttcccaaatcatagcgtgctgttgatcttgcacgatgacgacgcggtatcgggtcgaatatgccctcaagactcataggagagatcagcttatagaatggatcaaaggactgctggcggtgcctttcgtgttgtactcccagccgacgggcatgtttgataccaatggcttcagtatcacacagatgtcggaggaggcccacagacgatatgctgagataatgcgtgatgttgaatacatgcttgacgaccacattgcacaccaaggagacgcgaatcctgttccctcaaaactcaaactgctcgttccgccaatcggcaattttttcacgaggttacctctagaagcagcattcaaatttcaagatcgaaagcgctacatatcctcacggcgttttgtctcaccttcgttcaacgatgttcgactcattctgaacacagcccaactgatggctgtcactacttatggcacactccaactcgcgactttcgatggagacgtgacattgtatgacgatggcgagagtcttgagcctaacagtcctgtaattccgcgcatgctcgatctgttacgcaagaatgtcaagatcggcattgtcacggcagctgggtacacgaccgaagaccggtattacgcccgtctgcacggtcttctggacgcgatagctcagtccagcctacttacaccgcagcagagacagaacattgtcatcatgggcggggaggccaatttcatgttcgagttttgtcccacttcgcctcacttgcttgcacctgtgccacgcgagcggtggttgacggcggagatggccacatggtctgagacgagcattacggcgttgttagatgtcgccgaggctgcattacgtgattgcatcaagaccatgaacttacctgcgacattaatgcgcaaggatcgcgccgtcggcatcattcctacgaatcctaaagtacgcattccccgcgagtctctagaagagaccgtgctcgtagtgcagaaaattctcgagctcagtgtgggcggcactgatcgcaagaacaaagtcgtgcctttctgcgcattcaatggcggacgcgacgtatttgtggacattggtgacaagagttggggtgtgaccgtatgtcaagagtggttcggggcaaggaatggaggccgaccgacagccatcaagcccgaggagacgttgcatgttggcgaccaatttctcagtgccggaagcaatgatttcaaggcgaggagcgtggcaaccacggcttggattgccaatccggaggaaactgtagagctgctagatgagttggccgatttcatgacgaagaagctgagctagggttttgtgattgcttataggaagctttatgttaggcgggattgatgttgagacaatgcaagcgggcaagagataatgctggtatgaagacggaagtatccgagtcataataagcaactgagaataccccaaaatttgacataatacggaagtgtcg

SEQ ID NO: 5134 - DNA, 1644 bp, Muscodor strobelii
  misc_feature: SGI cDNA ID NO. 561421
  misc_feature: Encodes the peptide sequence at SEQ ID NO 5135
atgacttcaatggggtctgcgaaagtagatactgatttacaatatgacgtgatcgtaattggaggtggcttcggaggctgttacatgctatggaaactccgaagtctcgggttctcagtacaccttcttgaagcgggtttgacacttggcggcgtctggtattggaactcatatccgggttgtcgtgtcgattcggagatgccatactatcagttttccattcccgaagtttggaaaacttggtcatggtcggaacgattcccaagtcatgaagagctcaagggatacttccgacatgttgacaaggtcttgaatatatctaaggacgcgacgttcgatacacgagtgacagccgcaaacttcaactccttgacctcgagatgggaattgcagacagaaaatggtctcaaagcaacttgcaagtggctgattcccgcaaccggcaattcaagtgctgcatatgtgcccaactttgagggactagacgcgtttaaaggggcaatcatacagggctcttcatggcccaagtcaggaattgacttccagggaaagaaagttggactcattggtgccggcgcaacgggtgtgcaactgtcgcaagagatctcaaagcaggcagaagagttaactgtttacgtgcgaaacccggccactgccctgcctatgaggcaaagatccttctcgattctggaaaataatactcagaaggcgatataccggagtttgttccggttagctctcgagtccgttgttggattcgctggcgacgcccagacgcaggctttcggcgacgccacagaagaacaaagacaggagttgtgggaggagttgtgggcacgcggggcttttcacttccaactcggaaactacacggatttgctcatgaatcttgatgctaacagagcaatctacaagttttggagagacaaagttagcgcaagaattcaggacccagccaaaagggcaattctagctcccgaagaaccaccataccccttcgggacgaagcgaagcccactcgaacaaaattactacgagtgcctcagtcaacctcatgtaaaagtcgtcgatgtgaaggcggcaccaataagttccttcactgctggaggtattgtcactaacgacgggaaagagcgacctcacgacgtcgtcgtacttgcgactggatacgataacctgacaggaaatctcacccgaatgggtttgtgcggaaaagatggcattgaccttaaagagcgctggagagagggtgtatcgacctatatgggcatactggcaaacaattatcccaatatgttcatgatcttcgggccacaagcatctactgctttcgccaatgcgccactgtttattgaaatgcaaggtgatattgttgcagacttgcttgtcaagcttcgagaccaaaatgttgagactatcgaacctaagccggcggctgagagaaaatggaaacaggtggtgcaagggattaatgatgctacacttttccatctcagcgagtcgtcatggtatatgggtgccaacatcccaggaaagaaagttgaacagctgaattatctgggtggcatagtgccctatcaagccgcatgtcgcgatgctttcaaggattggtctgattttgacgtgcaattcgctaaggcatga

SEQ ID NO: 5135 - protein, 547 aa, Muscodor strobelii
  misc_feature: SGI Peptide ID NO. 561421
  misc_feature (16)..(51): Pfam Id: PF01266 Pfam Desc: FAD dependent oxidoreductase
  misc_feature (3)..(542): NCBI GI: 119189133 Blast Desc: CIMG_04614 [Coccidioides immitis RS]
  misc_feature (4)..(542): NCBI GI: 240111353 Blast Desc: Flavin-binding monooxygenase-like family protein [Coccidioides posadasii C735 delta SOWgp]
  misc_feature (7)..(540): NCBI GI: 255941320 Blast Desc: Pc16g11250 [Penicillium chrysogenum Wisconsin 54-1255] gi|211586052|emb|CAP93795.1| Pc16g11250 [Penicillium chrysogenum Wisconsin 54-1255]
  misc_feature (12)..(536): NCBI GI: 189204980 Blast Desc: cyclopentanone 1,2-monooxygenase [Pyrenophora tritici-repentis Pt-1C-BFP] gi|187985924|gb|EDU51412.1| cyclopentanone 1,2-monooxygenase [Pyrenophora tritici-repentis
  misc_feature (12)..(540): NCBI GI: 115399360 Blast Desc: [Aspergillus terreus NIH2624] gi|114192152|gb|EAU33852.1| [Aspergillus terreus NIH2624]
  misc_feature (12)..(531): NCBI GI: 169610489 Blast Desc: SNOG_08344 [Phaeosphaeria nodorum SN15] gi|160702080|gb|EAT84620.2| SNOG_08344 [Phaeosphaeria nodorum SN15]
  misc_feature (11)..(543): NCBI GI: 238488457 Blast Desc: dimethylaniline monooxygenase, [Aspergillus flavus NRRL3357] gi|220697854|gb|EED54194.1| dimethylaniline monooxygenase, [Aspergillus flavus NRRL3357]
  misc_feature (14)..(540): NCBI GI: 258576243 Blast Desc: [Uncinocarpus reesii 1704] gi|237902569|gb|EEP76970.1| [Uncinocarpus reesii 1704]
  misc_feature (15)..(540): NCBI GI: 238503620 Blast Desc: steroid monooxygenase, [Aspergillus flavus NRRL3357] gi|220690514|gb|EED46863.1| steroid monooxygenase, [Aspergillus flavus NRRL3357]
  misc_feature (15)..(540): NCBI GI: 169765091 Blast Desc: [Aspergillus oryzae RIB40] gi|83764871|dbj|BAE55015.1| protein product [Aspergillus oryzae]
  misc_feature (16)..(526): SWISSPROT Homolog: EC 1.14.13.16 Cyclopentanone monooxygenase
MTSMGSAKVDTDLQYDVIVIGGGFGGCYMLWKLRSLGFSVHLLEAGLTLGGVWYWNSYPGCRVDSEMPYYQFSIPEVWKTWSWSERFPSHEELKGYFRHVDKVLNISKDATFDTRVTAANFNSLTSRWELQTENGLKATCKWLIPATGNSSAAYVPNFEGLDAFKGAIIQGSSWPKSGIDFQGKKVGLIGAGATGVQLSQEISKQAEELTVYVRNPATALPMRQRSFSILENNTQKAIYRSLFRLALESVVGFAGDAQTQAFGDATEEQRQELWEELWARGAFHFQLGNYTDLLMNLDANRAIYKFWRDKVSARIQDPAKRAILAPEEPPYPFGTKRSPLEQNYYECLSQPHVKVVDVKAAPISSFTAGGIVTNDGKERPHDVVVLATGYDNLTGNLTRMGLCGKDGIDLKERWREGVSTYMGILANNYPNMFMIFGPQASTAFANAPLFIEMQGDIVADLLVKLRDQNVETIEPKPAAERKWKQVVQGINDATLFHLSESSWYMGANIPGKKVEQLNYLGGIVPYQAACRDAFKDWSDFDVQFAKA

SEQ ID NO: 5136 - DNA, 569 bp, Muscodor strobelii
  misc_feature: SGI EST ID NO. CUFF.13001.0
  misc_feature: Variant of the nucleotide sequence at SEQ ID NO 5134
cagacgcaggctttcggcgacgccacagaagaacaaagacaggagttgtgggaggagttgtgggcacgcggggcttttcacttccaactcggaaactacacggatttgctcatgaatcttgatgctaacagagcaatctacaagttttggagagacaaagttagcgcaagaattcaggacccagccaaaagggcaattctagctcccgaagaaccaccataccccttcgggacgaagcgaagcccactcgaacaaaattactacgagtgcctcagtcaacctcatgtaaaagtcgtcgatgtgaaggcggcaccaataagttccttcactgctggaggtattgtcactaacgacgggaaagagcgacctcacgacgtcgtcgtacttgcgactggatacgataacctgacaggaaatctcacccgaatgggtttgtgcggaaaagatggcattgaccttaaagagcgctggagagagggtgtatcgacctatatgggcatactggcaaacaattatcccaatatgttcatgatcttcgggccacaagcatctactgctttcgccaatgc

SEQ ID NO: 5137 - DNA, 1278 bp, Muscodor strobelii
  misc_feature: SGI cDNA ID NO. 561422
  misc_feature: Elevated expression when VOC is produced
  misc_feature: Encodes the peptide sequence at SEQ ID NO 5138
atgcgctcaactctatcttcattgctggttctcggcgtcttaccttcagcgcttggtgccgcgctagaacataatgctcccggagagaaacgggcagtaacggcgacaacagcagcggcctatgcttcatcatctgatggggcgtataagctgagctcctgggccgctccggttcaaggagctggttctccgggcagctcatctacttggaaaatcaccgtaaacgatgggtctagcggccataagcaaacagttaagggcttcggtgcggctgtcactgatgcgaccgtagctgtgtttaacggtctgtcttcggcgtcgcagacaacactactcaaccagttgcttacctcatccggcgccggtttctcactctttcgccataccattgcgtcttctgacctgtctgccgaccctgcttacacttacgacgacaatggcggcgccgtagataccactttacagtccttcaacttggggaccgtggaactgccatggcgaaatgccattaccattcagaatgagccgctgaacagtagagccggcttcccgacttgctacatctatgctgatgaggcaggcgccttcactcaaaacaacttagggcctgctctcaagtccgctggacttaatacacatgtctgggcttatgatcacaataccgatcaacctggttatcccgagaccgtcctatcttatggtacccagtatatcaacgcagtggcgtggcattgctatgccaatcctctcaaatggagtgtgctgacagacttccacaacgctcatcctgtcatttcacagtacatgactgaatgctggactagcccgcagacaggttgggactgggcagcgaatttcaccatgggaccactgcagaattgggcagaagggtcgattgcttggactcttgggtccgatacttcgtacggcccacacattaataatggcgatgcctgtggtacttgccgcggtcttttcacggtcaacacttcggcgaagacatacagcttccaaatcgattactacatgatggcccagttcagtaaattcatccctcgtggcgcgatcatcctgtctagtacgggaagtttcacatactctgacaacactggtctcgagtctgtggcttcgttgaatcccgacggttccaggactatcgtgtatctgaacaagttcgccaatgatgtttacgttaccactacgacttcatctggccaaatttggagcggccttgtccacgctaagtcggtgacgacgtgggtactgcccccagtttaa

SEQ ID NO: 5138 - protein, 425 aa, Muscodor strobelii
  misc_feature: SGI Peptide ID NO. 561422
  misc_feature (14)..(422): Pfam Id: PF02055 Pfam Desc: O-Glycosyl hydrolase family 30
  misc_feature (83)..(159): Pfam Id: PF02055 Pfam Desc: O-Glycosyl hydrolase family 30
  misc_feature (341)..(422): Pfam Id: PF02055 Pfam Desc: O-Glycosyl hydrolase family 30
  misc_feature (168)..(423): NCBI GI: 85085283 Blast Desc: endo-1,6-beta-D-glucanase [Neurospora crassa OR74A] gi|59799885|sp|Q7M4T0.2|NEG1_NEUCR RecName: Full=Endo-1,6-beta-D-glucanase; AltName: Full=Beta-1,6-glucanase
  misc_feature (168)..(423): NCBI GI: 20373090 Blast Desc: beta-1,6-glucanase Neg1 [Neurospora crassa]
  misc_feature (168)..(425): NCBI GI: 242814989 Blast Desc: beta-1,6-glucanase Neg1, [Talaromyces stipitatus ATCC 10500] gi|218714820|gb|EED14243.1| beta-1,6-glucanase Neg1, [Talaromyces stipitatus ATCC 10500]
  misc_feature (168)..(425): NCBI GI: 222090448 Blast Desc: beta-1,6-glucanase BG16.3 [Hypocrea lixii]
  misc_feature (168)..(425): NCBI GI: 74620375 Blast Desc: GUN16_TRIHA RecName: Full=Endo-1,6-beta-D-glucanase BGN16.3; AltName: Full=Beta-1,6-glucanase BGN16.3; AltName: Full=Glucan endo-1,6-beta-glucosidase BGN16.3; Flags: Precursor
  misc_feature (168)..(423): NCBI GI: 255949034 Blast Desc: Pc22g13580 [Penicillium chrysogenum Wisconsin 54-1255] gi|211592301|emb|CAP98646.1| Pc22g13580 [Penicillium chrysogenum Wisconsin 54-1255]
  misc_feature (168)..(423): NCBI GI: 119485819 Blast Desc: beta-1,6-glucanase, [Neosartorya fischeri NRRL 181] gi|119410408|gb|EAW20355.1| beta-1,6-glucanase, [Neosartorya fischeri NRRL 181]
  misc_feature (168)..(425): NCBI GI: 212545228 Blast Desc: beta-1,6-glucanase Neg1, [Penicillium marneffei ATCC 18224] gi|210065737|gb|EEA19831.1| beta-1,6-glucanase Neg1, [Penicillium marneffei ATCC 18224]
  misc_feature (168)..(423): NCBI GI: 121720170 Blast Desc: beta-1,6-glucanase, [Aspergillus clavatus NRRL 1] gi|119404995|gb|EAW15357.1| beta-1,6-glucanase, [Aspergillus clavatus NRRL 1]
  misc_feature (46)..(423): NCBI GI: 18076082 Blast Desc: P1 protein [Hypocrea lixii]
  misc_feature (168)..(423): SWISSPROT Homolog: EC 3.2.1.75 Glucan endo-1,6-beta-glucosidase
  misc_feature: Useful for introducing or modulating the production of volatile compounds
MRSTLSSLLVLGVLPSALGAALEHNAPGEKRAVTATTAAAYASSSDGAYKLSSWAAPVQGAGSPGSSSTWKITVNDGSSGHKQTVKGFGAAVTDATVAVFNGLSSASQTTLLNQLLTSSGAGFSLFRHTIASSDLSADPAYTYDDNGGAVDTTLQSFNLGTVELPWRNAITIQNEPLNSRAGFPTCYIYADEAGAFTQNNLGPALKSAGLNTHVWAYDHNTDQPGYPETVLSYGTQYINAVAWHCYANPLKWSVLTDFHNAHPVISQYMTECWTSPQTGWDWAANFTMGPLQNWAEGSIAWTLGSDTSYGPHINNGDACGTCRGLFTVNTSAKTYSFQIDYYMMAQFSKFIPRGAIILSSTGSFTYSDNTGLESVASLNPDGSRTIVYLNKFANDVYVTTTTSSGQIWSGLVHAKSVTTWVLPPV

SEQ ID NO: 5139 - DNA, 5184 bp, Muscodor strobelii
  misc_feature: SGI EST ID NO. CUFF.13021.0
  misc_feature: Variant of the nucleotide sequence at SEQ ID NO 5137
cgacaatcttgctacgatacgcgaatcccaggtatttatttgatcacgatgatgagacatatatccaacgtcaatccatgttccctcgttagtataaacgaagaaatcttacggaagacgtccacattgacgcaggcctagaaaccggatcatatgatgcataacaacctaaggtcaactagttgcattaacctggtctccaacgagaaggaccgaaagaccctgagtagtatggccgccaacatcaccaattcactttcagagacttcccgagttacattggacgcttggatacaaggatgacgccagcaatttcaaactatttggatatggcactctctttgaatacacgttattgatgaatctcccatcagtcgtccaagactaaacaatatataatgacagcgcttgcccgaaagaaagtggacagtgtttcacactgcaccatcacacttcactgttccgcctcaccaatttcgagatgcgctcaactctatcttcattgctggttctcggcgtcttaccttcagcgcttggtgccgcgctagaacataatgctcccggagagaaacgggcagtaacggcgacaacagcagcggcctatgcttcatcatctgatggggcgtataagctgagctcctgggccgctccggttcaaggagctggttctccgggcagctcatctacttggaaaatcaccgtaaacgatgggtctagcggccataagcaaacagttaagggcttcggtgcggctgtcactgatgcgaccgtagctgtgtttaacggtctgtcttcggcgtcgcagacaacactactcaaccagttgcttacctcatccggcgccggtttctcactctttcgccataccattgcgtcttctgacctgtctgccgaccctgcttacacttacgacgacaatggcggcgccgtagataccactttacagtccttcaacttggggaccgtggaactgccatggcgaagttgatggcgaagatgaagtctgtgaactctgcgatttcttttgtggggtctcaatggagtccgccgggatggatgaagaaaaacggtgtgattactggcacgactaccaacaacaacatcaatcacagctattactctcaatgggcaacatactttgtgaagtatctgcaagcctattccgcgctcggcgccaacatagatgccattaccattcagaatgagccgctgaacagtagagccggcttcccgacttgctacatctatgctgatgaggcaggcgccttcactcaaaacaacttagggcctgctctcaagtccgctggacttaatacacatgtctgggcttatgatcacaataccgatcaacctggttatcccgagaccgtcctatcttatggtacccagtatatcaacgcagtggcgtggcattgctatgccaatcctctcaaatggagtgtgctgacagacttccacaacgctcatcctgtcatttcacagtacatgactgaatgctggactagcccgcagacaggttgggactgggcagcgaatttcaccatgggaccactgcagaattgggcagaagggtcgattgcttggactcttgggtccgatacttcgtacggcccacacattaataatggcgatgcctgtggtacttgccgcggtcttttcacggtcaacacttcggcgaagacatacagcttccaaatcgattactacatgatggcccagttcagtaaattcatccctcgtggcgcgatcatcctgtctagtacgggaagtttcacatactctgacaacactggtctcgagtctgtggcttcgttgaatcccgacggttccaggactatcgtgtatctgaacaagttcgccaatgatgtttacgttaccactacgacttcatctggccaaatttggagcggccttgtccacgctaagtcggtgacgacgtgggtactgcccccagtttaaggatatcttgtctcacgagactgtgccattctggtttctgtctggtgctcggcatattgcgtaaacatcagtgccaagtagagtcggtggaagaacagggctaatgtttctgcttcttatctttgaacgcgcttggaaaatgagttgggccaagtgagctgttgcattgcgtataatctcacctgagatgcacatcaatacaatgtcaagtactctcgaagagtctcgtgactagaattgggatgcgctgatatgaagcgtaacaaaacaaatgctagtatacgtaaagactcctccatcctgtgcggtcatttgtatcctatgtccagtgtcttgtggttgactttagtaaataaagtagcggaaattctctactgcgtatggaaatcgccatttcgtgactgaaatgtgcaacactatgctagaggttgggatgaagctctgatgtgcgtgaattccatgttaagagcaattgagttggtgatttgtatcaggttgacaataactttgatgtggagcgcggaattgcggaatcggtgacatggacaaatgactccgtcttggtgatgctgaagaaagtttggagatgtacccctgtccactctactgaaaagaaactcattgttgtgcttataatccaatcattcacacacagccaaattgctgttctcgtgaactacgcttcttcagacttatcggccgaaacaaaacgacctggactgagaccatttcgacccagcatacgcgcttcgcaatatggcggatacgtcatctgtagtaccagaatccctccgcctaggatggataggcttggggagcatgggcgcggcaatggcgaagaatgtccatggatatttgatagccaagtccggtgtcccactccgcttcttcaaccgcacggcatcacggggcgatactcttgaagcactgggcggtaagcgttgtggatctgtagcagcggtggcgactgagagcgacgtgattttcatttcggccagcgacgacgcagccgtcgagtcaattataagccaaattctagcgagcggttcaaatctagcaggcaagattgttgttgacacaacgacaattcatccaaatacgacaaaagctatctctgaaaagctccaggcgcagggtgcccagttcgctgctactccagtgttcggtgccactcccgttgcagagcagggtaaactgcttgttgcatatgcgggtcctagcagtgcacatgatgtcgttgcaccttttctaaagggtgtcattgcgcgggaggttctgagagtcggtgaagaagcagagaaagccacattgctcaaaacaacaggtaacttcatgatggcaggccttatggaaatcattgcagaggcccatgtcttcgcggagaaaacagggctggagtccgatgtgctccagaaactaatggagcttgtatttggcaccgtcgcgcattccgactctatccggatgacgaccggcgtgtacatccctgggaaaggagagtcgccatggtcagatttgaatctggcgctgaaagatgttgggcatggcgttgacaccgcgagacaagctggcgtcagtctcaaggccgcgaatactgcactagagcaccttaagagggcaaagatgtactcggaagaaaatgggcaacggcctcttgactcctcgtctttgtatggcatcgtgcgacaacattcatgtttggatttcagaacagattatgtgaagaaacgagatgagaagacctcttaaggagtgtcaccttatcttgcataagctgaccgctatcaataatacccgctgtaataatctacaccacgtctcagagatgtgcatctagctcggttctgaattccgagaagtctgtttatttctatcgtaagcggtagaatgccattgttcgtttcgattaagttatgacaaccggagattatgtgcgttctcggttccgatttgacgtcacgcggtagagcattcaactccatatccgtattcgggtatcatgcatgtcagacaatcaccccagtaccgatcttcgaacattcctcgataattgctcttctttcacttgcaaactttcgagttggaaatttcgacatagatcatcatctgcactgacgcaaaacccttcttgtttgcgatggatgacggcaagagctacaacaaggcgatgatcgcctcctactctgtgagaacagcagcggagagctcagcatacatgctgcacctactgaaaccagattcgcatgtccttgacgttggctcgggcccaggaacgatctccctagatcttgcaacacacgtaccacaaggcaagctgacaggcgttgatgcaaacggaatggctgttgagtccgcaatcgagctcagcaagcagcgcggcttgacgaatgtgtcctttgttacgggcgatgctcttgagctaccctttgacgacaacactttcgacatcgtccactgtcatcaagttcttggtcatctaacgggtcaagaaagagaacctggccctgtacgcggattgaaggaaatgcgacgagtgtgcaagccaggcggtttcgtgtgcgcaagagaagcagagtggtcgagttttgtaatctatccgaatactccagggacggtcgagtctctgaatctcctcgaaaaattgcagaaatatgggggtaagaccgtagccggaggccgaggaaaagagttcgcccgaagagcaggtttcacatctagcgacatcactgtgtcggctgctactgtcacttattcaacaactggtgagctggaatggtggggtcaaacgatggctagtagacttgaggcttcgaattcaagggccaagggcatcgagctgggattcataacggaagaagaaggagcgaggatgcctcaagcgtggagggactgggcaaggaatgaggacgccttctcttgtcgctttgacggacaaatcatatgcaagaaataggacgggatgcggtaacctgattcttgagataccagccaagccatgatgattgagcctaacagaagcccaagtcgagtgtcctattgagttataagttttctgtgtgtcactgtgcaacacaacactgcaaacgtgactctcaacatcgagttgacgcatccacgttttcgccacgttcaattgcattagtgtcggggtaaggcaaaaatcgatacgggtaaacagcaacacataagaagggtatcaaccagtatgaatgcagtagacgaata

SEQ ID NO: 5140 - DNA, 993 bp, Muscodor strobelii
  misc_feature: SGI cDNA ID NO. 561423
  misc_feature: Encodes the peptide sequence at SEQ ID NO 5141
atggcggatacgtcatctgtagtaccagaatccctccgcctaggatggataggcttggggagcatgggcgcggcaatggcgaagaatgtccatggatatttgatagccaagtccggtgtcccactccgcttcttcaaccgcacggcatcacggggcgatactcttgaagcactgggcggtaagcgttgtggatctgtagcagcggtggcgactgagagcgacgtgattttcatttcggccagcgacgacgcagccgtcgagtcaattataagccaaattctagcgagcggttcaaatctagcaggcaagattgttgttgacacaacgacaattcatccaaatacgacaaaagctatctctgaaaagctccaggcgcagggtgcccagttcgctgctactccagtgttcggtgccactcccgttgcagagcagggtaaactgcttgttgcatatgcgggtcctagcagtgcacatgatgtcgttgcaccttttctaaagggtgtcattgcgcgggaggttctgagagtcggtgaagaagcagagaaagccacattgctcaaaacaacaggtaacttcatgatggcaggccttatggaaatcattgcagaggcccatgtcttcgcggagaaaacagggctggagtccgatgtgctccagaaactaatggagcttgtatttggcaccgtcgcgcattccgactctatccggatgacgaccggcgtgtacatccctgggaaaggagagtcgccatggtcagatttgaatctggcgctgaaagatgttgggcatggcgttgacaccgcgagacaagctggcgtcagtctcaaggccgcgaatactgcactagagcaccttaagagggcaaagatgtactcggaagaaaatgggcaacggcctcttgactcctcgtctttgtatggcatcgtgcgacaacattcatgtttggatttcagaacagattatgtgaagaaacgagatgagaagacctcttaa

SEQ ID NO: 5141 - protein, 330 aa, Muscodor strobelii
  misc_feature: SGI Peptide ID NO. 561423
  misc_feature (11)..(178): Pfam Id: PF03446 Pfam Desc: NAD binding domain of 6-phosphogluconate dehydrogenase
  misc_feature (22)..(328): NCBI GI: 255936379 Blast Desc: Pc13g07890 [Penicillium chrysogenum Wisconsin 54-1255] gi|211583836|emb|CAP91858.1| Pc13g07890 [Penicillium chrysogenum Wisconsin 54-1255]
  misc_feature (17)..(326): NCBI GI: 261357711 Blast Desc: NAD binding domain of 6-phosphogluconate dehydrogenase [Verticillium albo-atrum VaMs.102]
  misc_feature (8)..(326): NCBI GI: 189189762 Blast Desc: NAD binding domain of 6-phosphogluconate dehydrogenase [Pyrenophora tritici-repentis Pt-1C-BFP] gi|187972826|gb|EDU40325.1| NAD binding domain of dehydrogenase
  misc_feature (13)..(322): NCBI GI: 256724402 Blast Desc: NECHADRAFT_88181 [Nectria haematococca mpVI 77-13-4]
  misc_feature (11)..(328): NCBI GI: 46127009 Blast Desc: FG07882.1 [Gibberella zeae PH-1]
  misc_feature (13)..(326): NCBI GI: 145246804 Blast Desc: An12g05870 [Aspergillus niger] gi|134080373|emb|CAK46294.1| protein product [Aspergillus niger]
  misc_feature (10)..(328): NCBI GI: 169607653 Blast Desc: SNOG_06885 [Phaeosphaeria nodorum SN15] gi|111064416|gb|EAT85536.1| SNOG_06885 [Phaeosphaeria nodorum SN15]
  misc_feature (13)..(324): NCBI GI: 121701317 Blast Desc: NAD binding domain of 6-phosphogluconate dehydrogenase [Aspergillus clavatus NRRL 1] gi|119397066|gb|EAW07497.1| NAD binding domain of 6-phosphogluconate dehydrogenase [Aspergillus
  misc_feature (13)..(328): NCBI GI: 145240215 Blast Desc: An08g06390 [Aspergillus niger] gi|134077268|emb|CAK45609.1| protein product [Aspergillus niger]
  misc_feature (13)..(324): NCBI GI: 238489185 Blast Desc: 6-phosphogluconate dehydrogenase family protein [Aspergillus flavus NRRL3357] gi|220698218|gb|EED54558.1| 6-phosphogluconate dehydrogenase family protein [Aspergillus
  misc_feature (13)..(268): SWISSPROT Homolog: EC 1.1.1.31 3-hydroxyisobutyrate dehydrogenase
MADTSSVVPESLRLGWIGLGSMGAAMAKNVHGYLIAKSGVPLRFFNRTASRGDTLEALGGKRCGSVAAVATESDVIFISASDDAAVESIISQILASGSNLAGKIVVDTTTIHPNTTKAISEKLQAQGAQFAATPVFGATPVAEQGKLLVAYAGPSSAHDVVAPFLKGVIAREVLRVGEEAEKATLLKTTGNFMMAGLMEIIAEAHVFAEKTGLESDVLQKLMELVFGTVAHSDSIRMTTGVYIPGKGESPWSDLNLALKDVGHGVDTARQAGVSLKAANTALEHLKRAKMYSEENGQRPLDSSSLYGIVRQHSCLDFRTDYVKKRDEKTS

SEQ ID NO: 5142 - DNA, 5184 bp, Muscodor strobelii; identical to SEQ ID NO: 5139
  misc_feature: SGI EST ID NO. CUFF.13021.0
  misc_feature: Variant of the nucleotide sequence at SEQ ID NO 5140

SEQ ID NO: 5143 - DNA, 816 bp, Muscodor strobelii
  misc_feature: SGI cDNA ID NO. 561424
  misc_feature: Encodes the peptide sequence at SEQ ID NO 5144
atggatgacggcaagagctacaacaaggcgatgatcgcctcctactctgtgagaacagcagcggagagctcagcatacatgctgcacctactgaaaccagattcgcatgtccttgacgttggctcgggcccaggaacgatctccctagatcttgcaacacacgtaccacaaggcaagctgacaggcgttgatgcaaacggaatggctgttgagtccgcaatcgagctcagcaagcagcgcggcttgacgaatgtgtcctttgttacgggcgatgctcttgagctaccctttgacgacaacactttcgacatcgtccactgtcatcaagttcttggtcatctaacgggtcaagaaagagaacctggccctgtacgcggattgaaggaaatgcgacgagtgtgcaagccaggcggtttcgtgtgcgcaagagaagcagagtggtcgagttttgtaatctatccgaatactccagggacggtcgagtctctgaatctcctcgaaaaattgcagaaatatgggggtaagaccgtagccggaggccgaggaaaagagttcgcccgaagagcaggtttcacatctagcgacatcactgtgtcggctgctactgtcacttattcaacaactggtgagctggaatggtggggtcaaacgatggctagtagacttgaggcttcgaattcaagggccaagggcatcgagctgggattcataacggaagaagaaggagcgaggatgcctcaagcgtggagggactgggcaaggaatgaggacgccttctcttgtcgctttgacggacaaatcatatgcaagaaatag

SEQ ID NO: 5144 - protein, 271 aa, Muscodor strobelii
  misc_feature: SGI Peptide ID NO. 561424
  misc_feature (38)..(142): Pfam Id: PF08241 Pfam Desc: Methyltransferase domain
  misc_feature (38)..(140): Pfam Id: PF08242 Pfam Desc: Methyltransferase domain
  misc_feature (14)..(143): Pfam Id: PF05175 Pfam Desc: Methyltransferase small domain
  misc_feature (1)..(211): Pfam Id: PF01209 Pfam Desc: ubiE/COQ5 methyltransferase family
  misc_feature (29)..(73): Pfam Id: PF05175 Pfam Desc: Methyltransferase small domain
  misc_feature (37)..(105): Pfam Id: PF01209 Pfam Desc: ubiE/COQ5 methyltransferase family
  misc_feature (7)..(271): NCBI GI: 29828422 Blast Desc: UbiE family methyltransferase [Streptomyces avermitilis MA-4680] gi|29605525|dbj|BAC69591.1| methyltransferase-UbiE family [Streptomyces avermitilis MA-4680]
  misc_feature (7)..(271): NCBI GI: 254405079 Blast Desc: SAM-dependent methyltransferase [Streptomyces sviceus ATCC 29083] gi|197714533|gb|EDY58567.1| SAM-dependent methyltransferase [Streptomyces sviceus ATCC 29083]
  misc_feature (7)..(270): NCBI GI: 256775430 Blast Desc: UbiE family methyltransferase [Streptomyces hygroscopicus ATCC 53653]
  misc_feature (7)..(271): NCBI GI: 108743442 Blast Desc: methyltransferase-UbiE family [Streptomyces kanamyceticus]
  misc_feature (7)..(271): NCBI GI: 256812526 Blast Desc: UbiE family methyltransferase [Streptomyces griseoflavus Tu4000]
  misc_feature (7)..(271): NCBI GI: 70986829 Blast Desc: ubiE/COQ5 methyltransferase [Aspergillus fumigatus Af293] gi|66846532|gb|EAL86864.1| ubiE/COQ5 methyltransferase, [Aspergillus fumigatus Af293]
  misc_feature (7)..(271): NCBI GI: 119483056 Blast Desc: ubiE/COQ5 methyltransferase, [Neosartorya fischeri NRRL 181] gi|119409711|gb|EAW19659.1| ubiE/COQ5 methyltransferase, [Neosartorya fischeri NRRL 181]
  misc_feature (7)..(270): NCBI GI: 282864607 Blast Desc: Methyltransferase type 11 [Streptomyces sp. ACTE] gi|282560546|gb|EFB66093.1| Methyltransferase type 11 [Streptomyces sp. ACTE]
  misc_feature (7)..(271): NCBI GI: 159123330 Blast Desc: ubiE/COQ5 methyltransferase, [Aspergillus fumigatus A1163]
  misc_feature (7)..(271): NCBI GI: 239927813 Blast Desc: UbiE family methyltransferase [Streptomyces ghanaensis ATCC 14672]
  misc_feature (16)..(147): SWISSPROT Homolog: EC 2.1.1.41 Sterol 24-C-methyltransferase
MDDGKSYNKAMIASYSVRTAAESSAYMLHLLKPDSHVLDVGSGPGTISLDLATHVPQGKLTGVDANGMAVESAIELSKQRGLTNVSFVTGDALELPFDDNTFDIVHCHQVLGHLTGQEREPGPVRGLKEMRRVCKPGGFVCAREAEWSSFVIYPNTPGTVESLNLLEKLQKYGGKTVAGGRGKEFARRAGFTSSDITVSAATVTYSTTGELEWWGQTMASRLEASNSRAKGIELGFITEEEGARMPQAWRDWARNEDAFSCRFDGQIICKK

SEQ ID NO: 5145 - DNA, 5184 bp, Muscodor strobelii; identical to SEQ ID NO: 5139
  misc_feature: SGI EST ID NO. CUFF.13021.0
  misc_feature: Variant of the nucleotide sequence at SEQ ID NO 5143

SEQ ID NO: 5146 - DNA, 1185 bp, Muscodor strobelii
  misc_feature: SGI cDNA ID NO. 561425
  misc_feature: Encodes the peptide sequence at SEQ ID NO 5147
atggaagaaccaaaatcgatcggagacgtaacgggaagcaagtttccaccgatgaagctgcccgtcggtgtgacagaggattatatcaactgcgaagagtcctgcggcctgaactggcatgtactgaaagctggcacaccaggaaagccgttggtactgttttgtcacggttatccagaactagctttctcatggcgtaacatcattcgaccaatcgcagaagccggctcctattgcattgcaatggatcagcgtggttatggccgtaccacgcgcggttcccttcaattacccaccgataacgagtaccacctcagtaatctcatacgcgatatggtttgcttggtatacaagctggggtatacagaggtcttcagcatcatcggtcatgatttcggtgccgtgacctctgccatggcagctctgatgcgtccggacatgttccgatcgactgtgcagctgagtcacccacatcatccatcggcaacaccaaatttctttgacaattcgtcggacccgggaactaagaaaggcaaaatggatatcaaagtcgagctcgagaagctggacccgccgcgcaaacattataagctatataatgccacaccggaagcagagcaagaatgggacaatccgcctcagggcctcgaaaggtttttgaggggttattttcacctcaaatcggctgactgggccaagaacgatcctcaccccctgaaaagtgccaacgctgaggcgctagccgtaatgcccgagtattacatcatgcggaaagaagactcgatgccagctgctgtggagcgtaacatggagcacgaagactatacaaagagcgagaaatggctcacaagagaggctttggaagtatattgcatagaatggaaacgcactggattcggtagcgcgttgaaatggtacggctctaattcgccttcacagtcaatgcgtgatatgctcctttttgcaggcaagaaaattgaggttccctgcaccttcatcagtggcaaacaagactggggaaactaccagagtccgggagacatcgaaggatacgaagacacggcaagggttaaggagggctgttttagaggaacgaagttgattccggatgccgggcactgggtacagcaggaacaaccggaggctgttattaccgcactgcttgagttcttcaagacattgtga

SEQ ID NO: 5147 - protein, 394 aa, Muscodor strobelii
  misc_feature: SGI Peptide ID NO. 561425
  misc_feature (77)..(389): Pfam Id: PF00561 Pfam Desc: alpha/beta hydrolase fold
  misc_feature (79)..(146): Pfam Id: PF00561 Pfam Desc: alpha/beta hydrolase fold
  misc_feature (10)..(394): NCBI GI: 171685432 Blast Desc: protein product [Podospora anserina] gi|170942677|emb|CAP68329.1| protein product [Podospora anserina]
  misc_feature (15)..(394): NCBI GI: 169613196 Blast Desc: SNOG_09729 [Phaeosphaeria nodorum SN15] gi|111061874|gb|EAT82994.1| SNOG_09729 [Phaeosphaeria nodorum SN15]
  misc_feature (11)..(391): NCBI GI: 189210996 Blast Desc: epoxide hydrolase 2 [Pyrenophora tritici-repentis Pt-1C-BFP] gi|187977922|gb|EDU44548.1| epoxide hydrolase 2 [Pyrenophora tritici-repentis Pt-1C-BFP]
  misc_feature (23)..(394): NCBI GI: 261202124 Blast Desc: epoxide hydrolase [Ajellomyces dermatitidis SLH14081] gi|239590373|gb|EEQ72954.1| epoxide hydrolase [Ajellomyces dermatitidis SLH14081]
  misc_feature (23)..(394): NCBI GI: 239612084 Blast Desc: epoxide hydrolase [Ajellomyces dermatitidis ER-3]
  misc_feature (20)..(394): NCBI GI: 163793873 Blast Desc: epoxide hydrolase [alpha proteobacterium BAL199] gi|159180984|gb|EDP65501.1| epoxide hydrolase [alpha proteobacterium BAL199]
  misc_feature (23)..(394): NCBI GI: 225554510 Blast Desc: epoxide hydrolase [Ajellomyces capsulatus G186AR]
  misc_feature (17)..(394): NCBI GI: 255952811 Blast Desc: Pc21g00850 [Penicillium chrysogenum Wisconsin 54-1255] gi|211588869|emb|CAP94982.1| Pc21g00850 [Penicillium chrysogenum Wisconsin 54-1255]
  misc_feature (18)..(394): NCBI GI: 70998048 Blast Desc: epoxide hydrolase [Aspergillus fumigatus Af293] gi|66851392|gb|EAL91718.1| epoxide hydrolase, [Aspergillus fumigatus Af293] gi|159126507|gb|EDP51623.1| epoxide hydrolase,
  misc_feature (13)..(391): NCBI GI: 27383005 Blast Desc: epoxide hydrolase [Bradyrhizobium japonicum USDA 110] gi|27356178|dbj|BAC53159.1| blr7894 [Bradyrhizobium japonicum USDA 110]
  misc_feature (5)..(393): SWISSPROT Homolog: EC 3.3.2.10 Soluble epoxide hydrolase
MEEPKSIGDVTGSKFPPMKLPVGVTEDYINCEESCGLNWHVLKAGTPGKPLVLFCHGYPELAFSWRNIIRPIAEAGSYCIAMDQRGYGRTTRGSLQLPTDNEYHLSNLIRDMVCLVYKLGYTEVFSIIGHDFGAVTSAMAALMRPDMFRSTVQLSHPHHPSATPNFFDNSSDPGTKKGKMDIKVELEKLDPPRKHYKLYNATPEAEQEWDNPPQGLERFLRGYFHLKSADWAKNDPHPLKSANAEALAVMPEYYIMRKEDSMPAAVERNMEHEDYTKSEKWLTREALEVYCIEWKRTGFGSALKWYGSNSPSQSMRDMLLFAGKKIEVPCTFISGKQDWGNYQSPGDIEGYEDTARVKEGCFRGTKLIPDAGHWVQQEQPEAVITALLEFFKTL

SEQ ID NO: 5148 - DNA, 1545 bp, Muscodor strobelii
  misc_feature: SGI EST ID NO. CUFF.13112.1
  misc_feature: Variant of the nucleotide sequence at SEQ ID NO 5146
gaagatcataaagatggaagaaccaaaatcgatcggagacgtaacgggaagcaagtttccaccgatgaagctgcccgtcggtgtgacagaggattatatcaactgcgaagagtcctgcggcctgaactggcatgtactgaaagctggcacaccaggaaagccgttggtactgttttgtcacggttatccagaactagctttctcatggcgtaacatcattcgaccaatcgcagaagccggctcctattgcattgcaatggatcagcgtggttatggccgtaccacgcgcggttcccttcaattacccaccgataacgagtaccacctcagtaatctcatacgcgatatggtttgcttggtatacaagctggggtatacagaggtcttcagcatcatcggtcatgatttcggtgccgtgacctctgccatggcagctctgatgcgtccggacatgttccgatcgactgtgcagctgagtcacccacatcatccatcggcaacaccaaatttctttgacaattcgtcggacccgggaactaagaaaggcaaaatggatatcaaagtcgagctcgagaagctggacccgccgcgcaaacattataagctatataatgccacaccggaagcagagcaagaatgggacaatccgcctcagggcctcgaaaggtttttgaggggttattttcacctcaaatcggctgactgggccaagaacgatcctcaccccctgaaaagtgccaacgctgaggcgctagccgtaatgcccgagtattacatcatgcggaaagaagactcgatgccagctgctgtggagcgtaacatggagcacgaagactatacaaagagcgagaaatggctcacaagagaggctttggaagtatattgcatagaatggaaacgcactggattcggtagcgcgttgaaatggtacggctctaattcgccttcacagtcaatgcgtgatatgctcctttttgcaggcaagaaaattgaggttccctgcaccttcatcagtggcaaacaagactggggaaactaccagagtccgggagacatcgaaggatacgaagacacggcaagggttaaggagggctgttttagaggaacgaagttgattccggatgccgggcactgggtacagcaggaacaaccggaggctgttattaccgcactgcttgagttcttcaagacattgtgattcaatctgagtcgcagacctcaagtaggctgacgatcaggagaagaaagacgtgaaggcacttggatcaaggccgtcaagcatctcaaacatgcatagtcgcctattctctcaatacaacaatacaacattcgaaccaggatgtaggatcctgggttagataggccaatcaattcgtttgcctgcaaaatgaatgagaggagcccagtcatcatgggtgagatgagcctaatcgataggtagaatcacagggcgaaagaatcagaaggaacgcctctaactaatcgcgttgtacctctgcacctgcctcttcgctgccgcccaccttcatatatcctaataatgag

SEQ ID NO: 5149 - DNA, 987 bp, Muscodor strobelii
  misc_feature: SGI cDNA ID NO. 561426
  misc_feature: Encodes the peptide sequence at SEQ ID NO 5150
atggactcatcgaccttcggcggcctaggacatgttgcgagcacagttcctgcaccgaatcagtttagtattccaaagattctgttctctttcgaggtgctacacattgtcggcctgaatgttgccaaaattagcgctcttgtcttctatctgaagctattcaacaatgaggacactgccagactgacaaaaagatgcattattgcgttttgtatcggtacggcgggtctgctcatctaccaatttaccttctgccatccgcttgcagatatgtggaaatgggacggtcttgaaacatgtggcgatcgcaaaccattatatgttgtagtctgtgtctggtctattgtcacggacttactactcttaatcgtccctatacccgccatttggaaattgaaaatggacagaagaacaagagtcaaactctcgtcattgtttggagtaggtcttagcgtaacggcagtgtccattatccgtctgggctatattgctacaattgactaccacgacgacttctcgtactacagcgtatctgcgaccttcttagcagatctcgaaccggccctcaccattctgtgcgttagcgccccgatgatctacacacttttcgccaggtggttcaaaaagagcggcagagagatgtctggccctcatgtccatcctcgatcgtatacgtatggatcggctttcggacgtcgcatcgacccaaataagcgtaatttcaaccagatcgcacccactgagccggacccattcgaacttgacaatgtgtacggcaacagtcgtgaaatcatgatctctacaaccgagaagagatctcttggaggccgcttgaaggatcagcttatctcgaagagtcttgacgatgttgaatctagcagcgagtcagaacaaggactggtttataatatgccgaaaggcagccctccacaaaacggcgggatcgtagtctcgacagactttactgtttcagtttcgcgaaactga

SEQ ID NO: 5150 - protein, 328 aa, Muscodor strobelii
  misc_feature: SGI Peptide ID NO. 561426
  misc_feature (20)..(328): NCBI GI: 164422724 Blast Desc: NCU09796 [Neurospora crassa OR74A] gi|157069792|gb|EAA30958.2| conserved [Neurospora crassa OR74A]
  misc_feature (19)..(324): NCBI GI: 116200664 Blast Desc: CHGG_10877 [Chaetomium globosum CBS 148.51] gi|88175591|gb|EAQ83059.1| CHGG_10877 [Chaetomium globosum CBS 148.51]
  misc_feature (18)..(325): NCBI GI: 171680801 Blast Desc: protein product [Podospora anserina] gi|27764293|emb|CAD60573.1| protein product [Podospora anserina] gi|170940028|emb|CAP65254.1| protein product [Podospora anserina]
  misc_feature (8)..(248): NCBI GI: 145231391 Blast Desc: An02g00390 [Aspergillus niger] gi|134056079|emb|CAK96254.1| protein product [Aspergillus niger]
  misc_feature (7)..(240): NCBI GI: 212542453 Blast Desc: conserved [Penicillium marneffei ATCC 18224] gi|210066288|gb|EEA20381.1| conserved [Penicillium marneffei ATCC 18224]
  misc_feature (8)..(281): NCBI GI: 70981734 Blast Desc: integral membrane protein [Aspergillus fumigatus Af293] gi|66844018|gb|EAL84358.1| integral membrane protein [Aspergillus fumigatus Af293] gi|159121997|gb|EDP47120.1| protein
  misc_feature (18)..(237): NCBI GI: 256728178 Blast Desc: NECHADRAFT_54189 [Nectria haematococca mpVI 77-13-4]
  misc_feature (26)..(250): NCBI GI: 171691358 Blast Desc: protein product [Podospora anserina] gi|170945627|emb|CAP71740.1| protein product [Podospora anserina]
  misc_feature (8)..(199): NCBI GI: 255948372 Blast Desc: Pc22g09410 [Penicillium chrysogenum Wisconsin 54-1255] gi|211591970|emb|CAP98229.1| Pc22g09410 [Penicillium chrysogenum Wisconsin 54-1255]
  misc_feature (8)..(295): NCBI GI: 255940922 Blast Desc: Pc16g09120 [Penicillium chrysogenum Wisconsin 54-1255] gi|211585853|emb|CAP93582.1| Pc16g09120 [Penicillium chrysogenum Wisconsin 54-1255]
MDSSTFGGLGHVASTVPAPNQFSIPKILFSFEVLHIVGLNVAKISALVFYLKLFNNEDTARLTKRCIIAFCIGTAGLLIYQFTFCHPLADMWKWDGLETCGDRKPLYVVVCVWSIVTDLLLLIVPIPAIWKLKMDRRTRVKLSSLFGVGLSVTAVSIIRLGYIATIDYHDDFSYYSVSATFLADLEPALTILCVSAPMIYTLFARWFKKSGREMSGPHVHPRSYTYGSAFGRRIDPNKRNFNQIAPTEPDPFELDNVYGNSREIMISTTEKRSLGGRLKDQLISKSLDDVESSSESEQGLVYNMPKGSPPQNGGIVVSTDFTVSVSRN

SEQ ID NO: 5151 - DNA, 1250 bp, Muscodor strobelii
  misc_feature: SGI EST ID NO. CUFF.13048.0
  misc_feature: Variant of the nucleotide sequence at SEQ ID NO 5149
ctaggacatgttgcgagcacagttcctgcaccgaatcagtttagtattccaaagattctgttctctttcgaggtgctacacattgtcggcctgaatgttgccaaaattagcgctcttgtcttctatctgaagctattcaacaatgaggacactgccagactgacaaaaagatgcattattgcgttttgtatcggtacggcgggtctgctcatctaccaatttaccttctgccatccgcttgcagatatgtggaaatgggacggtcttgaaacatgtggcgatcgcgtaagttgatgagcacccgtagtttgctagttccatagtcagtcctaaggtgcgtcgttggatcattatgcaattggctaacaaggatgctcttcagaaaccattatatgttgtagtctgtgtctggtctattgtcacggacttactactcttaatcgtccctatacccgccatttggaaattgaaaatggacagaagaacaagagtcaaactctcgtcattgtttggagtaggtcttagcgtaacggcagtgtccattatccgtctgggctatattgctacaattgactaccacgacgacttctcgtactacagcgtatctgcgaccttcttagcagatctcgaaccggccctcaccattctgtgcgttagcgccccgatgatctacacacttttcgccaggtggttcaaaaagagcggcagagagatgtctggccctcatgtccatcctcgatcgtatacgtatggatcggctttcggacgtcgcatcgacccaaataagcgtaatttcaaccagatcgcacccactgagccggacccattcgaacttgacaatgtgtacggcaacagtcgtgaaatcatgatctctacaaccgagaagagatctcttggaggccgcttgaaggatcagcttatctcgaagagtcttgacgatgttgaatctagcagcgagtcagaacaaggactggtttataatatgccgaaaggcagccctccacaaaacggcgggatcgtagtctcgacagactttactgtttcagtttcgcgaaactgatcttcctgcaactagacttggataaatatttgagcattaaggtttccaattgatgatattacgagcgacggagctttccaaccccccactgtgtccgaggcgatgcgatactgtatattatggaggtctagcttgcggcattcggggctgtaacaggctcttagatatctacgatgataccatgaaaaat

SEQ ID NO: 5152 - DNA, 1011 bp, Muscodor strobelii
  misc_feature: SGI cDNA ID NO. 561427
  misc_feature: Encodes the peptide sequence at SEQ ID NO 5153
atggcatcttctaacgaagctccagctttgctggatctgacaattgacaatattacgcccaataccgtgcgcatcaattcacaaagtgatgaccggaggttgacttatctcatggaacgtctcgtaactcatttacatgacttcgcaagagagacacgtctcagtacagatgagtggatggccacgattaagttcctagttggatgtggtcagatcagtagcgaagtccgccaagtgataacatctggtcgtgaacaggaatttatcctcctctcggatattctgggactttcgcttcttgtcgacagcatcaatcatcccaagccgccttcatctacggaaggctcggtactgggaccgttccatacgcatgatgcgcctacattgcctcatggatcaaacatggcttcggatcccaaaggcgaaccgttgatatgtatttgcacgatcaaagacacgtctggaaaaccaatcgaaggagtcaagattgatatttgggaaacggatagcacagggcactacgacgtccagcactcagaccgtggtgagcccagtgagcgatgtgtcatggagagcgatgccgaggggcgattttggtttaagggtattaagcccgtcagctaccctatccctcatgacggccccgtgggcaagctcctggaaagactaaacaggcattgctggagaccagctcatctacatttcatgttcgaaaagaagggatgggatcacttgatcacctctttgtacatgcgtggcgataaatatgagacttccgatgccgtatttggcgtgaaacagagcttgattgtagaaccaacgaggatggacaacacaacggctcaagagtatgacatggtggagggcgattggatcttgaaacacgactttgtcctaacgagtgaggaggaaacagaaaaactcagggaccaaaacgcaacggaggctcttgagaaattaggcatacgcattgagttaatcgatcatctgcccgtaccagaggtggattga

SEQ ID NO: 5153 - protein, 336 aa, Muscodor strobelii
  misc_feature: SGI Peptide ID NO. 561427
  misc_feature (117)..(302): Pfam Id: PF00775 Pfam Desc: Dioxygenase
  misc_feature (31)..(113): Pfam Id: PF04444 Pfam Desc: Catechol dioxygenase N terminus
  misc_feature (7)..(336): NCBI GI: 171676073 Blast Desc: protein product [Podospora anserina] gi|170936102|emb|CAP60762.1| protein product [Podospora anserina]
  misc_feature (8)..(336): NCBI GI: 164429599 Blast Desc: NCU01979 [Neurospora crassa OR74A] gi|38567075|emb|CAE76372.1| hydroxyquinol-1, 2-dioxygenase [Neurospora crassa] gi|157073544|gb|EAA35107.2| NCU01979 crassa
  misc_feature (7)..(336): NCBI GI: 261353455 Blast Desc: hydroxyquinol 1,2-dioxygenase [Verticillium albo-atrum VaMs.102]
  misc_feature (2)..(336): NCBI GI: 39970305 Blast Desc: MGG_02619 [Magnaporthe grisea 70-15] gi|149209717|ref|XP_001522233.1| MGCH7_ch7g341 [Magnaporthe grisea 70-15] gi|86196296|gb|EAQ70934.1| MGCH7_ch7g341 grisea
  misc_feature (8)..(336): NCBI GI: 154302286 Blast Desc: BC1G_09927 [Botryotinia fuckeliana B05.10] gi|150855415|gb|EDN30607.1| BC1G_09927 [Botryotinia fuckeliana B05.10]
  misc_feature (8)..(336): NCBI GI: 156056144 Blast Desc: SS1G_05424 [Sclerotinia sclerotiorum 1980] gi|154703208|gb|EDO02947.1| SS1G_05424 [Sclerotinia sclerotiorum 1980]
  misc_feature (8)..(336): NCBI GI: 242773734 Blast Desc: catechol dioxygenase, [Talaromyces stipitatus ATCC 10500] gi|218721918|gb|EED21336.1| catechol dioxygenase, [Talaromyces stipitatus ATCC 10500]
  misc_feature (6)..(336): NCBI GI: 212531693 Blast Desc: catechol dioxygenase, [Penicillium marneffei ATCC 18224] gi|210071367|gb|EEA25456.1| catechol dioxygenase, [Penicillium marneffei ATCC 18224]
  misc_feature (3)..(336): NCBI GI: 115492175 Blast Desc: conserved [Aspergillus terreus NIH2624] gi|114197575|gb|EAU39275.1| conserved [Aspergillus terreus NIH2624]
  misc_feature (3)..(336): NCBI GI: 44890023 Blast Desc: dioxygenase, [Aspergillus fumigatus]
  misc_feature (17)..(270): SWISSPROT Homolog: EC 1.13.11.37 Hydroxyquinol 1,2-dioxygenase
MASSNEAPALLDLTIDNITPNTVRINSQSDDRRLTYLMERLVTHLHDFARETRLSTDEWMATIKFLVGCGQISSEVRQVITSGREQEFILLSDILGLSLLVDSINHPKPPSSTEGSVLGPFHTHDAPTLPHGSNMASDPKGEPLICICTIKDTSGKPIEGVKIDIWETDSTGHYDVQHSDRGEPSERCVMESDAEGRFWFKGIKPVSYPIPHDGPVGKLLERLNRHCWRPAHLHFMFEKKGWDHLITSLYMRGDKYETSDAVFGVKQSLIVEPTRMDNTTAQEYDMVEGDWILKHDFVLTSEEETEKLRDQNATEALEKLGIRIELIDHLPVPEVD

SEQ ID NO: 5154 - DNA, 827 bp, Muscodor strobelii
  misc_feature: SGI EST ID NO. CUFF.13063.0
  misc_feature: Variant of the nucleotide sequence at SEQ ID NO 5152
cggatattctgggactttcgcttcttgtcgacagcatcaatcatcccaagccgccttcatctacggaaggctcggtactgggaccgttccatacgcatgatgcgcctacattgcctcatggatcaaacatggcttcggatcccaaaggcgaaccgttgatatgtatttgcacgatcaaagacacgtctggaaaaccaatcgaaggagtcaagattgatatttgggaaacggatagcacagggcactacgacgtccagcactcagaccgtggtgagcccagtgagcgatgtgtcatggagagcgatgccgaggggcgattttggtttaagggtattaagcccgtcagctaccctatccctcatgacggccccgtgggcaagctcctggaaagactaaacaggcattgctggagaccagctcatctacatttcatgttcgaaaagaagggatgggatcacttgatcacctctttgtacatgcgtggcgataaatatgagacttccgatgccgtatttggcgtgaaacagagcttgattgtagaaccaacgaggatggacaacacaacggctcaagagtatgacatggtggagggcgattggatcttgaaacacgactttgtcctaacgagtgaggaggaaacagaaaaactcagggaccaaaacgcaacggaggctcttgagaaattaggcatacgcattgagttaatcgatcatctgcccgtaccagaggtggattgagtttggccacgaaattcagaaccgtattattatataacggctatgatgttatataaaagctacttagtaatgcggcagttataaaattag

SEQ ID NO: 5155 - DNA, 1278 bp, Muscodor strobelii
  misc_feature: SGI cDNA ID NO. 561428
  misc_feature: Reduced expression when VOC is produced
  misc_feature: Encodes the peptide sequence at SEQ ID NO 5156
atgtatgactttgctatcaagcttatcaaagacggaaaagccttcgctgatgactcagtcctcggtaagggagagatcattcgtaaaagccgattgccatctcaaaggcgcgatctctccatcgatgacacattagcgagattcgatgacatgaagtccggttccgaggagggccagcgctggtgcctccgtgccagaatccaatacgataattcaaacggcgcaatgcgagatccggtgatttatcgatccaaccttacaccacaccatcgaacaggcaccaaatggaagatctatccgacgtatgacttctgtgtgccgatcctggactccatcgagggtgtgactttagccatgcgcgatactacgtatcgcgaccggaacgagcagtattattggatacaagaagcactcggtttgcgaaaggtagctattcgggatttttcacgtttagttcttgagcaaacagtcctctccaagaggaagttaaaacagcttgtggagagtgggaaggtctggggttgggatgatcctagaatgccaacagtgagaggtattctgcgacgtggtttgactgtatcggcccttcgacagttcataatcggtcaaggatcgagccggaacattgtcaaccttcagtggaaccagctatggtcaatgaacaaaaaggtgatcgaccccatagcagcccgctatacggccatcgatcggaataatatggtacaatgccgcatcgtcgggctggacgagccatgcgtattggctaggccaaaacatctgaagaattcggagctaggagacaaaagcgtcatcctcgactcaaccatcgttattgagcaggatgatgcaaagtttttgagcgaggacgaggagatcacgttgatgaactgggggaatgcatttgtccgtcgcctgacgaaaactcccgagattaacgtagtgacaggcatggatctggagttgcatcttgatggtgatgtcaaagttaccaagaagaagctcacctggttggccgccaggaatgacaatatgattccggttgaccttgtttcctttgaccttctcatcacgaaaaagaagttggagatcaaggataacatcatggacttcttgacgcccgtcactgagtttcgagtggccgcgttcgctgactgcaacgtcaaagaactacctcaaggagctatcattcagtttgatcgcaaagggtattataaactggacacggcttacagcggagacggttttcgaatggtattcttcaatattccgagcagatag

SEQ ID NO: 5156 - protein, 425 aa, Muscodor strobelii
  misc_feature: SGI Peptide ID NO. 561428
  misc_feature (1)..(227): Pfam Id: PF00749 Pfam Desc: tRNA synthetases class I (E and Q), catalytic domain
  misc_feature (229)..(407): Pfam Id: PF03950 Pfam Desc: tRNA synthetases class I (E and Q), anti-codon binding domain
  misc_feature (1)..(424): NCBI GI: 226289020 Blast Desc: glutamyl-tRNA synthetase [Paracoccidioides brasiliensis Pb18]
  misc_feature (1)..(424): NCBI GI: 225681779 Blast Desc: glutamyl-tRNA synthetase [Paracoccidioides brasiliensis Pb03]
  misc_feature (1)..(424): NCBI GI: 240278933 Blast Desc: glutamyl-tRNA synthetase [Ajellomyces capsulatus H143]
  misc_feature (1)..(424): NCBI GI: 225560184 Blast Desc: glutamyl-tRNA synthetase [Ajellomyces capsulatus G186AR]
  misc_feature (1)..(424): NCBI GI: 239607090 Blast Desc: glutamyl-tRNA synthetase [Ajellomyces dermatitidis ER-3]
  misc_feature (1)..(424): NCBI GI: 226284316 Blast Desc: glutamyl-tRNA synthetase [Paracoccidioides brasiliensis Pb01]
  misc_feature (1)..(424): NCBI GI: 261201127 Blast Desc: glutamyl-tRNA synthetase [Ajellomyces dermatitidis SLH14081] gi|239594036|gb|EEQ76617.1| glutamyl-tRNA synthetase [Ajellomyces dermatitidis SLH14081]
  misc_feature (1)..(424): NCBI GI: 240108190 Blast Desc: Glutamyl-tRNA synthetase, cytoplasmic, [Coccidioides posadasii C735 delta SOWgp]
  misc_feature (1)..(424): NCBI GI: 119187457 Blast Desc: CIMG_03776 [Coccidioides immitis RS]
  misc_feature (1)..(424): NCBI GI: 258563978 Blast Desc: glutamyl-tRNA synthetase [Uncinocarpus reesii 1704] gi|237908241|gb|EEP82642.1| glutamyl-tRNA synthetase [Uncinocarpus reesii 1704]
  misc_feature (1)..(423): SWISSPROT Homolog: EC 6.1.1.17 Glutamate--tRNA ligase
  misc_feature: Useful for introducing or modulating the production of volatile compounds
MYDFAIKLIKDGKAFADDSVLGKGEIIRKSRLPSQRRDLSIDDTLARFDDMKSGSEEGQRWCLRARIQYDNSNGAMRDPVIYRSNLTPHHRTGTKWKIYPTYDFCVPILDSIEGVTLAMRDTTYRDRNEQYYWIQEALGLRKVAIRDFSRLVLEQTVLSKRKLKQLVESGKVWGWDDPRMPTVRGILRRGLTVSALRQFIIGQGSSRNIVNLQWNQLWSMNKKVIDPIAARYTAIDRNNMVQCRIVGLDEPCVLARPKHLKNSELGDKSVILDSTIVIEQDDAKFLSEDEEITLMNWGNAFVRRLTKTPEINVVTGMDLELHLDGDVKVTKKKLTWLAARNDNMIPVDLVSFDLLITKKKLEIKDNIMDFLTPVTEFRVAAFADCNVKELPQGAIIQFDRKGYYKLDTAYSGDGFRMVFFNIPSR

SEQ ID NO: 5157 - DNA, 2711 bp, Muscodor strobelii
  misc_feature: SGI EST ID NO. CUFF.13194.0
  misc_feature: Variant of the nucleotide sequence at SEQ ID NO 5155
tttcgcttcaaatttagctaaagaaatatcttaagaaattgagcaagtcttgaatatttaaagaaacaactctacaatggcgtcgaagcaacgagaccaggcaaacggcccggcgagcattgcgaccaaaagcgtcgatgctcccatgatcactcgattctcgcccgagcctagtggttatgtccatgttggtcacgtcaaggcagcaatcctcagttatcacgcctcccgtgagagagagggtggtgtttttatctgtcggttcgatgacacgaatccgagcacagagtctgcggagttccaagattcgattctagcagatcttgcatctattggaatcttaccggacaggaccagtcattctagcgactattttgagaacattcctcggtaagggagagatcattcgtaaaagccgattgccatctcaaaggcgcgatctctccatcgatgacacattagcgagattcgatgacatgaagtccggttccgaggagggccagcgctggtgcctccgtgccagaatccaatacgataattcaaacggcgcaatgcgagatccggtgatttatcgatccaaccttacaccacaccatcgaacaggcaccaaatggaagatctatccgacgtatgacttctgtgtgccgatcctggactccatcgagggtgtgactttagccatgcgcgatactacgtatcgcgaccggaacgagcagtattattggatacaagaagcactcggtttgcgaaaggtagctattcgggatttttcacgtttagttcttgagcaaacagtcctctccaagaggaagttaaaacagcttgtggagagtgggaaggtctggggttgggatgatcctagaatgccaacagtgagaggtattctgcgacgtggtttgactgtatcggcccttcgacagttcataatcggtcaaggatcgagccggaacattgtcaaccttcagtggaaccagctatggtcaatgaacaaaaaggtgatcgaccccatagcagcccgctatacggccatcgatcggaataatatggtacaatgccgcatcgtcgggctggacgagccatgcgtattggctaggccaaaacatctgaagaattcggagctaggagacaaaagcgtcatcctcgactcaaccatcgttattgagcaggatgatgcaaagtttttgagcgaggacgaggagatcacgttgatgaactgggggaatgcatttgtccgtcgcctgacgaaaactcccgagattaacgtagtgacaggcatggatctggagttgcatcttgatggtgatgtcaaagttaccaagaagaagctcacctggttggccgccaggaatgacaatatgattccggttgaccttgtttcctttgaccttctcatcacgaaaaagaagttggagatcaaggataacatcatggacttcttgacgcccgtcactgagtttcgagtggccgcgttcgctgactgcaacgtcaaagaactacctcaaggagctatcattcagtttgatcgcaaagggtattataaactggacacggcttacagcggagacggttttcgaatggtattcttcaatattccgagcagatagatctcgtggtgatgggattgggttggttgtgggtgcatacagatgtattattcttgctcattaaagcgattgattttcagaacatcatctgagtaaaattttgagcgaacagcgggaaatgcccgtgtctctacacgtctcgatccatggatggcgtctgtacgagcgtcacgtatgacgcatggtgtcgtcttcgtacacgtatgtctacatgtaaacaatagctgtaacatcgaattaaattggattcactcctatttatggtgtatgcgtgcccccgaaggcttctagttcttttagaaggaccgtcttgacctctgctgctgcccatgtcatctcgatcgaagtcttcatcattgacaatatgtccccgtccgaaaggccgcacattttcttcgttattaagagattgtgcaagagccagctagaatccatgtatgcagaactatcgctagatatacatacctttacgccagcatcaaacagtacttgaatccgctccgctacttcttgatatgtccatcttcgtagatacgcccaggggcatatggtcataccaatgctcctctccaggatcaggttggtgagctcttgcgtatccgccgcgttgagtccgtgatcaacacgatcggcaccgccgacgccgagaattgacgcgacgtgatagatgtttttatgtgtgtctttttgccctacgtcgcagtgtgcggtgatcttgaagccgtctcttcgggccgtcgtgaagatgtcatcgaacaaggatggagggtgattagtctcattagagtcaagtccaaagccgataatcacgtccttgtacgacatggcctgacgataatgctcgaaggcggactcttgaggtgagtcccggaggaaacacataatccatccagacttgacctagaacgggagcgatgaattgctcagttgagtttcaacagtcagttttcaactcaggcaggcagtcttacatcgagctctgttgcagccttttgttgcgcttctctcaatccacccatgaaatctttccaaggaacacctctcgaagtgtgtgtttgcgggtcaaagaatacctcgcaatacctcacattcatagatgctgcgcgc

SEQ ID NO: 5158 - DNA, 1179 bp, Muscodor strobelii
  misc_feature: SGI cDNA ID NO. 561429
  misc_feature: Encodes the peptide sequence at SEQ ID NO 5159
atgtttacagccatgaacccaatccccgatacgcgatcccaagacgggcgccgtgaaatcaaggatcatctgctcgcaacaaatgatgagttcatcgcccagatcccgaaagtcgagcttcacgtacacatagagggcaccctcactccgcagctcagatggaagctggcgaagagaaatgggattaagattcagatgggtagcaagacttcacgtgaattacagtccgtggaagaggttgagcgagcatacgacgatgtcatctccagtgcacagctgccgtcctttgcgcactgcccgccagccgaggtgcccgcgacattcttcgaagcttactatagcggctgtgaagtgctaaagacgagacaagacttcttcaatctcgccttcgattacttccagcgcgcagcatctatgaatgtgaggtattgcgaggtattctttgacccgcaaacacacacttcgagaggtgttccttggaaagatttcatgggtggattgagagaagcgcaacaaaaggctgcaacagagctcgatgtcaagtctggatggattatgtgtttcctccgggactcacctcaagagtccgccttcgagcattatcgtcaggccatgtcgtacaaggacgtgattatcggctttggacttgactctaatgagactaatcaccctccatccttgttcgatgacatcttcacgacggcccgaagagacggcttcaagatcaccgcacactgcgacgtagggcaaaaagacacacataaaaacatctatcacgtcgcgtcaattctcggcgtcggcggtgccgatcgtgttgatcacggactcaacgcggcggatacgcaagagctcaccaacctgatcctggagaggagcattggtatgaccatatgcccctgggcgtatctacgaagatggacatatcaagaagtagcggagcggattcaagtactgtttgatgctggcgtaaaggtatgtatatctagcgatagttctgcatacatggattctagctggctcttgcacaatctcttaataacgaagaaaatgtgcggcctttcggacggggacatattgtcaatgatgaagacttcgatcgagatgacatgggcagcagcagaggtcaagacggtccttctaaaagaactagaagccttcgggggcacgcatacaccataa

SEQ ID NO: 5159 - protein, 392 aa, Muscodor strobelii
  misc_feature: SGI Peptide ID NO. 561429
  misc_feature (34)..(382): Pfam Id: PF00962 Pfam Desc: Adenosine/AMP deaminase
  misc_feature (118)..(246): Pfam Id: PF00962 Pfam Desc: Adenosine/AMP deaminase
  misc_feature (268)..(382): Pfam Id: PF00962 Pfam Desc: Adenosine/AMP deaminase
  misc_feature (34)..(78): Pfam Id: PF00962 Pfam Desc: Adenosine/AMP deaminase
  misc_feature (8)..(385): NCBI GI: 212534168 Blast Desc: adenosine deaminase, [Penicillium marneffei ATCC 18224] gi|210069639|gb|EEA23729.1| adenosine deaminase, [Penicillium marneffei ATCC 18224]
  misc_feature (15)..(390): NCBI GI: 46111003 Blast Desc: FG02383.1 [Gibberella zeae PH-1]
  misc_feature (17)..(385): NCBI GI: 256723954 Blast Desc: NECHADRAFT_78484 [Nectria haematococca mpVI 77-13-4]
  misc_feature (3)..(383): NCBI GI: 169606490 Blast Desc: SNOG_06288 [Phaeosphaeria nodorum SN15] gi|160707005|gb|EAT86119.2| SNOG_06288 [Phaeosphaeria nodorum SN15]
  misc_feature (5)..(383): NCBI GI: 189197417 Blast Desc: adenosine deaminase 2 [Pyrenophora tritici-repentis Pt-1C-BFP] gi|187980994|gb|EDU47620.1| adenosine deaminase 2 [Pyrenophora tritici-repentis Pt-1C-BFP]
  misc_feature (1)..(386): NCBI GI: 145252176 Blast Desc: An16g02890 [Aspergillus niger] gi|134083146|emb|CAK48598.1| protein product [Aspergillus niger]
  misc_feature (18)..(386): NCBI GI: 238485250 Blast Desc: adenosine deaminase, [Aspergillus flavus NRRL3357] gi|220698742|gb|EED55081.1| adenosine deaminase, [Aspergillus flavus NRRL3357]
  misc_feature (31)..(385): NCBI GI: 255936913 Blast Desc: Pc13g10630 [Penicillium chrysogenum Wisconsin 54-1255] gi|211584103|emb|CAP92132.1| Pc13g10630 [Penicillium chrysogenum Wisconsin 54-1255]
  misc_feature (31)..(390): NCBI GI: 212531617 Blast Desc: adenosine deaminase, [Penicillium marneffei ATCC 18224] gi|210071329|gb|EEA25418.1| adenosine deaminase, [Penicillium marneffei ATCC 18224]
  misc_feature (31)..(386): NCBI GI: 256721719 Blast Desc: NECHADRAFT_55434 [Nectria haematococca mpVI 77-13-4]
  misc_feature (30)..(388): SWISSPROT Homolog: EC 3.5.4.4 Adenosine deaminase
MFTAMNPIPDTRSQDGRREIKDHLLATNDEFIAQIPKVELHVHIEGTLTPQLRWKLAKRNGIKIQMGSKTSRELQSVEEVERAYDDVISSAQLPSFAHCPPAEVPATFFEAYYSGCEVLKTRQDFFNLAFDYFQRAASMNVRYCEVFFDPQTHTSRGVPWKDFMGGLREAQQKAATELDVKSGWIMCFLRDSPQESAFEHYRQAMSYKDVIIGFGLDSNETNHPPSLFDDIFTTARRDGFKITAHCDVGQKDTHKNIYHVASILGVGGADRVDHGLNAADTQELTNLILERSIGMTICPWAYLRRWTYQEVAERIQVLFDAGVKVCISSDSSAYMDSSWLLHNLLITKKMCGLSDGDILSMMKTSIEMTWAAAEVKTVLLKELEAFGGTHTP

SEQ ID NO: 5160 - DNA, 3379 bp, Muscodor strobelii
  misc_feature: SGI EST ID NO. CUFF.13195.2
  misc_feature: Variant of the nucleotide sequence at SEQ ID NO 5158
tcgccgtaggagatcgcgcgttgctgtcgcgagttgtgattctcattttctcttcaaaaacatattgtatctcggaatattcaattacgctacctgagtatggcagctagcacccttcctgtttctagtgcagagccaaaccccggccttctccgccggttctcgccgctcctccacacgtttggaaatcgtcgtcggtgattgaactctggcgtagatcataaatgatgggaaatcaggcagtcatcgatatgagcaaagcgccttggatgttgtttgtacatgtttacagccatgaacccaatccccgatacgcgatcccaagacgggcgccgtgaaatcaaggatcatctgctcgcaacaaatgatgagttcatcgcccagatcccgaaagtcgagcttcacgtacacatagagggcaccctcactccgcagctcagatggaagctggcgaagagaaatgggattaagattcagatgggtagcaagacttcacgtgaattacagtccgtggaagaggttgagcgagcatacgacgatgtcatctccagtgcacagctgccgtcctttgcgcactgcccgccagccgaggtgcccgcgacattcttcgaagcttactatagcggctgtgaagtgctaaagacgagacaagacttcttcaatctcgccttcgattacttccagcgcgcagcatctatgaatgtgaggtattgcgaggtattctttgacccgcaaacacacacttcgagaggtgttccttggaaagatttcatgggtggattgagagaagcgcaacaaaaggctgcaacagagctcgatgtcaagtctggatggattatgtgtttcctccgggactcacctcaagagtccgccttcgagcattatcgtcaggccatgtcgtacaaggacgtgattatcggctttggacttgactctaatgagactaatcaccctccatccttgttcgatgacatcttcacgacggcccgaagagacggcttcaagatcaccgcacactgcgacgtagggcaaaaagacacacataaaaacatctatcacgtcgcgtcaattctcggcgtcggcggtgccgatcgtgttgatcacggactcaacgcggcggatacgcaagagctcaccaacctgatcctggagaggagcattggtatgaccatatgcccctgggcgtatctacgaagatggacatatcaagaagtagcggagcggattcaagtactgtttgatgctggcgtaaaggtatgtatatctagcgatagttctgcatacatggattctagctggctcttgcacaatctcttaataacgaagaaaatgtgcggcctttcggacggggacatattgtcaatgatgaagacttcgatcgagatgacatgggcagcagcagaggtcaagacggtccttctaaaagaactagaagccttcgggggcacgcatacaccataaataggagtgaatccaatttaattcgatgttacagctattgtttacatgtagacatacgtgtacgaagacgacaccatgcgtcatacgtgacgctcgtacagacgccatccatggatcgagacgtgtagagacacgggcatttcccgctgttcgctcaaaattttactcagatgatgttctgaaaatcaatcgctttaatgagcaagaataatacatctgtatgcacccacaaccaacccaatcccatcaccacgagatctatctgctcggaatattgaagaataccattcgaaaaccgtctccgctgtaagccgtgtccagtttataataccctttgcgatcaaactgaatgatagctccttgaggtagttctttgacgttgcagtcagcgaacgcggccactcgaaactcagtgacgggcgtcaagaagtccatgatgttatccttgatctccaacttctttttcgtgatgagaaggtcaaaggaaacaaggtcaaccggaatcatattgtcattcctggcggccaaccaggtgagcttcttcttggtaactttgacatcaccatcaagatgcaactccagatccatgcctgtcactacgttaatctcgggagttttcgtcaggcgacggacaaatgcattcccccagttcatcaacgtgatctcctcgtcctcgctcaaaaactttgcatcatcctgctcaataacgatggttgagtcgaggatgacgcttttgtctcctagctccgaattcttcagatgttttggcctagccaatacgcatggctcgtccagcccgacgatgcggcattgtaccatattattccgatcgatggccgtatagcgggctgctatggggtcgatcacctttttgttcattgaccatagctggttccactgaaggttgacaatgttccggctcgatccttgaccgattatgaactgtcgaagggccgatacagtcaaaccacgtcgcagaatacctctcactgttggcattctaggatcatcccaaccccagaccttcccactctccacaagctgttttaacttcctcttggagaggactgtttgctcaagaactaaacgtgaaaaatcccgaatagctacctttcgcaaaccgagtgcttcttgtatccaataatactgctcgttccggtcgcgatacgtagtatcgcgcatggctaaagtcacaccctcgatggagtccaggatcggcacacagaagtcatacgtcggatagatcttccatttggtgcctgttcgatggtgtggtgtaaggttggatcgataaatcaccggatctcgcattgcgccgtttgaattatcgtattggattctggcacggaggcaccagcgctggccctcctcggaaccggacttcatgtcatcgaatctcgctaatgtgtcatcgatggagagatcgcgcctttgagatggcaatcggcttttacgaatgatctctcccttaccgaggactgagtcatcagcgaaggcttttccgtctttgataagcttgatagcaaagtcatacatgttctcaaaatagtcgctagaatgactggtcctgtccggtaagattccaatagatgcaagatctgctagaatcgaatcttggaactccgcagactctgtgctcggattcgtgtcatcgaaccgacagataaaaacaccaccctctctctcacgggaggcgtgataactgaggattgctgccttgacgtgaccaacatggacataaccactaggctcgggcgagaatcgagtgatcatgggagcatcgacgcttttggtcgcaatgctcgccgggccgtttgcctggtctcgttgcttcgacgccattgtagagttgtttctttaaatattcaagacttgctcaatttcttaagatatttctttagctaaatttgaagcgaaa

SEQ ID NO: 5161 - DNA, 648 bp, Muscodor strobelii
  misc_feature: SGI cDNA ID NO. 561430
  misc_feature: Encodes the peptide sequence at SEQ ID NO 5162
atgggtgttttcgagattgccctcccaaaattaactcctgacgcggagctcattaagacggttgagaaagatgttcacattgtgatcgacttgctcaaggcagcaaaggcacgaaatgccttgagaggatggcttgtctcggaaaatggtaaagacgtgaaggctgcctttagggagatattggtcctagaatggtcagaaattcaggacttccacaattttgtagcttctgatggattccagggcttcgtaggtctcctcaagggaaagggccttgtgcaaggtccccctgaactgaagatcttcgacgccgagaacccttctgagctatttgcctcgcatcctgttcttgagtacctcatgatcaagcccaaggatgcttcagatgctacaaaagagaacgtccttcataagctgaagtcaaatattgtgacacttggttcttcaaaagctgttgtgggaggtagcgccaatctcgagccaaaggagatcgcagctgttggcttgtacaccagcgacgccgagcttgcaaaagctcaaggatcaagtactcgacaagcgctccttcaagatattgccaaggtggctgatgtcacaaccattgtagcacatgtcagctacgagtttggtactgagaaaaagcactaa

SEQ ID NO: 5162 - protein, 215 aa, Muscodor strobelii
  misc_feature: SGI Peptide ID NO. 561430
MGVFEIALPKLTPDAELIKTVEKDVHIVIDLLKAAKARNALRGWLVSENGKDVKAAFREILVLEWSEIQDFHNFVASDGFQGFVGLLKGKGLVQGPPELKIFDAENPSELFASHPVLEYLMIKPKDASDATKENVLHKLKSNIVTLGSSKAVVGGSANLEPKEIAAVGLYTSDAELAKAQGSSTRQALLQDIAKVADVTTIVAHVSYEFGTEKKH

SEQ ID NO: 5163 - DNA, 385 bp, Muscodor strobelii
  misc_feature: SGI EST ID NO. CUFF.13072.0
  misc_feature: Variant of the nucleotide sequence at SEQ ID NO 5161
ttcaaacataatcgcgccattaaaaacgatctgtcatcccttcttatcaaaatgggtgttttcgagattgccctcccaaaattaactcctgacgcggagctcattaagacggttgagaaagatgttcacattgtgatcgacttgctcaaggcagcaaaggcacgaaatgccttgagaggatggcttgtctcggaaaatggtaaagacgtgaaggctgcctttagggagatattggtcctagaatggtcagaaattcaggacttccacaattttgtagcttctgatggattccagggcttcgtaggtctcctcaagggaaagggccttgtgcaaggtccccctgaactgaagatcttcgacgccgagaacccttctgagctatttg

SEQ ID NO: 5164 - DNA, 714 bp, Muscodor strobelii
  misc_feature: SGI cDNA ID NO. 561431
  misc_feature: Encodes the peptide sequence at SEQ ID NO 5165
atgacatcacccatcctctcagccacatacgaaaagccgcaaccgcgacctcccaagtctccagcgcacgccgctaaaatcagggtgcgcaataggcggcgcgagtggctcacaaggaatcaatcttacttcgaatccctagaacacgagctggccgatcccgttctatatgacaagctcgtgcgacgctttcaaagtcatgaacagcgcgagcaagagggtcgtgtcaagggctttgggcgcgtactagaggttgatttattgaggggggaggcgcgaatgaaacggttagcagaggatgtggagcgcacaagtgagattgggagatcgacagcacaggatggtggtgaaaagccagatgcggctatctctcaggcgagaacgggcgcagaccagccggaagtggtagatgaagtagagacctatgacctggacaagcctcccccgcaagatgctgaggagggacggtcacggtggaatgaattcctacgccgccggtttgtcgcaggcagagatgatgagttcaattatcgagctgtcgatgaagacgatgagtatgacgccctcgagcgtcgagaacaggaggatgcctggatcgagaatgaagagcctagctggattgaggaggatgaggaccaggagacagcagacgataacgcgaaaactactgttgagaggccgttgacgggtgagactggagttcaagatttttga

SEQ ID NO: 5165 - protein, 237 aa, Muscodor strobelii
  misc_feature: SGI Peptide ID NO. 561431
  misc_feature (10)..(237): NCBI GI: 149210383 Blast Desc: MGCH7_ch7g669 [Magnaporthe grisea 70-15] gi|86196624|gb|EAQ71262.1| MGCH7_ch7g669 [Magnaporthe grisea 70-15]
  misc_feature (10)..(237): NCBI GI: 39970875 Blast Desc: MGG_02904 [Magnaporthe grisea 70-15] gi|145017271|gb|EDK01634.1| MGG_02904 [Magnaporthe grisea 70-15]
  misc_feature (1)..(237): NCBI GI: 256734279 Blast Desc: NECHADRAFT_35624 [Nectria haematococca mpVI 77-13-4]
  misc_feature (4)..(237): NCBI GI: 261353409 Blast Desc: conserved [Verticillium albo-atrum VaMs.102]
  misc_feature (2)..(211): NCBI GI: 116193857 Blast Desc: CHGG_06646 [Chaetomium globosum CBS 148.51] gi|88182559|gb|EAQ90027.1| CHGG_06646 [Chaetomium globosum CBS 148.51]
  misc_feature (13)..(237): NCBI GI: 156040726 Blast Desc: SS1G_11341 [Sclerotinia sclerotiorum 1980] gi|154695725|gb|EDN95463.1| SS1G_11341 [Sclerotinia sclerotiorum 1980]
  misc_feature (4)..(237): NCBI GI: 46130686 Blast Desc: FG08947.1 [Gibberella zeae PH-1]
  misc_feature (25)..(237): NCBI GI: 171676231 Blast Desc: protein product [Podospora anserina] gi|170936181|emb|CAP60841.1| protein product [Podospora anserina]
  misc_feature (4)..(237): NCBI GI: 238839150 Blast Desc: conserved [Microsporum canis CBS 113480]
  misc_feature (17)..(237): NCBI GI: 261202016 Blast Desc: conserved [Ajellomyces dermatitidis SLH14081] gi|239590319|gb|EEQ72900.1| conserved [Ajellomyces dermatitidis SLH14081] gi|239612029|gb|EEQ89016.1| conserved [Ajellomyces
MTSPILSATYEKPQPRPPKSPAHAAKIRVRNRRREWLTRNQSYFESLEHELADPVLYDKLVRRFQSHEQREQEGRVKGFGRVLEVDLLRGEARMKRLAEDVERTSEIGRSTAQDGGEKPDAAISQARTGADQPEVVDEVETYDLDKPPPQDAEEGRSRWNEFLRRRFVAGRDDEFNYRAVDEDDEYDALERREQEDAWIENEEPSWIEEDEDQETADDNAKTTVERPLTGETGVQDF

SEQ ID NO: 5166 - DNA, 1026 bp, Muscodor strobelii
  misc_feature: SGI EST ID NO. CUFF.13078.0
  misc_feature: Variant of the nucleotide sequence at SEQ ID NO 5164
cgaatcttcagtcgatatatattattgatacttgtaagtcaaaagcccacgcaagacgaactactcattagtctggcacgaagccagcagcacaaacaattgagaagcatcaccacagctctctaggggcacccggagagcgctagaaccccgctctgcgacagcacccaactcatccacgtctgtcaagcactaaacctatcaccgaaaatgccatcagacccaatcctcccaaaccccaaatcacctaacaaaatgacatcacccatcctctcagccacatacgaaaagccgcaaccgcgacctcccaagtctccagcgcacgccgctaaaatcagggtgcgcaataggcggcgcgagtggctcacaaggaatcaatcttacttcgaatccctagaacacgagctggccgatcccgttctatatgacaagctcgtgcgacgctttcaaagtcatgaacagcgcgagcaagagggtcgtgtcaagggctttgggcgcgtactagaggttgatttattgaggggggaggcgcgaatgaaacggttagcagaggatgtggagcgcacaagtgagattgggagatcgacagcacaggatggtggtgaaaagccagatgcggctatctctcaggcgagaacgggcgcagaccagccggaagtggtagatgaagtagagacctatgacctggacaagcctcccccgcaagatgctgaggagggacggtcacggtggaatgaattcctacgccgccggtttgtcgcaggcagagatgatgagttcaattatcgagctgtcgatgaagacgatgagtatgacgccctcgagcgtcgagaacaggaggatgcctggatcgagaatgaagagcctagctggattgaggaggatgaggaccaggagacagcagacgataacgcgaaaactactgttgagaggccgttgacgggtgagactggagttcaagatttttgatatagatgaatatcgaagaattctgacagcaatgagaccgaaaattgatatttcgtg

SEQ ID NO: 5167 - DNA, 1398 bp, Muscodor strobelii
  misc_feature: SGI cDNA ID NO. 561432
  misc_feature: Encodes the peptide sequence at SEQ ID NO 5168
atggctaccagaaaacggaagaatcctctcccgttgctccccgctcagcgcacattacggagcggccgagtttacgaacctactgaagatattgttatcccaacatacaagtctgtcattgagatcagtgacaccgatgatagcagtgacggcgatggtgttcatgatgacgagagtggtgagaacatcgagaattactacaatactgaaagtgccaacgagactactttatctccgggaagcagcgatgtaatcgaaatcagcgacggcgacgacagtagcgacctctctgatctacctgatgattacgagaatagtgtttcaacggaagttgttgacgacgatgtagaagactatgaagagacgcacttgccatctgaaaactcaataccatcaaaagactcctcgtcatcgattgtcactccaggcgcagagcatgttgtgtggagtcattcgcctctgccagcagggtacatgttcgtgaagaagggtggtgcatacctgacacgcaattgccgggcgcggactaaaaaagagggcagagacctttacgttgttgttgaaaagatccgcggctcgaagaaacagctaggcattcgagttccagtaacaatattcgcatccgttactaaatcagaaagagaaactcgaggtgacagagcgcaagcagtccaaaagcgagaccataagctagagaacaagctccgtgacgaaattcttcaccaatacccaaaaatacctgccgctaaccttctcgtggttatgaaacacgcgacgatgaagcgtagtaggcgcgtgggacgaagtgggaaggttaatgagatcgacaaagcccgtttagctgttattgcacatatccgacataccaagacggactacgactctttactacgcaacagtaatctgggacgtggagaagcaagagcatttgcaagaagatcggtggctcagactattaacgagatattgaaaacctggggcagttctcatactatcgagggtttgagactgccacggcgcaaagaccacgaaaaaggcacgaagactgtgaagattacgaagccgagccgtacctcggcagtcctccctgcgatctcgactgcgccagcccgaaaatcagctatcaagaaggcaaagtcgaaagctagaacatcggctagatcccatgccttggacgaaaatagacgacaaggcatgaaagactgcgatgggccagcaagcaatggaaatgcaatccaaggaaaactccccttgcctattggctcggctgtagcggccctagacaagggccctaggaacgcgaaagtgaaaaagagaaaggcgaagcgggtgaagaactcacggcagcagcagatgaagggaaagtctcatcctgttggaaaaggtcaagcgagctag

SEQ ID NO: 5168 - protein, 465 aa, Muscodor strobelii
  misc_feature: SGI Peptide ID NO. 561432
  misc_feature (145)..(327): NCBI GI: 39940244 Blast Desc: MGG_05118 [Magnaporthe grisea 70-15] gi|145010627|gb|EDJ95283.1| MGG_05118 [Magnaporthe grisea 70-15]
  misc_feature (148)..(327): NCBI GI: 116191611 Blast Desc: CHGG_05523 [Chaetomium globosum CBS 148.51] gi|88181436|gb|EAQ88904.1| CHGG_05523 [Chaetomium globosum CBS 148.51]
  misc_feature (135)..(329): NCBI GI: 171687184 Blast Desc: protein product [Podospora anserina] gi|170943553|emb|CAP69206.1| protein product [Podospora anserina]
  misc_feature (151)..(327): NCBI GI: 85109492 Blast Desc: NCU07822 [Neurospora crassa OR74A] gi|28924588|gb|EAA33707.1| [Neurospora crassa OR74A]
  misc_feature (147)..(330): NCBI GI: 169615411 Blast Desc: SNOG_10863 [Phaeosphaeria nodorum SN15] gi|160702955|gb|EAT81362.2| SNOG_10863 [Phaeosphaeria nodorum SN15]
  misc_feature (94)..(327): NCBI GI: 145230269 Blast Desc: An01g10240 [Aspergillus niger] gi|134055560|emb|CAK37206.1| protein product [Aspergillus niger]
  misc_feature (145)..(340): NCBI GI: 238483877 Blast Desc: conserved [Aspergillus flavus NRRL3357] gi|220701227|gb|EED57565.1| conserved [Aspergillus flavus NRRL3357]
  misc_feature (148)..(326): NCBI GI: 115397423 Blast Desc: conserved [Aspergillus terreus NIH2624] gi|114192494|gb|EAU34194.1| conserved [Aspergillus terreus NIH2624]
  misc_feature (153)..(326): NCBI GI: 255957101 Blast Desc: Pc21g23360 [Penicillium chrysogenum Wisconsin 54-1255] gi|211591014|emb|CAP97233.1| Pc21g23360 [Penicillium chrysogenum Wisconsin 54-1255]
  misc_feature (144)..(326): NCBI GI: 238838896 Blast Desc: conserved [Microsporum canis CBS 113480]
MATRKRKNPLPLLPAQRTLRSGRVYEPTEDIVIPTYKSVIEISDTDDSSDGDGVHDDESGENIENYYNTESANETTLSPGSSDVIEISDGDDSSDLSDLPDDYENSVSTEVVDDDVEDYEETHLPSENSIPSKDSSSSIVTPGAEHVVWSHSPLPAGYMFVKKGGAYLTRNCRARTKKEGRDLYVVVEKIRGSKKQLGIRVPVTIFASVTKSERETRGDRAQAVQKRDHKLENKLRDEILHQYPKIPAANLLVVMKHATMKRSRRVGRSGKVNEIDKARLAVIAHIRHTKTDYDSLLRNSNLGRGEARAFARRSVAQTINEILKTWGSSHTIEGLRLPRRKDHEKGTKTVKITKPSRTSAVLPAISTAPARKSAIKKAKSKARTSARSHALDENRRQGMKDCDGPASNGNAIQGKLPLPIGSAVAALDKGPRNAKVKKRKAKRVKNSRQQQMKGKSHPVGKGQAS

SEQ ID NO: 5169 - DNA, 2367 bp, Muscodor strobelii
  misc_feature: SGI EST ID NO. CUFF.13081.0
  misc_feature: Variant of the nucleotide sequence at SEQ ID NO 5167
ttcattttaagtctgcatacactctgaattgattgttatcacttcacgcctttgtaatgaagcttttagtactcgagcctgttggcttcattccttctagttccatcaactagactgccctgcaagggatgccaagctcgcctacgttaacgttcagcagcttaccgctgccgattaagcagccctctctcgtctccccagtcaaagctaggtccagatcgcgcgctgctcggagtgtcttgtccaccatcactgcatcactctcccgcacctcgctggcgcctgaacttcgccgcacctcggcaacggcatcgtccaagaccctgtcacattgtagtccaagtctcctagaagcaacatggctaccagaaaacggaagaatcctctcccgttgctccccgctcagcgcacattacggagcggccgagtttacgaacctactgaagatattgttatcccaacatacaagtctgtcattgagatcagtgacaccgatgatagcagtgacggcgatggtgttcatgatgacgagagtggtgagaacatcgagaattactacaatactgaaagtgccaacgagactactttatctccgggaagcagcgatgtaatcgaaatcagcgacggcgacgacagtagcgacctctctgatctacctgatgattacgagaatagtgtttcaacggaagttgttgacgacgatgtagaagactatgaagagacgcacttgccatctgaaaactcaataccatcaaaagactcctcgtcatcgattgtcactccaggcgcagagcatgttgtgtggagtcattcgcctctgccagcagggtacatgttcgtgaagaagggtggtgcatacctgacacgcaattgccgggcgcggactaaaaaagagggcagagacctttacgttgttgttgaaaagatccgcggctcgaagaaacagctaggcattcgagttccagtaacaatattcgcatccgttactaaatcagaaagagaaactcgaggtgacagagcgcaagcagtccaaaagcgagaccataagctagagaacaagctccgtgacgaaattcttcaccaatacccaaaaatacctgccgctaaccttctcgtggttatgaaacacgcgacgatgaagcgtagtaggcgcgtgggacgaagtgggaaggttaatgagatcgacaaagcccgtttagctgttattgcacatatccgacataccaagacggactacgactctttactacgcaacagtaatctgggacgtggagaagcaagagcatttgcaagaagatcggtggctcagactattaacgagatattgaaaacctggggcagttctcatactatcgagggtttgagactgccacggcgcaaagaccacgaaaaaggcacgaagactgtgaagattacgaagccgagccgtacctcggcagtcctccctgcgatctcgactgcgccagcccgaaaatcagctatcaagaaggcaaagtcgaaagctagaacatcggctagatcccatgccttggacgaaaatagacgacaaggcatgaaagactgcgatgggccagcaagcaatggaaatgcaatccaaggaaaactccccttgcctattggctcggctgtagcggccctagacaagggccctaggaacgcgaaagtgaaaaagagaaaggcgaagcgggtgaagaactcacggcagcagcagatgaagggaaagtctcatcctgttggaaaaggtcaagcgagctaggaactcgcagacgaaaccaacgcatgtgtgcctgacatttcagttgtgcgtgcatctaagaaagatggacggaagaccaaatggcaattgaaagccgaaaagaaggcgataaggaggatagaaaaggatagggtaagggagaaacgccagcagcagatagtggaaatggcaaatgtcattggcacttcgactggatcgaccttgacgaaagccgagcgagaacgacaggcgacatccatcataaaccgggaaaagaggcaaagaaaggcacaacagcacgctgagtgtaaagcggcgagagtcttggcttacaaaagcatgttgagagggtacagtcgctccctctcataagatggacagattgagaaggactcgatggtggtacaatattgaggctgattcttgcgaacatatgatggagttggacgtggataaggagagcggaactgttgagacacacatacggataatacccatactgctttggctttgccaggatttggagctatcacgttggagtttgaggcgttagttactgaaattctgtagcgtaactctccaggttcttggtcggtgtcgctagacatactgctaatgaaactcacaaatat

SEQ ID NO: 5170 - DNA, 780 bp, Muscodor strobelii
  misc_feature: SGI cDNA ID NO. 561433
  misc_feature: Encodes the peptide sequence at SEQ ID NO 5171
atgtcatccacttctgcgacagacttaggcgcaaaatcggcacatgatcgcgtgacgatcgggaaagctatcctctccgctgtccgtgcagtctacgctcagaacgaggacgaggaaatacaagtagtactcatcgcccacgaccgtggagcacggctctcacaacgtcttatgactccgctgtcaaccgggtcaccaaccatcgcacaggcgagtaagatcaaaatactcggcgccgtactgatggacatagtgccattcgtcgatcaatggaacgcacatgccaaccccaggaacgcaacagcattatggcactgggcgttcctcgccaaatcctcatttagtatcccactgataagtgcctacggtggaggacgcttctgtcgtgaactcatcatcgcaactgctggctctagcgagtccggtcgtgcctcgctattcgcgaacgatgcattggatcattacgcagcggcgtatgagaaagaggaaaatattcgaggcgctagcgcagattacagcgctggagcagcggaggattgggatgcgatgaaggatgatattcaggaggggaggaagatgaatgtccctattttggcgatctatagcgatcatattcgcaatgtccatggtgatgttgattcgatctggagacggtatatgagtcctggtgcgaggctggaggcgatttgtatccctgaagttggccattatattgcggaagaagcgccagaggagactaataatcttgttgggaagtttttggagagtttgggcttatga

SEQ ID NO: 5171 - protein, 259 aa, Muscodor strobelii
  misc_feature: SGI Peptide ID NO. 561433
  misc_feature (13)..(257): NCBI GI: 145603729 Blast Desc: MGG_13290 [Magnaporthe grisea 70-15] gi|145011897|gb|EDJ96553.1| MGG_13290 [Magnaporthe grisea 70-15]
  misc_feature (11)..(259): NCBI GI: 258569423 Blast Desc: [Uncinocarpus reesii 1704] gi|237903785|gb|EEP78186.1| [Uncinocarpus reesii 1704]
  misc_feature (39)..(259): NCBI GI: 169599503 Blast Desc: SNOG_02570 [Phaeosphaeria nodorum SN15] gi|160705255|gb|EAT89301.2| SNOG_02570 [Phaeosphaeria nodorum SN15]
  misc_feature (14)..(259): NCBI GI: 119196853 Blast Desc: CIMG_02801 [Coccidioides immitis RS]
  misc_feature (33)..(259): NCBI GI: 238842984 Blast Desc: alpha/beta hydrolase fold protein [Microsporum canis CBS 113480]
  misc_feature (15)..(259): NCBI GI: 85093223 Blast Desc: NCU08156 [Neurospora crassa OR74A] gi|28921095|gb|EAA30412.1| [Neurospora crassa OR74A]
  misc_feature (82)..(259): NCBI GI: 240110771 Blast Desc: CPC735_036330 [Coccidioides posadasii C735 delta SOWgp]
  misc_feature (44)..(255): NCBI GI: 256728436 Blast Desc: NECHADRAFT_53866 [Nectria haematococca mpVI 77-13-4]
  misc_feature (31)..(256): NCBI GI: 146342902 Blast Desc: hydrolase [Bradyrhizobium sp. ORS278] gi|146195708|emb|CAL79735.1| hydrolase [Bradyrhizobium sp. ORS278]
  misc_feature (13)..(254): NCBI GI: 67517015 Blast Desc: AN0788.2 [Aspergillus nidulans FGSC A4] gi|40746462|gb|EAA65618.1| AN0788.2 [Aspergillus nidulans FGSC A4] gi|259488932|tpe|CBF88783.1| TPA: epoxide hydrolase, nidulans
  misc_feature (44)..(258): SWISSPROT Homolog: EC 3.8.1.3 Haloacetate dehalogenase
MSSTSATDLGAKSAHDRVTIGKAILSAVRAVYAQNEDEEIQVVLIAHDRGARLSQRLMTPLSTGSPTIAQASKIKILGAVLMDIVPFVDQWNAHANPRNATALWHWAFLAKSSFSIPLISAYGGGRFCRELIIATAGSSESGRASLFANDALDHYAAAYEKEENIRGASADYSAGAAEDWDAMKDDIQEGRKMNVPILAIYSDHIRNVHGDVDSIWRRYMSPGARLEAICIPEVGHYIAEEAPEETNNLVGKFLESLGL

SEQ ID NO: 5172 - DNA, 1331 bp, Muscodor strobelii
  misc_feature: SGI EST ID NO. CUFF.13087.0
  misc_feature: Variant of the nucleotide sequence at SEQ ID NO 5170
gatcctactgatttgagaaatcattggactgattgacatctaattcgaagctgtcgagttattaccaatcctctactaacatcacattctccaattgctataattatggccgaacaacttaaaggcttcgaaagcctcacatcaggaacccatcaaacaccaacaggaagcacaatatcctactcccacacacccatatctcaacacagacccggatcccctatactcgtactccttcatggttggccacaaacccgctacatatggcgctacgtaatcccacctctctcagccaagggtcatacactcttcgtcccagatctcccaggctacggcgaaagtaccatgtcatccacttctgcgacagacttaggcgcaaaatcggcacatgatcgcgtgacgatcgggaaagctatcctctccgctgtccgtgcagtctacgctcagaacgaggacgaggaaatacaagtagtactcatcgcccacgaccgtggagcacggctctcacaacgtcttatgactccgctgtcaaccgggtcaccaaccatcgcacaggcgagtaagatcaaaatactcggcgccgtactgatggacatagtgccattcgtcgatcaatggaacgcacatgccaaccccaggaacgcaacagcattatggcactgggcgttcctcgccaaatcctcatttagtatcccactgataagtgcctacggtggaggacgcttctgtcgtgaactcatcatcgcaactgctggctctagcgagtccggtcgtgcctcgctattcgcgaacgatgcattggatcattacgcagcggcgtatgagaaagaggaaaatattcgaggcgctagcgcagattacagcgctggagcagcggaggattgggatgcgatgaaggatgatattcaggaggggaggaagatgaatgtccctattttggcgatctatagcgatcatattcgcaatgtccatggtgatgttgattcgatctggagacggtatatgagtcctggtgcgaggctggaggcgatttgtatccctgaagttggccattatattgcggaagaagcgccagaggagactaataatcttgttgggaagtttttggagagtttgggcttatgagaaacaggacgtgtgtataaagtaggatgaggctccaggtttaatacattcaatcgcagttgcctcgaaaaggagggcgcaccttcaatttgtataccagttgggacgaaatggtggtcgttactaccccaatgcttctttctactaggccacgagtgtcgcaaggataacagaagcttctccccccctcctgtcctttgttctcg

SEQ ID NO: 5173 - DNA, 1500 bp, Muscodor strobelii
  misc_feature: SGI cDNA ID NO. 561434
  misc_feature: Encodes the peptide sequence at SEQ ID NO 5174
atgttcgtgtccaagcagggtgcctgggttggcataatatctggaccgtccgcttgcgtcccctccgaagtatctgccaaacctatgactatgtctagcgcggcatcttcttcgcgagatcctcgtgatctgagcgggccatctcacaacaatctcccacatgcgccgcccacgcaaatcgtcatcacggatcaacagttgatcgaggactggattgagtctgtttcatctagtacctccgttttagacgattatgatgacagcgacatcttcaacccgcgtcgcaagcgttgttgcatttgtcgccttaagaagaacaattccaccaagctttttcatagcgcgcttatctccaagcccgcccccgaaaagtcgacttcgagtgatggggtgtgggttagaaaaaaagacgaagagatcttgctacggcccgtcaagacgattcaagacctcgaatccctcaagcgacctgtccgttatatctcacttggtaatgacgcgacactgccgaatgatatcagactattgtgcaagaagcttggaaaacctgcggcttgtattggtatcttaccgagcgatattcgcaataagttgaaggaatctttctggaatggcgtatctgatcccaactttgatacaacacattcgatgcagaggccgagcatggaaataaggtctcggtatcacaaacggatcggcaagaactatcaatactctgtagggtcaaaacggcccaaacatgatgcgctcacctggaacagcagcctctacgagaaccttcttcggcttacttttgaatctggcaagtcagagcacaacgaggtcaacaagcgacagagccgagcgcgtgcacgcgccgagcccgtgacgtctgctgctatggccagtcatacattaccgcctgtgcaagatgaccagcatgaccaacaccgtgtcctcgcatatccttccggggagaacagttcagacacaaagaatcttgaagttgatagtgacgcggtacctatcggcgagtttcttagccgtcttgacaggacgaaggtcgactgggtcatatttctggatgttccaaaggacgaaatcccctgcgaagacactggtcttggcagagggcccgttggcatatccatcgtagccagcgcatcttcgattgacgaggcacgtgttcatctcggagtctgggttgcggggtggtatcaccggatgcatgcccttaataaagccattggcccgagaagggcgtcgctgtcgtcaacgcctacagcagtctccttcatctcggtacctctcgtcattgtagagcaacatgactggtcactatacttcgcttgcgactcgggcacttccatcgagatcatgggtccgatacacctcggtgacacaaggagcctcattggcacatatgcgatcgccgcatgccttcaacacatcagggactggatcgagaccacctttcacgacagactgaagcaatggtggagaaccctaaaggccgcctag

SEQ ID NO: 5174 - protein, 499 aa, Muscodor strobelii
  misc_feature: SGI Peptide ID NO. 561434
  misc_feature (144)..(492): NCBI GI: 116194203 Blast Desc: CHGG_06819 [Chaetomium globosum CBS 148.51] gi|88182732|gb|EAQ90200.1| CHGG_06819 [Chaetomium globosum CBS 148.51]
  misc_feature (125)..(485): NCBI GI: 116194328 Blast Desc: CHGG_03762 [Chaetomium globosum CBS 148.51] gi|88179675|gb|EAQ87143.1| CHGG_03762 [Chaetomium globosum CBS 148.51]
  misc_feature (108)..(485): NCBI GI: 256721214 Blast Desc: NECHADRAFT_82331 [Nectria haematococca mpVI 77-13-4]
  misc_feature (371)..(491): NCBI GI: 256722137 Blast Desc: NECHADRAFT_55546 [Nectria haematococca mpVI 77-13-4]
  misc_feature (358)..(489): NCBI GI: 39963832 Blast Desc: [Magnaporthe grisea 70-15] gi|145015428|gb|EDJ99964.1| [Magnaporthe grisea 70-15]
  misc_feature (372)..(496): NCBI GI: 149209015 Blast Desc: MGCH7_ch7g3 [Magnaporthe grisea 70-15] gi|86195958|gb|EAQ70596.1| MGCH7_ch7g3 [Magnaporthe grisea 70-15]
  misc_feature (368)..(485): NCBI GI: 256719922 Blast Desc: NECHADRAFT_4538 [Nectria haematococca mpVI 77-13-4]
  misc_feature (368)..(470): NCBI GI: 116197324 Blast Desc: CHGG_05260 [Chaetomium globosum CBS 148.51] gi|88181173|gb|EAQ88641.1| CHGG_05260 [Chaetomium globosum CBS 148.51]
  misc_feature (372)..(485): NCBI GI: 256722133 Blast Desc: NECHADRAFT_9732 [Nectria haematococca mpVI 77-13-4]
  misc_feature (370)..(485): NCBI GI: 189211866 Blast Desc: conserved [Pyrenophora tritici-repentis Pt-1C-BFP] gi|187979460|gb|EDU46086.1| conserved [Pyrenophora tritici-repentis Pt-1C-BFP]
MFVSKQGAWVGIISGPSACVPSEVSAKPMTMSSAASSSRDPRDLSGPSHNNLPHAPPTQIVITDQQLIEDWIESVSSSTSVLDDYDDSDIFNPRRKRCCICRLKKNNSTKLFHSALISKPAPEKSTSSDGVWVRKKDEEILLRPVKTIQDLESLKRPVRYISLGNDATLPNDIRLLCKKLGKPAACIGILPSDIRNKLKESFWNGVSDPNFDTTHSMQRPSMEIRSRYHKRIGKNYQYSVGSKRPKHDALTWNSSLYENLLRLTFESGKSEHNEVNKRQSRARARAEPVTSAAMASHTLPPVQDDQHDQHRVLAYPSGENSSDTKNLEVDSDAVPIGEFLSRLDRTKVDWVIFLDVPKDEIPCEDTGLGRGPVGISIVASASSIDEARVHLGVWVAGWYHRMHALNKAIGPRRASLSSTPTAVSFISVPLVIVEQHDWSLYFACDSGTSIEIMGPIHLGDTRSLIGTYAIAACLQHIRDWIETTFHDRLKQWWRTLKAA

SEQ ID NO: 5175 - DNA, 404 bp, Muscodor strobelii
  misc_feature: SGI EST ID NO. CUFF.13090.0
  misc_feature: Variant of the nucleotide sequence at SEQ ID NO 5173
gcctgggttggcataatatctggaccgtccgcttgcgtcccctccgaagtatctgccaaacctatgactatgtctagcgcggcatcttcttcgcgagatcctcgtgatctgagcgggccatctcacaacaatctcccacatgcgccgcccacgcaaatcgtcatcacggatcaacagttgatcgaggactggattgagtctgtttcatctagtacctccgttttagacgattatgatgacagcgacatcttcaacccgcgtcgcaagcgttgttgcatttgtcgccttaagaagaacaattccaccaagctttttcatagcgcgcttatctccaagcccgcccccgaaaagtcgacttcgagtgatggggtgtgggttagaaaaaaagacgaagagatcttgct

SEQ ID NO: 5176 - DNA, 882 bp, Muscodor strobelii
  misc_feature: SGI cDNA ID NO. 561435
  misc_feature: Encodes the peptide sequence at SEQ ID NO 5177
atggcaagccgagattcttcatcgcccgaattatctgttgcagacagactggacgatgagatcgccaagctcaaagcgcaagttgagagcttgcgaagcgacatcaaactccagtgctcaacattaatgcgcgcagagtcaacccatcagatcctccaaaatcaagctaccaagggacaatccgcggcaacaaaagaaaccgcaaagaagctcctggagcgcgccgagaaatacaaagccgacacacaacaacgtctctaccaagcctgcgcctccgtaacgaccttcaagatccaagatcccgaccccaatgccgtggatgacgggaaagtcctcggtctgcgcttcgaagtagcctacaaagctaaatatctccgaccctactacgtcatgctgaaccgaccatgggcccacaaacgctggctgcgcgttcatcgacatacagtccctcaatgtataccgttgtctggtctagccgcgagatacctgcctgcgccgaaggagaaggacgagtttgatcggcagaagaaacaagatcttgcgcagtttgcgagggccgtacggagagagattgtgcggtatcataatcgggaggctgttattagtgaccttaggaaggctgctggactgggttctaaaaaggaggcacaggaagagtcggagctgggacttgttgatgtgcgcgccgcagatgcggaggcgaagcagatcagtctgcagtggcgcgatggccggtctggtcgtttgatcatggatgatgatggtgaggtcgtcaagatggttgttcaaggacagagtgggcaggatcgcgagactgtcagacagtttcttgggggtagtgttcgcgtcgaggaggttacgaaacgtcttggtgatggctga

SEQ ID NO: 5177 - protein, 293 aa, Muscodor strobelii
  misc_feature: SGI Peptide ID NO. 561435
  misc_feature (112)..(204): Pfam Id: PF09496 Pfam Desc: Cenp-O kinetochore centromere component
  misc_feature (13)..(290): NCBI GI: 116193559 Blast Desc: CHGG_06497 [Chaetomium globosum CBS 148.51] gi|88182410|gb|EAQ89878.1| CHGG_06497 [Chaetomium globosum CBS 148.51]
  misc_feature (8)..(290): NCBI GI: 256734153 Blast Desc: [Nectria haematococca mpVI 77-13-4]
  misc_feature (6)..(290): NCBI GI: 46129242 Blast Desc: FG08806.1 [Gibberella zeae PH-1]
  misc_feature (17)..(292): NCBI GI: 261353199 Blast Desc: conserved [Verticillium albo-atrum VaMs.102]
  misc_feature (8)..(293): NCBI GI: 156046284 Blast Desc: SS1G_09396 [Sclerotinia sclerotiorum 1980] gi|154693791|gb|EDN93529.1| SS1G_09396 [Sclerotinia sclerotiorum 1980]
  misc_feature (28)..(290): NCBI GI: 171685017 Blast Desc: protein product [Podospora anserina] gi|170942469|emb|CAP68121.1| protein product [Podospora anserina]
  misc_feature (5)..(293): NCBI GI: 85115669 Blast Desc: NCU09100 [Neurospora crassa OR74A] gi|28926714|gb|EAA35681.1| [Neurospora crassa OR74A]
  misc_feature (17)..(290): NCBI GI: 145610088 Blast Desc: MGG_12605 [Magnaporthe grisea 70-15] gi|145017473|gb|EDK01836.1| MGG_12605 [Magnaporthe grisea 70-15]
  misc_feature (29)..(290): NCBI GI: 149209969 Blast Desc: MGCH7_ch7g466 [Magnaporthe grisea 70-15] gi|86196421|gb|EAQ71059.1| MGCH7_ch7g466 [Magnaporthe grisea 70-15]
  misc_feature (131)..(293): NCBI GI: 154319722 Blast Desc: BC1G_02342 [Botryotinia fuckeliana B05.10] gi|150856000|gb|EDN31192.1| BC1G_02342 [Botryotinia fuckeliana B05.10]
MASRDSSSPELSVADRLDDEIAKLKAQVESLRSDIKLQCSTLMRAESTHQILQNQATKGQSAATKETAKKLLERAEKYKADTQQRLYQACASVTTFKIQDPDPNAVDDGKVLGLRFEVAYKAKYLRPYYVMLNRPWAHKRWLRVHRHTVPQCIPLSGLAARYLPAPKEKDEFDRQKKQDLAQFARAVRREIVRYHNREAVISDLRKAAGLGSKKEAQEESELGLVDVRAADAEAKQISLQWRDGRSGRLIMDDDGEVVKMVVQGQSGQDRETVRQFLGGSVRVEEVTKRLGDG

SEQ ID NO: 5178 - DNA, 1220 bp, Muscodor strobelii
  misc_feature: SGI EST ID NO. CUFF.13316.0
  misc_feature: Variant of the nucleotide sequence at SEQ ID NO 5176
gcgtgttcgacatcaccaatttcagattgaagaggacttttcttcatcgccaaaacataaggcacaatggcaagccgagattcttcatcgcccgaattatctgttgcagacagactggacgatgagatcgccaagctcaaagcgcaagttgagagcttgcgaagcgacatcaaactccagtgctcaacattaatgcgcgcagagtcaacccatcagatcctccaaaatcaagctaccaagggacaatccgcggcaacaaaagaaaccgcaaagaagctcctggagcgcgccgagaaatacaaagccgacacacaacaacgtctctaccaagcctgcgcctccgtaacgaccttcaagatccaagatcccgaccccaatgccgtggatgacgggaaagtcctcggtctgcgcttcgaagtagcctacaaagctaaatatctccgaccctactacgtcatgctgaaccgaccatgggcccacaaacgctggctgcgcgttcatcgacatacagtccctcaatgtataccgttgtctggtctagccgcgagatacctgcctgcgccgaaggagaaggacgagtttgatcggcagaagaaacaagatcttgcgcagtttgcgagggccgtacggagagagattgtgcggtatcataatcgggaggctgttattagtgaccttaggaaggctgctggactgggttctaaaaaggaggcacaggaagagtcggagctgggacttgttgatgtgcgcgccgcagatgcggaggcgaagcagatcagtctgcagtggcgcgatggccggtctggtcgtttgatcatggatgatgatggtgaggtcgtcaagatggttgttcaaggacagagtgggcaggatcgcgagactgtcagacagtttcttgggggtagtgttcgcgtcgaggaggttacgaaacgtcttggtgatggctgaatgagcttagaagggatgccttttatttggtgcaggagagctggttttattcttgtgtctcgacgtctagtcgagacgtgagctcactgcatcatttactgttgtagtgccaagtaccttttggggatccaatacgtctacgaggtccaaccaactcttcttcttctgtctccatatctaagcattgttccttccccacacgcatgggcatcggccatatgtctcatccctctatttcaaggttcattaagaatacctgatgcatcttacgc

SEQ ID NO: 5179 - DNA, 1743 bp, Muscodor strobelii
  misc_feature: SGI cDNA ID NO. 561436
  misc_feature: Encodes the peptide sequence at SEQ ID NO 5180
atgggtgctaaaactcgtcggtcaaaccacccggaccgagacaagctgtccgtctcgaccacgacaggcagtgctcccgaccaactgcccaacggcaccggcaccggcaccatgagccaagtcgagctgcggcgcaagaacacggcgccccaggactcggcgtcgctcacggccaacctcgtctcccgcgactccttcaccctggacaacgaggtgcccaagacgcccctcgccaacaaccatggcttcttcgagctgccccgctccgaccagcgcaacttcatgctgctggtcctgctgtacttcctccagggcgtgcccatgggcctcgcgaccggctccgtgcccttcctcttgaaagaacacctgtcgtttggcgagatcggtgtcttcagcttggcctcatatccatactctttgaagttattttggagcccaattgtcgacgccgtatggacgccgaagctgggcaggagaaagagctggattctgcccatacagttgatttctggcctcagcatgttgtggctcggtggcaagatcgagactctgatggcgaccacgggcaaagcaggtggcccgactgtctggggcttcacgggctggtggttcttcctcgtcttcatgtgcgccacgcaggatatcgccgtcgatggctgggcattgaccttgctcacgcccggaaacgtgtcttatgcttcgacggcgcagactgtcggtctcacggctggccacttcttgtcgtacactgtgttcctggctttcaactctgaggacttcgcgaacaagtactggcgctctgtgccagccgagggaggtctaatggatcttggcggctatctgaccttttggggctggacttacatcgccatcactgttggtcttgcgctgctgaaaaaggaggagaggacacagaacgaggacgggatctgggatgtctacaagattatgtgggatgtgctgaagctgaagaatattcaaaccatcattatcgtccacctgatcgccaaaatcggcttccaagccaacgacggagtgacaaacctcaagcttctagagaagggcttcggaaaagagaacatggccctcacagtactcatcgatttccccttcgagatcggtctaggctactacgcagggaaatggtcacaggaatactcgcccatgcgcctctggtgctggggtttcatggggcggctcgtcgctgctatcatcgctcaattcaccgttgctattttccccgctgacggtgtccaatcgtggtacatgcttctcgtcatcggcgaacacgtcttctcgaccttcaccaacaccgtcatgtttgtggccgtctctgcgttccacgctaaagttgctgatcccgtcattggtggcacttacatgactctgctcgcaactgtctccaacctcggcggaacattcccacgctacttcgtcctccgcctcgtcgacgccttcacatccgcgacctgccacccaccctcccagagtgccctcgagaaactcgacacatttacgggccccttcatcaccgcccccttttcctgcgccgtgcagtccgagaaggagcgctgcacagcgggccacggtacatgcgagatcctgcacgatggctactacatcgtgaacattctgtgcgtcgttgtcggaatcttgacgtttgtattctacatacagaagaaggtcatggtgctccaggccctgccgttgcgagcctggaggttaaatgctgggaagtcttag

SEQ ID NO: 5180 - protein, 580 aa, Muscodor strobelii
  misc_feature: SGI Peptide ID NO. 561436
  misc_feature (4)..(576): NCBI GI: 261204745 Blast Desc: acetyl-CoA transporter [Ajellomyces dermatitidis SLH14081] gi|239587371|gb|EEQ70014.1| acetyl-CoA transporter [Ajellomyces dermatitidis SLH14081]
  misc_feature (31)..(578): NCBI GI: 212544448 Blast Desc: SD08430p [Penicillium marneffei ATCC 18224] gi|210065347|gb|EEA19441.1| SD08430p [Penicillium marneffei ATCC 18224]
  misc_feature (1)..(575): NCBI GI: 189202734 Blast Desc: conserved [Pyrenophora tritici-repentis Pt-1C-BFP] gi|187984802|gb|EDU50290.1| conserved [Pyrenophora tritici-repentis Pt-1C-BFP]
  misc_feature (31)..(578): NCBI GI: 240106299 Blast Desc: CPC735_058620 [Coccidioides posadasii C735 delta SOWgp]
  misc_feature (52)..(570): NCBI GI: 226286376 Blast Desc: acetyl-coenzyme A transporter 1 [Paracoccidioides brasiliensis Pb01]
  misc_feature (31)..(578): NCBI GI: 119191910 Blast Desc: CIMG_00332 [Coccidioides immitis RS]
  misc_feature (29)..(575): NCBI GI: 238845517 Blast Desc: acetyl-coenzyme A transporter 1 [Microsporum canis CBS 113480]
  misc_feature (6)..(578): NCBI GI: 169595198 Blast Desc: SNOG_00333 [Phaeosphaeria nodorum SN15] gi|111070708|gb|EAT91828.1| SNOG_00333 [Phaeosphaeria nodorum SN15]
  misc_feature (35)..(578): NCBI GI: 258573405 Blast Desc: conserved [Uncinocarpus reesii 1704] gi|237901150|gb|EEP75551.1| conserved [Uncinocarpus reesii 1704]
  misc_feature (1)..(580): NCBI GI: 256733661 Blast Desc: [Nectria haematococca mpVI 77-13-4]
MGAKTRRSNHPDRDKLSVSTTTGSAPDQLPNGTGTGTMSQVELRRKNTAPQDSASLTANLVSRDSFTLDNEVPKTPLANNHGFFELPRSDQRNFMLLVLLYFLQGVPMGLATGSVPFLLKEHLSFGEIGVFSLASYPYSLKLFWSPIVDAVWTPKLGRRKSWILPIQLISGLSMLWLGGKIETLMATTGKAGGPTVWGFTGWWFFLVFMCATQDIAVDGWALTLLTPGNVSYASTAQTVGLTAGHFLSYTVFLAFNSEDFANKYWRSVPAEGGLMDLGGYLTFWGWTYIAITVGLALLKKEERTQNEDGIWDVYKIMWDVLKLKNIQTIIIVHLIAKIGFQANDGVTNLKLLEKGFGKENMALTVLIDFPFEIGLGYYAGKWSQEYSPMRLWCWGFMGRLVAAIIAQFTVAIFPADGVQSWYMLLVIGEHVFSTFTNTVMFVAVSAFHAKVADPVIGGTYMTLLATVSNLGGTFPRYFVLRLVDAFTSATCHPPSQSALEKLDTFTGPFITAPFSCAVQSEKERCTAGHGTCEILHDGYYIVNILCVVVGILTFVFYIQKKVMVLQALPLRAWRLNAGKS

SEQ ID NO: 5181 - DNA, 3733 bp, Muscodor strobelii
  misc_feature: SGI EST ID NO. CUFF.13322.2
  misc_feature: Variant of the nucleotide sequence at SEQ ID NO 5179
caatcgtctattgactatttgccttccacattcggcgctaatgtgagaacacttctcgagttctagttggccttgggatcgtgaaatgaaatgcgagtatctggcatcaagccttgactcgtttcgctttgcattccccacgcgttctcgatgtcgttgtaaggcaccaattgccgttacactcaattctggatttgtcaggccttctttcacgcgttacttcctttacctttcgtacctgagcaacctgcagcccaccctgcgaaccttgggtagtctcgcccagctctgtacccttactcccttgatcctgcggtcgagactgtcccagatagcggttgcgctaccgcgttcgcgcctttccaacatttccaacgcccccgtgcgaactctgtgcgatccctccttgcctctaactcaccctcctcctctcccccatcaccacagatccgaatgggtgctaaaactcgtcggtcaaaccacccggaccgagacaagctgtccgtctcgaccacgacaggcagtgctcccgaccaactgcccaacggcaccggcaccggcaccatgagccaagtcgagctgcggcgcaagaacacggcgccccaggactcggcgtcgctcacggccaacctcgtctcccgcgactccttcaccctggacaacgaggtgcccaagacgcccctcgccaacaaccatggcttcttcgagctgccccgctccgaccagcgcaacttcatgctgctggtcctgctgtacttcctccagggcgtgcccatgggcctcgcgaccggctccgtgcccttcctcttgaaagaacacctgtcgtttggcgagatcggtgtcttcagcttggcctcatatccatactctttgaagttattttggagcccaattgtcgacgccgtatggacgccgaagctgggcaggagaaagagctggattctgcccatacagttgatttctggcctcagcatgttgtggctcggtggcaagatcgagactctgatggcgaccacgggcaaagcaggtggcccgactgtctggggcttcacgggctggtggttcttcctcgtcttcatgtgcgccacgcaggatatcgccgtcgatggctgggcattgaccttgctcacgcccggaaacgtgtcttatgcttcgacggcgcagactgtcggtctcacggctggccacttcttgtcgtacactgtgttcctggctttcaactctgaggacttcgcgaacaagtactggcgctctgtgccagccgagggaggtctaatggatcttggcggctatctgaccttttggggctggacttacatcgccatcactgttggtcttgcgctgctgaaaaaggaggagaggacacagaacgaggacgggatctgggatgtctacaagattatgtgggatgtgctgaagctgaagaatattcaaaccatcattatcgtccacctgatcgccaaaatcggcttccaagccaacgacggagtgacaaacctcaagcttctagagaagggcttcggaaaagagaacatggccctcacagtactcatcgatttccccttcgagatcggtctaggctactacgcagggaaatggtcacaggaatactcgcccatgcgcctctggtgctggggtttcatggggcggctcgtcgctgctatcatcgctcaattcaccgttgctattttccccgctgacggtgtccaatcgtggtacatgcttctcgtcatcggcgaacacgtcttctcgaccttcaccaacaccgtcatgtttgtggccgtctctgcgttccacgctaaagttgctgatcccgtcattggtggcacttacatgactctgctcgcaactgtctccaacctcggcggaacattcccacgctacttcgtcctccgcctcgtcgacgccttcacatccgcgacctgccacccaccctcccagagtgccctcgagaaactcgacacatttacgggccccttcatcaccgcccccttttcctgcgccgtgcagtccgagaaggagcgctgcacagcgggccacggtacatgcgagatcctgcacgatggctactacatcgtgaacattctgtgcgtcgttgtcggaatcttgacgtttgtattctacatacagaagaaggtcatggtgctccaggccctgccgttgcgagcctggaggttaaatgctgggaagtcttagtatatagagatatctgttatagagttagatagatgtgtgtcattacaccatgagaattcgaaagacatagaatatcatcacctactgtcgtgttcatagtcgatcaaatttgtggttcattctcgtatcgtattcatgtaccaaaaacagcccaatgcaaaacagctaggaacgcctcagtcgcaatggtcaagcatgggaaatgctaaaggaacccaaatccatgcaaactccagacttatgcaactccaacaacccctacaactcatccaccaatctgtcctacaaatcactcacagacgtaccctcctcatcaacactccactccttccaccccttcttctccccaggaagtctaacatcctcccactcccccttcgtgacatttctccactcctcagtagggatccaaccaatatacgcacgatcaccaaagcctccaacccagtacacatgctggactactagcctcacccactcggcctcgtggattcgattgcctggaagccaatacttcgcatcggggtgcttggcgacgaaacactctgcgagctgcgcggaagtaggggatgatgaggatgaggtgtcgatcttctcgatgtatcccagaagactgaagcgcgggaggttcgctgcgctgtagggcactgtttctttatctccttcgtcgtcgtctcctccctcatcgtcatcgacaccagtcagccaatccagtaatctcttgaccagcgaactcgaagtagtagtagaagtcgtagatccaatccgtttatcaggcgggaaaaccggagtccactgctgcgcaagactgacattcgacccatcccgcacatttttaaaactcgtctcgatgttgatggcgaggaatgtcgggttaccgtccccttcgcagtctgctacgtattccatgagggcgtggggcatgccgcctagtcctgagggtctgttctccaggatgtttatgtcgttgttggagctggagatggcattttgggatgatgggaacacggtcgcgatgtttcccagcggtgtgagggcgaggatgcgtcggcctaggacggcggattcgtaggatgttgggatccggtggcctgaggtcgaaggcgggttgctgaagatgtgttgtggtggtgaagtgagctccgacgcggttgtaaggtttacgagggggaggagggtcgttgggtggaacttcatggtggcggtggtgatgctgtcctgtcctgtcctgtgaaaatgccaaagtgaggtatacaagattggaaattaggggtattagaggtcgaagatatgtacagctagagtagagagagcattcctgagcagtcactaggaatgaggcgagacaagtcaaacggtgaaacagtaacggcgtggagatgcactggtcgactggtgctccgataggccccggaagctggtaccttcatggggccatgtgctgcagtttacagtttagatgcagggtgcagctctgctgatgagcttatctggtgacctcggtccccctgtgacgtcttggcgcttgctgttgaag

SEQ ID NO: 5182 - DNA, 915 bp, Muscodor strobelii
  misc_feature: SGI cDNA ID NO. 561437
  misc_feature: Encodes the peptide sequence at SEQ ID NO 5183
atgaagttccacccaacgaccctcctccccctcgtaaaccttacaaccgcgtcggagctcacttcaccaccacaacacatcttcagcaacccgccttcgacctcaggccaccggatcccaacatcctacgaatccgccgtcctaggccgacgcatcctcgccctcacaccgctgggaaacatcgcgaccgtgttcccatcatcccaaaatgccatctccagctccaacaacgacataaacatcctggagaacagaccctcaggactaggcggcatgccccacgccctcatggaatacgtagcagactgcgaaggggacggtaacccgacattcctcgccatcaacatcgagacgagttttaaaaatgtgcgggatgggtcgaatgtcagtcttgcgcagcagtggactccggttttcccgcctgataaacggattggatctacgacttctactactacttcgagttcgctggtcaagagattactggattggctgactggtgtcgatgacgatgagggaggagacgacgacgaaggagataaagaaacagtgccctacagcgcagcgaacctcccgcgcttcagtcttctgggatacatcgagaagatcgacacctcatcctcatcatcccctacttccgcgcagctcgcagagtgtttcgtcgccaagcaccccgatgcgaagtattggcttccaggcaatcgaatccacgaggccgagtgggtgaggctagtagtccagcatgtgtactgggttggaggctttggtgatcgtgcgtatattggttggatccctactgaggagtggagaaatgtcacgaagggggagtgggaggatgttagacttcctggggagaagaaggggtggaaggagtggagtgttgatgaggagggtacgtctgtgagtgatttgtag

SEQ ID NO: 5183 - protein, 304 aa, Muscodor strobelii
  misc_feature: SGI Peptide ID NO. 561437
  misc_feature (38)..(295): NCBI GI: 116193547 Blast Desc: CHGG_06491 [Chaetomium globosum CBS 148.51] gi|88182404|gb|EAQ89872.1| CHGG_06491 [Chaetomium globosum CBS 148.51]
  misc_feature (26)..(296): NCBI GI: 39970583 Blast Desc: MGG_02758 [Magnaporthe grisea 70-15] gi|145017429|gb|EDK01792.1| MGG_02758 [Magnaporthe grisea 70-15]
  misc_feature (37)..(289): NCBI GI: 46128517 Blast Desc: FG08636.1 [Gibberella zeae PH-1]
  misc_feature (25)..(289): NCBI GI: 256734145 Blast Desc: NECHADRAFT_99711 [Nectria haematococca mpVI 77-13-4]
  misc_feature (18)..(298): NCBI GI: 156055372 Blast Desc: SS1G_05037 [Sclerotinia sclerotiorum 1980] gi|154702822|gb|EDO02561.1| SS1G_05037 [Sclerotinia sclerotiorum 1980]
  misc_feature (25)..(298): NCBI GI: 154302543 Blast Desc: BC1G_09848 [Botryotinia fuckeliana B05.10] gi|150855337|gb|EDN30529.1| BC1G_09848 [Botryotinia fuckeliana B05.10]
  misc_feature (6)..(286): NCBI GI: 189199162 Blast Desc: conserved [Pyrenophora tritici-repentis Pt-1C-BFP] gi|187983017|gb|EDU48505.1| conserved [Pyrenophora tritici-repentis Pt-1C-BFP]
  misc_feature (11)..(304): NCBI GI: 261353258 Blast Desc: conserved [Verticillium albo-atrum VaMs.102]
  misc_feature (1)..(292): NCBI GI: 169609208 Blast Desc: SNOG_07691 [Phaeosphaeria nodorum SN15] gi|111064037|gb|EAT85157.1| SNOG_07691 [Phaeosphaeria nodorum SN15]
  misc_feature (3)..(286): NCBI GI: 171685005 Blast Desc: protein product [Podospora anserina] gi|170942463|emb|CAP68115.1| protein product [Podospora anserina]
MKFHPTTLLPLVNLTTASELTSPPQHIFSNPPSTSGHRIPTSYESAVLGRRILALTPLGNIATVFPSSQNAISSSNNDINILENRPSGLGGMPHALMEYVADCEGDGNPTFLAINIETSFKNVRDGSNVSLAQQWTPVFPPDKRIGSTTSTTTSSSLVKRLLDWLTGVDDDEGGDDDEGDKETVPYSAANLPRFSLLGYIEKIDTSSSSSPTSAQLAECFVAKHPDAKYWLPGNRIHEAEWVRLVVQHVYWVGGFGDRAYIGWIPTEEWRNVTKGEWEDVRLPGEKKGWKEWSVDEEGTSVSDL

SEQ ID NO: 5184 - DNA, 4063 bp, Muscodor strobelii
  misc_feature: SGI EST ID NO. CUFF.13322.3
  misc_feature: Variant of the nucleotide sequence at SEQ ID NO 5182
cttcaacagcaagcgccaagacgtcacagggggaccgaggtcaccagataagctcatcagcagagctgcaccctgcatctaaactgtaaactgcagcacatggccccatgaaggtaccagcttccggggcctatcggagcaccagtcgaccagtgcatctccacgccgttactgtttcaccgtttgacttgtctcgcctcattcctagtgactgctcaggaatgctctctctactctagctgtacatatcttcgacctctaatacccctaatttccaatcttgtatacctcactttggcattttcacaggacaggacaggacagcatcaccaccgccaccatgaagttccacccaacgaccctcctccccctcgtaaaccttacaaccgcgtcggagctcacttcaccaccacaacacatcttcagcaacccgccttcgacctcaggccaccggatcccaacatcctacgaatccgccgtcctaggccgacgcatcctcgccctcacaccgctgggaaacatcgcgaccgtgttcccatcatcccaaaatgccatctccagctccaacaacgacataaacatcctggagaacagaccctcaggactaggcggcatgccccacgccctcatggaatacgtagcagactgcgaaggggacggtaacccgacattcctcgccatcaacatcgagacgagttttaaaaatgtgcgggatgggtcgaatgtcagtcttgcgcagcagtggactccggttttcccgcctgataaacggattggatctacgacttctactactacttcgagttcgctggtcaagagattactggattggctgactggtgtcgatgacgatgagggaggagacgacgacgaaggagataaagaaacagtgccctacagcgcagcgaacctcccgcgcttcagtcttctgggatacatcgagaagatcgacacctcatcctcatcatcccctacttccgcgcagctcgcagagtgtttcgtcgccaagcaccccgatgcgaagtattggcttccaggcaatcgaatccacgaggccgagtgggtgaggctagtagtccagcatgtgtactgggttggaggctttggtgatcgtgcgtatattggttggatccctactgaggagtggagaaatgtcacgaagggggagtgggaggatgttagacttcctggggagaagaaggggtggaaggagtggagtgttgatgaggagggtacgtctgtgagtgatttgtaggacagattggtggatgagttgtaggggttgttggagttgcataagtctggagtttgcatggatttgggttcctttagcatttcccatgcttgaccattgcgactgaggcgttcctagctgttttgcattgggctgtttttggtacatgaatacgatacgagaatgaaccacaaatttgatcgactatgaacacgacagtaggtgatgatattctatgtctttcgaattctcatggtgtaatgacacacatctatctaactctataacagatatctctatatactaagacttcccagcatttaacctccaggctcgcaacggcagggcctggagcaccatgaccttcttctgtatgtagaatacaaacgtcaagattccgacaacgacgcacagaatgttcacgatgtagtagccatcgtgcaggatctcgcatgtaccgtggcccgctgtgcagcgctccttctcggactgcacggcgcaggaaaagggggcggtgatgaaggggcccgtaaatgtgtcgagtttctcgagggcactctgggagggtgggtggcaggtcgcggatgtgaaggcgtcgacgaggcggaggacgaagtagcgtgggaatgttccgccgaggttggagacactgcgtttcgaggttagtgggcaggggaggacaagaatgggtataggcagacttacgttgcgagcagagtcatgtaagtgccaccaatgacgggatcagcaactttagcgtggaacgcagagacggccacaaacatgacggtgttggtgaaggtcgagaagacgtgttcgccgatgacgagaagcatgtaccacgattggacaccgtcagcggggaaaatagcaacggtgaattgagcgatgatagcagcgacgagccgccccatgaaaccccagcaccagaggcgcatgggcgagtattcctgtgaccatttccctgcgtagtagcctagaccgatctcgaaggggaaatcgatgagtactgtgagggccatgttctcttttccgaagcccttctctagaagcttgaggtttgtcactccgtcgttggcttggaagccgattttggcgatcaggtggacgataatgatggtttgaatattcttcagcttcagcacatcccacataatcttgtagacatcccagatcccgtcctcgttctgtgtcctctcctcctttttcagcagcgcaagaccaacagtgatggcgatgtaagtccagccccaaaaggtcagatagccgccaagatccattagacctccctcggctggcacagagcgccagtacttgttcgcgaagtcctcagagttgaaagccaggaacacagtgtacgacaagaagtggccagccgtgagaccgacagtctgcgccgtcgaagcataagacacgtttccgggcgtgagcaaggtcaatgcccagccatcgacggcgatatcctgcgtggcgcacatgaagacgaggaagaaccaccagcccgtgaagccccagacagtcgggccacctgctttgcccgtggtcgccatcagagtctcgatcttgccaccgagccacaacatgctgaggccagaaatcaactgtatgggcagaatccagctctttctcctgcccagcttcggcgtccatacggcgtcgacaattgggctccaaaataacttcaaagagtatggatatgaggccaagctgaagacaccgatctcgccaaacgacaggtgttctttcaagaggaagggcacggagccggtcgcgaggcccatgggcacgccctggaggaagtacagcaggaccagcagcatgaagttgcgctggtcggagcggggcagctcgaagaagccatggttgttggcgaggggcgtcttgggcacctcgttgtccagggtgaaggagtcgcgggagacgaggttggccgtgagcgacgccgagtcctggggcgccgtgttcttgcgccgcagctcgacttggctcatggtgccggtgccggtgccgttgggcagttggtcgggagcactgcctgtcgtggtcgagacggacagcttgtctcggtccgggtggtttgaccgacgagttttagcacccattcggatctgtggtgatgggggagaggaggagggtgagttagaggcaaggagggatcgcacagagttcgcacgggggcgttggaaatgttggaaaggcgcgaacgcggtagcgcaaccgctatctgggacagtctcgaccgcaggatcaagggagtaagggtacagagctgggcgagactacccaaggttcgcagggtgggctgcaggttgctcaggtacgaaaggtaaaggaagctagatgaaggtcgggtcagcccctcgtacagtgcaacgaggggtcggatgaggtaagttgtaacttgttggtatgaaacagtaataagagcacaaagagtcaaagatcgactgggataagaccaaaagataagacccgagctgttgggagttgccctatttccaacgtgaggcagggttgtttttatgcaggtaattcttagagaacaaatgaatgggatatgacaagtggccttggctcttgagtaatgacagacagtggtggactacctactaacgcgtgaaagaaggcctgacaaatccagaattgagtgtaacggcaattggtgccttacaacgacatcgagaacgcgtggggaatgcaaagcgaaacgagtcaaggcttgatgccagatactcgcatttcatttcacgatcccaaggccaactagaactcgagaagtgttctcacattagcgccgaatgtggaaggcaaatagtcaatagacgattg

SEQ ID NO: 5185 - DNA, 252 bp, Muscodor strobelii
  misc_feature: SGI cDNA ID NO. 561438
  misc_feature: Encodes the peptide sequence at SEQ ID NO 5186
atgggtaaagtccacggatctctcgcacgggctggcaaagttaagagtcagacccctaaggtcgacaagcaagagaaggctaaggtccccaagggccgcgccaagaagagacttcaatacaccagacgtttcgtcaacgtcaccctcaccggtggcaagagaaaggtaagctactatcaaagcatctcccaatactacatcaagcagggcctaacactacattacaagatgaaccccaaccccggctcataa

SEQ ID NO: 5186 - protein, 83 aa, Muscodor strobelii
  misc_feature: SGI Peptide ID NO. 561438
  misc_feature (3)..(61): Pfam Id: PF04758 Pfam Desc: Ribosomal protein S30
  misc_feature (1)..(83): NCBI GI: 46120536 Blast Desc: FG04915.1 [Gibberella zeae PH-1]
  misc_feature (1)..(83): NCBI GI: 256735608 Blast Desc: [Nectria haematococca mpVI 77-13-4]
  misc_feature (1)..(83): NCBI GI: 85115620 Blast Desc: 40S ribosomal protein S30 [Neurospora crassa OR74A] gi|28926703|gb|EAA35670.1| 40S ribosomal protein S30 [Neurospora crassa OR74A]
  misc_feature (1)..(83): NCBI GI: 116193545 Blast Desc: CHGG_06490 [Chaetomium globosum CBS 148.51] gi|88182403|gb|EAQ89871.1| CHGG_06490 [Chaetomium globosum CBS 148.51]
  misc_feature (1)..(83): NCBI GI: 225558005 Blast Desc: HCBG_05606 [Ajellomyces capsulatus G186AR]
  misc_feature (1)..(57): NCBI GI: 225678098 Blast Desc: [Paracoccidioides brasiliensis Pb03]
  misc_feature (1)..(57): NCBI GI: 226280317 Blast Desc: PAAG_00206 [Paracoccidioides brasiliensis Pb01]
  misc_feature (1)..(83): NCBI GI: 119181539 Blast Desc: [Coccidioides immitis RS] gi|154280517|ref|XP_001541071.1| [Ajellomyces capsulatus NAm1] gi|150411250|gb|EDN06638.1| [Ajellomyces capsulatus NAm1] 40S
  misc_feature (1)..(83): NCBI GI: 212536889 Blast Desc: ribosomal S30/ubiquitin fusion [Penicillium marneffei ATCC 18224] gi|210068342|gb|EEA22433.1| ribosomal S30/ubiquitin fusion [Penicillium marneffei ATCC 18224]
  misc_feature (1)..(57): NCBI GI: 171685003 Blast Desc: protein product [Podospora anserina] gi|170942462|emb|CAP68114.1| protein product [Podospora anserina]
MGKVHGSLARAGKVKSQTPKVDKQEKAKVPKGRAKKRLQYTRRFVNVTLTGGKRKVSYYQSISQYYIKQGLTLHYKMNPNPGS

SEQ ID NO: 5187 - DNA, 986 bp, Muscodor strobelii
  misc_feature: SGI EST ID NO. CUFF.13213.0
  misc_feature: Variant of the nucleotide sequence at SEQ ID NO 5185
tgcaccttccgcaatctcggggaaagagtcatcgatccaaagtagcgaacatcacatgacctggatggggcaattagcgcccaccaactacgcacacttctgctcacccactccccaaacccagaaaagcccttccaaccatcccgtcgcctcccgcatcttcgcacccacgacaacaccgcccatcaatcacacgacaactcctaaaccgtcatcatgggtaaagtccacggatctctcgcacgggctggcaaagttaagagtcagacccctaaggtcgacaagcaagagaaggctaaggtccccaagggccgcgccaagaagagacttcaatacaccagacgtttcgtcaacgtcaccctcaccggtggcaagagaaagatgaaccccaaccccggctcataaacgccatgccgttacttgatttcgcgagagcagccaacgacacgagtctgaaggatatggatggcgatggacgggcaaccacactagcgatatcgatcatcactatgctctgagcgtccactctccgggcttgtgtcaggcaatcgttatgcacgactctgctctatttgtctacgcagtgacgaatggattatatgatcatggtgggattcaaaccgcaaaatgctttgttttccggagtcatagggggcatcattcagggctggtcaatagtcaccaagtgcctgaagcagtctgtagctatgtagcagatattgcctggctgggctgttaccagaaacgtctttcttaggtcttgacgattctctcctgtgctatttccggacggtttgtaatgtaatgcagttccatgatgaggcacatgccattacattcgtagttccttacctttactgcactaggtactcctttgcccccgcgccggcagcctactatcaaaataaatgacacacttagctttgcatatttaaccaacatatgtctagtcgcaccagcaacataattcgaaaacataatgtatg

SEQ ID NO: 5188 - DNA, 552 bp, Muscodor strobelii
  misc_feature: SGI cDNA ID NO. 561439
  misc_feature: Encodes the peptide sequence at SEQ ID NO 5189
atgaataaaacgagaaaacgcattatcgtcggaatgtttgtcgtcggtggacttgcgacagctgcgagctttgcacggctcattggtgttatacttgcggcggttaatcctgaaatcacggatccaaccattaggatactgcttttctcagcattggacatagagatttataccgcgattatcggagcatgtcttccaatcatgggaccgatctataagaaaatcaccggccagtcgatagcaggatacacgcaagagtcgccgatactatctgatggtggaacgaggacgggcgggcgcaggtcaagactttctgagacaatatcacgtactctcagatcgtctccgagggaaacccaggccaatgagaacgaagcccggtttcgaagactctgcgaggacgatacgccaattctggttcctgcaaaagagcggctggaacgcagcacctatatcacgagcagcaataaaggatcgaaagcgaattcgtcggaagccgatctaataccgctcgagggcattttggtccagcacgatgtgaagtgggaatga

SEQ ID NO: 5189 - protein, 183 aa, Muscodor strobelii
  misc_feature: SGI Peptide ID NO. 561439
  misc_feature (3)..(183): NCBI GI: 46114988 Blast Desc: FG03336.1 [Gibberella zeae PH-1]
  misc_feature (11)..(124): NCBI GI: 154300400 Blast Desc: BC1G_11389 [Botryotinia fuckeliana B05.10] gi|150856712|gb|EDN31904.1| BC1G_11389 [Botryotinia fuckeliana B05.10]
  misc_feature (2)..(131): NCBI GI: 145236936 Blast Desc: An07g00220 [Aspergillus niger] gi|134075580|emb|CAK39246.1| protein product [Aspergillus niger]
  misc_feature (3)..(182): NCBI GI: 256720423 Blast Desc: NECHADRAFT_98298 [Nectria haematococca mpVI 77-13-4]
  misc_feature (5)..(183): NCBI GI: 238491120 Blast Desc: integral membrane protein Pth11-like, [Aspergillus flavus NRRL3357] gi|220697210|gb|EED53551.1| integral membrane protein Pth11-like, [Aspergillus flavus NRRL3357]
MNKTRKRIIVGMFVVGGLATAASFARLIGVILAAVNPEITDPTIRILLFSALDIEIYTAIIGACLPIMGPIYKKITGQSIAGYTQESPILSDGGTRTGGRRSRLSETISRTLRSSPRETQANENEARFRRLCEDDTPILVPAKERLERSTYITSSNKGSKANSSEADLIPLEGILVQHDVKWE

SEQ ID NO: 5190 - DNA, 1824 bp, Muscodor strobelii
  misc_feature: SGI cDNA ID NO. 561440
  misc_feature: Encodes the peptide sequence at SEQ ID NO 5191
atgtattcctcgaagacactaccgggcataacagcagcaattttgattgctacttcgactgcttcaactattcaagtttctaaccagttactcagttattgtccgcctctcggagcggtccttccaccgccgaagaacgcatcgacccaccctgcagttcagcaagtcgttcaacaagcccaaggtcttgtatcagagctcggacaacttcttggaaatgcaactgggctgtctctcggcatcgcttctgtccacgaagatgcttccttgctgaatgtcgcttatactcctaccgtatataatgacactggcgtctcgaaagttgatggagataccgtcttcaggatcggaagcgtgagcaaggtattcacggttatgggcctgctgctacttagcgacaaaataaacttggcggattcgatcaccaaatatgttccggagctcaatgatctgaagaaacagcaggatgtcatcagtccagtcacgacagtaaactgggatgcgataagtcttgatgccatggccgctcagctggcgggtgttggatacgacttgggaaacgattatggcaatgacccgagtctaaatctgacgaaatacggattacctgccctgacagaagatgaacattcgggatgtggcgccactccatctaacaggccatgtacttgggacgacttctggcaaaaattcggcaagcgatccccggtatacggcccatatacaacaccagcttacagcaatatccattatgacctccttggtcttgtcatcgagcgagtttcgagtcaatcgtacgcggactatatccaagagagcattttgacaccactcaatatgactcgcacattcttgaccaaacccgatgatgatagcattggcttcatctcaggagaagagaatttctggagcaccgactacgggtttctccaagccgatggcggtctctactcaagttccaacgatcttctgaagctcggccaaggtatccttgggcacaaattgctcgatgaagttacaactcgagcttggttaaagcctcgcagccatacatcgtccctaggtatatctgttggatcaccgtgggagatcgggcggtcgtataatctgactaaggacggtcgcttgattgacgtctactccaagaacggaggcataccagattataacgcgatcttcatcctcattcccgactacgatattgtcgcatcgattgtctcagctggccctgcatccagtctgagcggacagctagagattgctacaattgggctcgagtcattcattccagccgttgaagctgctggcaagtccgaggcagacgctttatatgcaggaacttacacagatgaagctagcgacagtagtatcacaattgcaattgacgatgggcctggccttgtcgtcaagaactggaccgcaaatgggctcaatgttttcgagacattccctatcatatcatcacttcgcgctgagggtactgcccagggccagcaatccgactatttatctattcgcctgtaccccacgggtttgcagagcaacaatgagtcggcatggcgagcggtttttgataccacatctccaagtgtggtggagcagtctagccagctattcattatccaacctagctgtcagacttgggccctcatcgacaactccgtttatggaatgcgcggatttgatgacttcgtgtttggcatcgacgactgcactggaaaggcaacgacggtatctccaagggcttggcgacagactttggccagggaacaaaagacgaccagcaatgcgaaacagcatgttccgtggacaatattaaactaa

SEQ ID NO: 5191 - protein, 607 aa, Muscodor strobelii
  misc_feature: SGI Peptide ID NO. 561440
  misc_feature (60)..(428): Pfam Id: PF00144 Pfam Desc: Beta-lactamase
  misc_feature (107)..(428): Pfam Id: PF00144 Pfam Desc: Beta-lactamase
  misc_feature (32)..(589): NCBI GI: 256731527 Blast Desc: NECHADRAFT_48476 [Nectria haematococca mpVI 77-13-4]
  misc_feature (12)..(590): NCBI GI: 145604308 Blast Desc: MGG_08486 [Magnaporthe grisea 70-15] gi|145012325|gb|EDJ96981.1| MGG_08486 [Magnaporthe grisea 70-15]
  misc_feature (73)..(592): NCBI GI: 171676463 Blast Desc: protein product [Podospora anserina] gi|170936298|emb|CAP60956.1| protein product [Podospora anserina]
  misc_feature (34)..(597): NCBI GI: 256722502 Blast Desc: NECHADRAFT_34940 [Nectria haematococca mpVI 77-13-4]
  misc_feature (34)..(594): NCBI GI: 46127517 Blast Desc: FG08136.1 [Gibberella zeae PH-1]
  misc_feature (1)..(569): NCBI GI: 145616589 Blast Desc: MGG_14291 [Magnaporthe grisea 70-15] gi|145009406|gb|EDJ94106.1| MGG_14291 [Magnaporthe grisea 70-15]
  misc_feature (75)..(566): NCBI GI: 46134007 Blast Desc: FG09143.1 [Gibberella zeae PH-1]
  misc_feature (37)..(589): NCBI GI: 242811610 Blast Desc: penicillin-binding protein, [Talaromyces stipitatus ATCC 10500] gi|218714124|gb|EED13547.1| penicillin-binding protein, [Talaromyces stipitatus ATCC 10500]
  misc_feature (34)..(592): NCBI GI: 256721673 Blast Desc: NECHADRAFT_44782 [Nectria haematococca mpVI 77-13-4]
  misc_feature (34)..(589): NCBI GI: 169765968 Blast Desc: [Aspergillus oryzae RIB40] gi|83765310|dbj|BAE55453.1| protein product [Aspergillus oryzae]
MYSSKTLPGITAAILIATSTASTIQVSNQLLSYCPPLGAVLPPPKNASTHPAVQQVVQQAQGLVSELGQLLGNATGLSLGIASVHEDASLLNVAYTPTVYNDTGVSKVDGDTVFRIGSVSKVFTVMGLLLLSDKINLADSITKYVPELNDLKKQQDVISPVTTVNWDAISLDAMAAQLAGVGYDLGNDYGNDPSLNLTKYGLPALTEDEHSGCGATPSNRPCTWDDFWQKFGKRSPVYGPYTTPAYSNIHYDLLGLVIERVSSQSYADYIQESILTPLNMTRTFLTKPDDDSIGFISGEENFWSTDYGFLQADGGLYSSSNDLLKLGQGILGHKLLDEVTTRAWLKPRSHTSSLGISVGSPWEIGRSYNLTKDGRLIDVYSKNGGIPDYNAIFILIPDYDIVASIVSAGPASSLSGQLEIATIGLESFIPAVEAAGKSEADALYAGTYTDEASDSSITIAIDDGPGLVVKNWTANGLNVFETFPIISSLRAEGTAQGQQSDYLSIRLYPTGLQSNNESAWRAVFDTTSPSVVEQSSQLFIIQPSCQTWALIDNSVYGMRGFDDFVFGIDDCTGKATTVSPRAWRQTLAREQKTTSNAKQHVPWTILN

SEQ ID NO: 5192 - DNA, 2865 bp, Muscodor strobelii
  misc_feature: SGI cDNA ID NO. 561441
  misc_feature: Encodes the peptide sequence at SEQ ID NO 5193
atgaacccgacgataacagagcacgactggcggttccccagaaggcccttcgggccagctgcgggcgaggatgggaagaaagaagaggcaagccccggcgacttgcgcatgcgagagctgaacctagatattacaaaatcaagcagcgcgatgcaaagcgatctgtttgatatgtcgctattccctcacctcaagaatgacatgtccggcgatactgtagaggagatgcaagccaaggatccattggctgtacaggtatggaggttttacagcaagacgaagcagaatctgccgagacatgagcgcatggagaatttcacatggcgaatgatgcatgtcaatcttcaaaaacaccgataccagcaagaacagtcacggaatgacgagcgcatccctgcgcatggcgaatcggctcataacccaacttctatttcaaatgaccacagcgccccgaataccgattccactacttcctcttccacccgtcacgatactcacgcagcagtgagcgctggtaatgcaccgagtggtattgcccaactcagaaaagcgaacgatcaaaatgcgcctcaatcggatcccatgaatctcgacgacttcattttccccgataatgtggctacgcctgtcggcttgacaccgtcacctgagacagtcaaacaggataatgacaagacagctaacaatgttgctgccgctattcctatcaaatcccgcaagacatcgacacagcactttgttcctcaatccgtacccgtacctcctcatcagcgaaatcaagatgaattcggttatgtcactcgccatcatcgcaaaaccagcatcgacgaccgacgcactcgtaacttgaagcgcccagcaaacttctctccccatgtctctgctttgaatagtagttctgccaatggcaatgagctagatgccgactctgatcttcatgattatagtctcgacatacctaacattaacgcgaaccctcatgtaccccaacagccttcaaataatacattttctcttgatgccttccaaatcgaaaatgagcctattctcacatccgcgggcccattccagcagaattttatgttctcgccttctacttcacccatggtgactcatggtcctttctctaatgtttatgggcagcacggaagtgcagtcaatggcaatgaatactactcgcccccagggtctgcttttcagtccgcagtatctacgccacatcccatggccgaaaacgaaagcatgtttttcgggtcccatcaacgacaacaaagctttcgccagcctccgggctcatttggaaacccaattggccaccactacatgtatcctcctaatggttcctctgcgtttccttccacaaccggtggtgatacaccttccgccttctctgcatctgcccccagctttgggcatattgatcctagccaagtgtttcaacacgatcacccagctcgttctcctggcattgggatgatgcatgacaatatgttttcattcggtgccgactcggataatgaagaggatgagggtggtgcatttgcagatcgtaacatgagcatgaattcgggtctttcgccaagcgatgacactgggatggatatgaacagtggcaacacgttgggatgggacgccagccttcccggtcaattcagcactcacgcagcgcgatacccaggaggcccgccgcggaaacaggttacaatcggaggagccacgacagattatgttgatagtggcgattggaacggtccgggtggcctaccgcgctcccagtcatttcgcaatatgggagataaacggcaaaaaattccgcgcaatgcttcgacgccaatgggtggtagtggtaacccattcgaaagaatggcccaatccaacccaagctctccaccggctgacggagctgggtcgctgtcgggcttttcctctgttgcacccagccgtcctgcatcaccccccggctcgaagcatggctccacgagcaatttgcaggcagccggcggacagggcgacgggaatgctccaacaacttgtaccaactgttttacgcagacgacgccactatggcgacgcaatcctgaagggcaaccgctttgcaatgcttgtggcttgttcctgaaactgcacggtgttgtgagaccactgagtttgaagactgatgtcatcaagaagcgcaatcgtgggtcaggcacaagtcttcctgtaggtggcagcagcactcgatctaagaaaggtggcaacaacgcatctggtaccacttcggggcctgcatcacgcaaaaactcgacattggctatatccacctctagcagcagcgcgcaagtaacgaccccaccctctacaaaccgagctggcagtgtcaatgagggcgagagtccagccagtgctgggggatctggtggtaacaccgcaggcagtacccctagctatgcgggctcgacatcgggcgctgtcggaggcaagggtgtcgttccgattgcggcggctcctcccaagaacactcctgggccgggagcggcgtccgttcctcgcaacattgctgctgcttctggctcttccaaacgacaacgtcgcagcagtaaaagcactactgctttaaccgagcccgttggtggaatggatgttgatagccccgagaactccactggttcgaatgaggcggcacgctccgtcggttcgcctggtggatttatgccaatgcaaacatcgaccaaccttggcgtggctcccaacttcggtatgacacaacgacctatgatgagctcaggtatgatggggatgactggtcctggccctaacagtatgatgggtcccggctcgggtaatggccctcaggaatgggagtggctgaccatgagtctctaa

SEQ ID NO: 5193 - protein, 954 aa, Muscodor strobelii
  misc_feature: SGI Peptide ID NO. 561441
  misc_feature (678)..(712): Pfam Id: PF00320 Pfam Desc: GATA zinc finger
  misc_feature (1)..(954): NCBI GI: 25136582 Blast Desc: major nitrogen regulatory protein [Glomerella lindemuthiana]
  misc_feature (52)..(954): NCBI GI: 261353208 Blast Desc: nitrogen regulatory protein areA [Verticillium albo-atrum VaMs.102]
  misc_feature (6)..(954): NCBI GI: 154302551 Blast Desc: BC1G_09852 [Botryotinia fuckeliana B05.10] gi|150855341|gb|EDN30533.1| BC1G_09852 [Botryotinia fuckeliana B05.10]
  misc_feature (1)..(954): NCBI GI: 3182920 Blast Desc: AREA_GIBFU RecName: Full=Nitrogen regulatory protein areA gi|1834451|emb|CAA71897.1| AREA [Gibberella fujikuroi]
  misc_feature (1)..(954): NCBI GI: 46128513 Blast Desc: AREA_GIBFU Nitrogen regulatory protein areA [Gibberella zeae PH-1]
  misc_feature (59)..(954): NCBI GI: 89078359 Blast Desc: GATA transcription factor FNR1 [Fusarium oxysporum f. sp. lycopersici]
  misc_feature (1)..(954): NCBI GI: 116193523 Blast Desc: CHGG_06479 [Chaetomium globosum CBS 148.51] gi|88182392|gb|EAQ89860.1| CHGG_06479 [Chaetomium globosum CBS 148.51]
  misc_feature (59)..(954): NCBI GI: 256734147 Blast Desc: NECHADRAFT_59326 [Nectria haematococca mpVI 77-13-4]
  misc_feature (47)..(954): NCBI GI: 1107471 Blast Desc: nitrogen catabolic enzyme regulatory protein [Neurospora crassa]
  misc_feature (47)..(954): NCBI GI: 166214957 Blast Desc: nitrogen catabolic enzyme regulatory protein [Neurospora crassa]
MNPTITEHDWRFPRRPFGPAAGEDGKKEEASPGDLRMRELNLDITKSSSAMQSDLFDMSLFPHLKNDMSGDTVEEMQAKDPLAVQVWRFYSKTKQNLPRHERMENFTWRMMHVNLQKHRYQQEQSRNDERIPAHGESAHNPTSISNDHSAPNTDSTTSSSTRHDTHAAVSAGNAPSGIAQLRKANDQNAPQSDPMNLDDFIFPDNVATPVGLTPSPETVKQDNDKTANNVAAAIPIKSRKTSTQHFVPQSVPVPPHQRNQDEFGYVTRHHRKTSIDDRRTRNLKRPANFSPHVSALNSSSANGNELDADSDLHDYSLDIPNINANPHVPQQPSNNTFSLDAFQIENEPILTSAGPFQQNFMFSPSTSPMVTHGPFSNVYGQHGSAVNGNEYYSPPGSAFQSAVSTPHPMAENESMFFGSHQRQQSFRQPPGSFGNPIGHHYMYPPNGSSAFPSTTGGDTPSAFSASAPSFGHIDPSQVFQHDHPARSPGIGMMHDNMFSFGADSDNEEDEGGAFADRNMSMNSGLSPSDDTGMDMNSGNTLGWDASLPGQFSTHAARYPGGPPRKQVTIGGATTDYVDSGDWNGPGGLPRSQSFRNMGDKRQKIPRNASTPMGGSGNPFERMAQSNPSSPPADGAGSLSGFSSVAPSRPASPPGSKHGSTSNLQAAGGQGDGNAPTTCTNCFTQTTPLWRRNPEGQPLCNACGLFLKLHGVVRPLSLKTDVIKKRNRGSGTSLPVGGSSTRSKKGGNNASGTTSGPASRKNSTLAISTSSSSAQVTTPPSTNRAGSVNEGESPASAGGSGGNTAGSTPSYAGSTSGAVGGKGVVPIAAAPPKNTPGPGAASVPRNIAAASGSSKRQRRSSKSTTALTEPVGGMDVDSPENSTGSNEAARSVGSPGGFMPMQTSTNLGVAPNFGMTQRPMMSSGMMGMTGPGPNSMMGPGSGNGPQEWEWLTMSL

SEQ ID NO: 5194 - DNA, 4409 bp, Muscodor strobelii
  misc_feature: SGI EST ID NO. CUFF.13499.1
  misc_feature: Variant of the nucleotide sequence at SEQ ID NO 5192
ggaaccagggatctgggctacggaatcagagttggatgaaactttttctcttgcgaatcactactccggctagttcatgatagtgtcccagcctattctctgccctgtcgcttctcgccctagcccttaaactactatctcccaagtggcccctttcacgagggaattgcgcaagatatgagcgcgcgtcttttgctaggcgttgcgggtagagggactgaagttcacgaagagaatgcccacggcgtagtactgtacatcccgtgtcccctgctcagtgaccctgtccgccaccaccacggcatccacccacatccatgcctcccagccgaacccgatccaaactgcctggtcagtctcgactctcgtcacttgcaagttgcccacccacacgacctgctcacgcaccctgcttgcagccgccgggggtctctgctgccgactctgttgctactacggtgctgctaatgctcctccacccaccacagcttggccactctcacaacgagaggggacgggaacaatacctctccaattactactactacatcattcatattcatccaatcttttcatgctccggtctagatacaaacgtatcatggacggcctgatggtttaaatcttcgaagctgccgcccggttatctttgcttgtgataagtcgcggtattttaaagcctttagaggtaaactcagaccagccattttcccgctcgagtggccgaagagcggctgccagccgaaccttaacccaggaacgtggggactctggttgaccggtcacacaagaccagcagagcagagcacccgtcaaccacccattcgcccgcgcgcaagcggagtaggggaatatctcgtcttttcccaacttaaacgacacttacgctgtcaccacggccactccaaattcctcgcagtagcgatcgcagattcacagagcaaacatgaacccgacgataacagagcacgactggcggttccccagaaggcccttcgggccagctgcgggcgaggatgggaagaaagaagaggcaagccccggcgacttgcgcatgcgagagctgaacctagatattacaaaatcaagcagcgcgatgcaaagcgatctgtttgatatgtcgctattccctcacctcaagaatgacatgtccggcgatactgtagaggagatgcaagccaaggatccattggctgtacaggtatggaggttttacagcaagacgaagcagaatctgccgagacatgagcgcatggagaatttcacatggcgaatgatgcatgtcaatcttcaaaaacaccgataccagcaagaacagtcacggaatgacgagcgcatccctgcgcatggcgaatcggctcataacccaacttctatttcaaatgaccacagcgccccgaataccgattccactacttcctcttccacccgtcacgatactcacgcagcagtgagcgctggtaatgcaccgagtggtattgcccaactcagaaaagcgaacgatcaaaatgcgcctcaatcggatcccatgaatctcgacgacttcattttccccgataatgtggctacgcctgtcggcttgacaccgtcacctgagacagtcaaacaggataatgacaagacagctaacaatgttgctgccgctattcctatcaaatcccgcaagacatcgacacagcactttgttcctcaatccgtacccgtacctcctcatcagcgaaatcaagatgaattcggttatgtcactcgccatcatcgcaaaaccagcatcgacgaccgacgcactcgtaacttgaagcgcccagcaaacttctctccccatgtctctgctttgaatagtagttctgccaatggcaatgagctagatgccgactctgatcttcatgattatagtctcgacatacctaacattaacgcgaaccctcatgtaccccaacagccttcaaataatacattttctcttgatgccttccaaatcgaaaatgagcctattctcacatccgcgggcccattccagcagaattttatgttctcgccttctacttcacccatggtgactcatggtcctttctctaatgtttatgggcagcacggaagtgcagtcaatggcaatgaatactactcgcccccagggtctgcttttcagtccgcagtatctacgccacatcccatggccgaaaacgaaagcatgtttttcgggtcccatcaacgacaacaaagctttcgccagcctccgggctcatttggaaacccaattggccaccactacatgtatcctcctaatggttcctctgcgtttccttccacaaccggtggtgatacaccttccgccttctctgcatctgcccccagctttgggcatattgatcctagccaagtgtttcaacacgatcacccagctcgttctcctggcattgggatgatgcatgacaatatgttttcattcggtgccgactcggataatgaagaggatgagggtggtgcatttgcagatcgtaacatgagcatgaattcgggtctttcgccaagcgatgacactgggatggatatgaacagtggcaacacgttgggatgggacgccagccttcccggtcaattcagcactcacgcagcgcgatacccaggaggcccgccgcggaaacaggttacaatcggaggagccacgacagattatgttgatagtggcgattggaacggtccgggtggcctaccgcgctcccagtcatttcgcaatatgggagataaacggcaaaaaattccgcgcaatgcttcgacgccaatgggtggtagtggtaacccattcgaaagaatggcccaatccaacccaagctctccaccggctgacggagctgggtcgctgtcgggcttttcctctgttgcacccagccgtcctgcatcaccccccggctcgaagcatggctccacgagcaatttgcaggcagccggcggacagggcgacgggaatgctccaacaacttgtaccaactgttttacgcagacgacgccactatggcgacgcaatcctgaagggcaaccgctttgcaatgcttgtggcttgttcctgaaactgcacggtgttgtgagaccactgagtttgaagactgatgtcatcaagaagcgcaatcgtgggtcaggcacaagtcttcctgtaggtggcagcagcactcgatctaagaaaggtggcaacaacgcatctggtaccacttcggggcctgcatcacgcaaaaactcgacattggctatatccacctctagcagcagcgcgcaagtaacgaccccaccctctacaaaccgagctggcagtgtcaatgagggcgagagtccagccagtgctgggggatctggtggtaacaccgcaggcagtacccctagctatgcgggctcgacatcgggcgctgtcggaggcaagggtgtcgttccgattgcggcggctcctcccaagaacactcctgggccgggagcggcgtccgttcctcgcaacattgctgctgcttctggctcttccaaacgacaacgtcgcagcagtaaaagcactactgctttaaccgagcccgttggtggaatggatgttgatagccccgagaactccactggttcgaatgaggcggcacgctccgtcggttcgcctggtggatttatgccaatgcaaacatcgaccaaccttggcgtggctcccaacttcggtatgacacaacgacctatgatgagctcaggtatgatggggatgactggtcctggccctaacagtatgatgggtcccggctcgggtaatggccctcaggaatgggagtggctgaccatgagtctctaatatggccacttcgcgattcgagatgaaactagaagtctacgcacttcgaaataagtgtttatgactccaatactgcatccttcaggcacttatagagggaatattgaacatttactggttggtgcggagtaaagacttggcactgcggctggacatgggatgattcacgatggcatgctacacatagtacggcgttctcccgatgttcttctattttttgataccatgacctgtgttcaccacgggctttcttctgcgatcttactcggatatatgatatatgggatatcgccctggatactacactattccgatctaatgagatttgatgctgtagagtagtaatacaagccatcaatagagcacatacgtgtatcgtcattcatcattcatcattgtaatgtccagtagtcatcttgttgccaattcgatcatgtgtgacgtaagaccacattcctcgtaccaattgaaacttcattacattggccagaaccgcgacgcctgaaagcgacacagttgtgggtgcagtctgctttgatatatgctcacttcgattttcgagtgccttttcgtcatgttcactgtcaattgagttccg

SEQ ID NO: 5195 - DNA, 894 bp, Muscodor strobelii
  misc_feature: SGI cDNA ID NO. 561442
  misc_feature: Encodes the peptide sequence at SEQ ID NO 5196
atgaagtctttcgctgctatcgccgctattgccccaacgctcgcttcggcgcagcagtggtggaatggtgctcctgaatgtgcccaatcttgcctatcatcagcatacctgaccccctccggcagcgtaacatcctggtggccccaacaatcagagtactgcgactctgacaagggaaaatcagtcaacgactgcatcaacaacggctgctcgggcacatcgacagtctcagcatcttacagctctctatcctcgtctctctgctcaagatacgcatcctgcacgaacgcaggcagcacaggagtccagaccatcacctaccccggcggacccgtgacctgggccgcgccgggcggctggggaaacttcttcggtggtagcggtcctggtggttggggcggtcccggaaatgccggacaatggggcggtagcaataacaccgcttactccgcatattggtctgagtgggcctccgcggcctcgggctccgttacatggacaggtggcgtcgcaacagtgacaggctgtgcctttgaaggctcgccgtggttcgtcgggccgaactgcggatggaatggacagggtggcttcaatggctgggttggctggggcgatggctggtcttggggacctacttcgactcaggttgtcactgttacgtccttgaatagtgctgggtctcaggtcacgcagactggatctgcgactgttgctgttgctgtcagtggcacgctgactaccagtagtattattggacagcttgctgttgagacggggagtagcgctgctgctgctttgcccagggtcgctggacctggtgctgaggggagtgtggtcacggttttccttggtgtggctttgggtgttgttgttgctgttgctgggttgctttaa

SEQ ID NO: 5196 - protein, 297 aa, Muscodor strobelii
  misc_feature: SGI Peptide ID NO. 561442
  misc_feature (47)..(297): NCBI GI: 171684883 Blast Desc: protein product [Podospora anserina] gi|170942402|emb|CAP68054.1| protein product [Podospora anserina]
  misc_feature (9)..(242): NCBI GI: 85115544 Blast Desc: NCU09072 [Neurospora crassa OR74A] gi|28926686|gb|EAA35653.1| [Neurospora crassa OR74A]
  misc_feature (1)..(106): NCBI GI: 39970579 Blast Desc: MGG_02756 [Magnaporthe grisea 70-15] gi|149210047|ref|XP_001522398.1| MGCH7_ch7g505 [Magnaporthe grisea 70-15] gi|86196460|gb|EAQ71098.1| MGCH7_ch7g505 grisea
  misc_feature (39)..(209): NCBI GI: 116193525 Blast Desc: [Chaetomium globosum CBS 148.51] gi|88182393|gb|EAQ89861.1| [Chaetomium globosum CBS 148.51]
MKSFAAIAAIAPTLASAQQWWNGAPECAQSCLSSAYLTPSGSVTSWWPQQSEYCDSDKGKSVNDCINNGCSGTSTVSASYSSLSSSLCSRYASCTNAGSTGVQTITYPGGPVTWAAPGGWGNFFGGSGPGGWGGPGNAGQWGGSNNTAYSAYWSEWASAASGSVTWTGGVATVTGCAFEGSPWFVGPNCGWNGQGGFNGWVGWGDGWSWGPTSTQVVTVTSLNSAGSQVTQTGSATVAVAVSGTLTTSSIIGQLAVETGSSAAAALPRVAGPGAEGSVVTVFLGVALGVVVAVAGLL

SEQ ID NO: 5197 - DNA, 2046 bp, Muscodor strobelii
  misc_feature: SGI cDNA ID NO. 561443
  misc_feature: Encodes the peptide sequence at SEQ ID NO 5198
atggcgagctttatctcgggcatcttcaactcctcgcaggggcccaaggacctcaagtctcctgcctcggagagccgccctaaaaccccgaacaaaatcaccaccaactccttcatcgagcctgttgccacgccccaaggcagccccagcaagaagaccaaacctcccggtgcccacgacctgccaggtgcccatgatctacccaacaccttcgacaatgccctcaggctcaaccctcccgtccttgagagccccgtcaagctcggcaggccgcaaagcagcggcagcccgctctcccctacaaaaggcaacgcccagtccctcgacgatgactatttcggcaccccttcctcctccactgtcatcgaggagagtatcatacacaagactgccccgctgcccgagagcccgaccaagaagcaaggccaggagaacaaccctcccgctcgatcctcccgcatacctatgcccaatctgagccaggccgccctgtcacggcaagagctctaccagcgagacagcagacctcatacacccgccggtcctgccaccaccaacaagaagttcaacacgtccaaaggcttgactcccgaagagatggagatcctcaagaaaccctccgtccgtcggctggtcaatgtcactcagctctattttctagattactactttgatcttctgacctacgtgggctcgagacaggccaggctagacgcttttaaggccgatgtcccagccccgcccgagacctcccaggaagagtacgatcagctgtggcacaagtataccggaagggaacgtgccgctttgcgcaagcgacgagtccgccttcgtcacggcgatttccagattcttacccaagtcggccagggtggctatggtcaagtcttccttgcacagaagaaggacaccaaggaagtatgtgccctaaaagtcatgagcaaaaagctgctcttcaaactggacgaggttcgccatgtcttgaccgagcgcgatattctcacaacggccaacagcgagtggctggtcagactcctgtactcattccaagacgacaagagtatttatcttgccatggaatatgtgcctggaggtgatttcagaacactcctcaacaacaccggcgtcttgtccaatcgccatgctcgcttctacatcgccgagatgttttgctccgtcgatgccctccacaagcttggttatatccatcgcgacttgaagcccgagaatttcctcgtcgattcgaccggccacgtcaagttgacagactttggcttggccgctggtaatgtcgcttcgtccaagatcaactcgatgcgcgccagactcgagaaggcctccgagacgagtgtgccctttggtaaggccatgggtgacagaacattagaggagcgccgtgagggttaccagacgatgcgtgagcaggatgtcaactacgccaagtccatagtaggatctcctgactacatggcacccgaagttcttcgaggtgacgagtacgatttcactgtggattactggagcttgggctgcatgttgttcgaggccctcaccggcttcccgcccttcgctggttccacctcagaagagacatggcgaaatctcaagtactggcgagacgtgttgaagagacccgtctgggaggatcccaattactttttgagcaatcgtacctgggatttcatcacaacgtgtatcaattcgcggtctaagcgtttctctgacattcaagacatatatgaccataactacttcgccgaggttgagtgggctacactgaggcagtcaaaggcaccttttgtgcccgaacttgattcagagacagatgctggctattttgacgatttcggcagtgaagctgacatggccaaatacaaggaggtccacgagaaacaacaggcgctagagaacatggccgatagggaagacgagatgggcaaggggctttttgtcggcttcactttccgccaccgcaaaacgaacaccgaggatggcagcccacgtaagcggatccagacagacggaagctttggaacgatgctctaa

SEQ ID NO: 5198 - protein, 681 aa, Muscodor strobelii
  misc_feature: SGI Peptide ID NO. 561443
  misc_feature (603)..(659): Pfam Id: PF00433 Pfam Desc: Protein kinase C terminal domain
  misc_feature (282)..(585): Pfam Id: PF00069 Pfam Desc: Protein kinase domain
  misc_feature (282)..(428): Pfam Id: PF00069 Pfam Desc: Protein kinase domain
  misc_feature (480)..(526): Pfam Id: PF00069 Pfam Desc: Protein kinase domain
  misc_feature (282)..(371): Pfam Id: PF07714 Pfam Desc: Protein tyrosine kinase
  misc_feature (26)..(681): NCBI GI: 242809151 Blast Desc: serine/threonine protein kinase, [Talaromyces stipitatus ATCC 10500] gi|218715934|gb|EED15356.1| serine/threonine protein kinase, [Talaromyces stipitatus ATCC
  misc_feature (26)..(681): NCBI GI: 145247144 Blast Desc: An12g07710 [Aspergillus niger] gi|134080551|emb|CAK41220.1| protein product [Aspergillus niger]
  misc_feature (26)..(681): NCBI GI: 115386624 Blast Desc: serine/threonine-protein kinase sid2 [Aspergillus terreus NIH2624] gi|114190851|gb|EAU32551.1| serine/threonine-protein kinase sid2 [Aspergillus terreus
  misc_feature (26)..(681): NCBI GI: 258569140 Blast Desc: serine/threonine-protein kinase sid2 [Uncinocarpus reesii 1704] gi|237906760|gb|EEP81161.1| serine/threonine-protein kinase sid2 [Uncinocarpus reesii 1704]
  misc_feature (26)..(681): NCBI GI: 240111712 Blast Desc: Serine/threonine-protein kinase, [Coccidioides posadasii C735 delta SOWgp]
  misc_feature (26)..(681): NCBI GI: 225561110 Blast Desc: serine/threonine-protein kinase sid2 [Ajellomyces capsulatus G186AR]
  misc_feature (26)..(681): NCBI GI: 240280330 Blast Desc: serine/threonine protein kinase sid2 [Ajellomyces capsulatus H143]
  misc_feature (27)..(681): NCBI GI: 119172939 Blast Desc: CIMG_10025 [Coccidioides immitis RS]
  misc_feature (26)..(681): NCBI GI: 121703960 Blast Desc: serine/threonine protein kinase, [Aspergillus clavatus NRRL 1] gi|119398388|gb|EAW08818.1| serine/threonine protein kinase, [Aspergillus clavatus NRRL 1]
  misc_feature (26)..(681): NCBI GI: 119467340 Blast Desc: serine/threonine protein kinase, [Neosartorya fischeri NRRL 181] gi|119405628|gb|EAW15579.1| serine/threonine protein kinase, [Neosartorya fischeri NRRL 181]
  misc_feature (134)..(681): SWISSPROT Homolog: EC 2.7.11.1 Non-specific serine/threonine protein kinase
MASFISGIFNSSQGPKDLKSPASESRPKTPNKITTNSFIEPVATPQGSPSKKTKPPGAHDLPGAHDLPNTFDNALRLNPPVLESPVKLGRPQSSGSPLSPTKGNAQSLDDDYFGTPSSSTVIEESIIHKTAPLPESPTKKQGQENNPPARSSRIPMPNLSQAALSRQELYQRDSRPHTPAGPATTNKKFNTSKGLTPEEMEILKKPSVRRLVNVTQLYFLDYYFDLLTYVGSRQARLDAFKADVPAPPETSQEEYDQLWHKYTGRERAALRKRRVRLRHGDFQILTQVGQGGYGQVFLAQKKDTKEVCALKVMSKKLLFKLDEVRHVLTERDILTTANSEWLVRLLYSFQDDKSIYLAMEYVPGGDFRTLLNNTGVLSNRHARFYIAEMFCSVDALHKLGYIHRDLKPENFLVDSTGHVKLTDFGLAAGNVASSKINSMRARLEKASETSVPFGKAMGDRTLEERREGYQTMREQDVNYAKSIVGSPDYMAPEVLRGDEYDFTVDYWSLGCMLFEALTGFPPFAGSTSEETWRNLKYWRDVLKRPVWEDPNYFLSNRTWDFITTCINSRSKRFSDIQDIYDHNYFAEVEWATLRQSKAPFVPELDSETDAGYFDDFGSEADMAKYKEVHEKQQALENMADREDEMGKGLFVGFTFRHRKTNTEDGSPRKRIQTDGSFGTML

SEQ ID NO: 5199 - DNA, 2868 bp, Muscodor strobelii
  misc_feature: SGI EST ID NO. CUFF.13180.0
  misc_feature: Variant of the nucleotide sequence at SEQ ID NO 5197
tggcagttcagtcctacaagtcaacaccaacctgaccgcagatcgcatatcgcaactactgtagtgtactgagactactggcacagagacctcatcccttgccattgcttggctggtgtctgcggccacaaccaagcattgttttctgcctgtcctactattgacatctgggcaacagcattgtctttcccaagttttgtactcacggttgcgtctactcgcgtctacttcatgtgttgactgtcttagttgcatttctaaagctgtctgttgcgctagctccccgatccctttcttcgtaccctaatagtcttctcgccgcaccctcaggactcgcacgcatctgcaccaatcacgacaatggcgagctttatctcgggcatcttcaactcctcgcaggggcccaaggacctcaagtctcctgcctcggagagccgccctaaaaccccgaacaaaatcaccaccaactccttcatcgagcctgttgccacgccccaaggcagccccagcaagaagaccaaacctcccggtgcccacgacctgccaggtgcccatgatctacccaacaccttcgacaatgccctcaggctcaaccctcccgtccttgagagccccgtcaagctcggcaggccgcaaagcagcggcagcccgctctcccctacaaaaggcaacgcccagtccctcgacgatgactatttcggcaccccttcctcctccactgtcatcgaggagagtatcatacacaagactgccccgctgcccgagagcccgaccaagaagcaaggccaggagaacaaccctcccgctcgatcctcccgcatacctatgcccaatctgagccaggccgccctgtcacggcaagagctctaccagcgagacagcagacctcatacacccgccggtcctgccaccaccaacaagaagttcaacacgtccaaaggcttgactcccgaagagatggagatcctcaagaaaccctccgtccgtcggctggtcaatgtcactcagctctattttctagattactactttgatcttctgacctacgtgggctcgagacaggccaggctagacgcttttaaggccgatgtcccagccccgcccgagacctcccaggaagagtacgatcagctgtggcacaagtataccggaagggaacgtgccgctttgcgcaagcgacgagtccgccttcgtcacggcgatttccagattcttacccaagtcggccagggtggctatggtcaagtcttccttgcacagaagaaggacaccaaggaagtatgtgccctaaaagtcatgagcaaaaagctgctcttcaaactggacgaggttcgccatgtcttgaccgagcgcgatattctcacaacggccaacagcgagtggctggtcagactcctgtactcattccaagacgacaagagtatttatcttgccatggaatatgtgcctggaggtgatttcagaacactcctcaacaacaccggcgtcttgtccaatcgccatgctcgcttctacatcgccgagatgttttgctccgtcgatgccctccacaagcttggttatatccatcgcgacttgaagcccgagaatttcctcgtcgattcgaccggccacgtcaagttgacagactttggcttggccgctggtaatgtcgcttcgtccaagatcaactcgatgcgcgccagactcgagaaggcctccgagacgagtgtgccctttggtaaggccatgggtgacagaacattagaggagcgccgtgagggttaccagacgatgcgtgagcaggatgtcaactacgccaagtccatagtaggatctcctgactacatggcacccgaagttcttcgaggtgacgagtacgatttcactgtggattactggagcttgggctgcatgttgttcgaggccctcaccggcttcccgcccttcgctggttccacctcagaagagacatggcgaaatctcaagtactggcgagacgtgttgaagagacccgtctgggaggatcccaattactttttgagcaatcgtacctgggatttcatcacaacgtgtatcaattcgcggtctaagcgtttctctgacattcaagacatatatgaccataactacttcgccgaggttgagtgggctacactgaggcagtcaaaggcaccttttgtgcccgaacttgattcagagacagatgctggctattttgacgatttcggcagtgaagctgacatggccaaatacaaggaggtccacgagaaacaacaggcgctagagaacatggccgatagggaagacgagatgggcaaggggctttttgtcggcttcactttccgccaccgcaaaacgaacaccgaggatggcagcccacgtaagcggatccagacagacggaagctttggaacgatgctctaagaccatcgtcccctcatgtgactccagatgacgtttctgctttgcttttcttttcttcttatgagcatggatgatgagttgatttaccttgtttaatgatgataaatcggatcgggagcattgggcaagagcgatggatgcgcacggagattttgcgcttccacaagagctgtcatgtttcgccaccaaaatagctactctggagctcggagcaatgagtgagttgcgaagttatcactatagctggcgtggcatgctcgagagttagcttaagcataacgaacaagcatcatgagaagtgttgttttatacgtcggacgagaaatacgggattcatggttgtaataaaatcggcagcaggacagccttgtaaaacagtgttgactagatcattcacttccttgagacgaggaagcaacaacattttgaccaaacttgttcattacccgttcactatcgtcg

SEQ ID NO: 5200 - DNA, 831 bp, Muscodor strobelii
  misc_feature: SGI cDNA ID NO. 561444
  misc_feature: Encodes the peptide sequence at SEQ ID NO 5201
atgccaaaagagcgcagcttcaaccccgtccaggcgcagcggaaagctgataaagcgaaggccatcaagaaaggtagagccgaagtcgctgcccgtagaaatgagaaactagcccaccgaaaccccgacagactacagaaacagatcgatgaccttaagcaaattaccacaagcggcggaaaactcaccaagcacgaagagtctgttctcgaggggttagaacgggacctcaaggcagtcaacaaggcaagagaagcactaggcgacaaggcacccaccttcggtagaggtggcgacaggacgagagggcaagacaatggtgtattaggcaagaggaggagaggaggctatcaaaacgattccagtgatgacgacaacgtgcctgacgatgtgaagagcatacccatgcctagagacactcctcctcctattcccaaagatgtgctggacaaatggcacgccaaacgtagggcttcgagaaacgcaaacgatacaccattgggcgaacgcgagggacggccctccactcaacatgaatcaacaccagcgccagcacccgtcgaagccaagacagtgtatgaagctaagccccaggtccgcgatctgcgaaaggaggccgtcagtgcatttgtgcctacagctgttcgcatgaagctggacaagagccagggccaaggcggcttgatggaacccgaggaggcagatcgacttgagaatgaaggatacttgaaaacagttcccgacaccgaaacaggaaccgatgctgcatctgaggctgcaggacctggacgggtcacaatagaagaggtcgaggatgacgatgactactag

SEQ ID NO: 5201 - protein, 276 aa, Muscodor strobelii
  misc_feature: SGI Peptide ID NO. 561444
  misc_feature (4)..(90): Pfam Id: PF09429 Pfam Desc: WW domain binding protein 11
  misc_feature (1)..(274): NCBI GI: 46129232 Blast Desc: FG08801.1 [Gibberella zeae PH-1]
  misc_feature (1)..(275): NCBI GI: 171684879 Blast Desc: protein product [Podospora anserina] gi|170942400|emb|CAP68052.1| protein product [Podospora anserina]
  misc_feature (1)..(274): NCBI GI: 116193531 Blast Desc: CHGG_06483 [Chaetomium globosum CBS 148.51] gi|88182396|gb|EAQ89864.1| CHGG_06483 [Chaetomium globosum CBS 148.51]
  misc_feature (1)..(274): NCBI GI: 145610082 Blast Desc: MGG_02723 [Magnaporthe grisea 70-15] gi|145017469|gb|EDK01832.1| MGG_02723 [Magnaporthe grisea 70-15]
  misc_feature (1)..(274): NCBI GI: 149209977 Blast Desc: MGCH7_ch7g470 [Magnaporthe grisea 70-15] gi|86196425|gb|EAQ71063.1| MGCH7_ch7g470 [Magnaporthe grisea 70-15]
  misc_feature (1)..(274): NCBI GI: 85115536 Blast Desc: NCU09070 [Neurospora crassa OR74A] gi|28926684|gb|EAA35651.1| [Neurospora crassa OR74A]
  misc_feature (1)..(274): NCBI GI: 261353204 Blast Desc: conserved [Verticillium albo-atrum VaMs.102]
  misc_feature (3)..(274): NCBI GI: 119173030 Blast Desc: CIMG_10053 [Coccidioides immitis RS]
  misc_feature (3)..(274): NCBI GI: 240111733 Blast Desc: CPC735_011960 [Coccidioides posadasii C735 delta SOWgp]
  misc_feature (3)..(261): NCBI GI: 226277891 Blast Desc: conserved [Paracoccidioides brasiliensis Pb01]
MPKERSFNPVQAQRKADKAKAIKKGRAEVAARRNEKLAHRNPDRLQKQIDDLKQITTSGGKLTKHEESVLEGLERDLKAVNKAREALGDKAPTFGRGGDRTRGQDNGVLGKRRRGGYQNDSSDDDNVPDDVKSIPMPRDTPPPIPKDVLDKWHAKRRASRNANDTPLGEREGRPSTQHESTPAPAPVEAKTVYEAKPQVRDLRKEAVSAFVPTAVRMKLDKSQGQGGLMEPEEADRLENEGYLKTVPDTETGTDAASEAAGPGRVTIEEVEDDDDY

SEQ ID NO: 5202 - DNA, 1555 bp, Muscodor strobelii
  misc_feature: SGI EST ID NO. CUFF.13364.1
  misc_feature: Variant of the nucleotide sequence at SEQ ID NO 5200
ctacaggacagtggtctttatcggacttgtacagtgcatcagagggaggaactcatgcagcaaaccgtctcgcaccaatatccgagcagcagacagaagaacttccgatgagacggcattttcacgatagtacggatcacaacttatacaatcccgaatgacaaaatacgaatccttccaaatgtaaccctgatagttggtgaaacatcaaagtgattattgggagttcacatacatttggacttgcagctatcaccctttgacttgggtacctaaggtactcctgttgtttcaatcaccactgtgttaaggtagcaaggtgggtacagtgtttatcggcccatgataaagctccagctggcccctgcagtgctgcaccttccagcttccagcacttggtcagaacctagcttcaacatcacgagattcctctctccctcctacaaaccacctactttcagcttcgtcttcgtccccattacacgtctactactaattacttgaatcgcatatcctggaagactctgaagatgccaaaagagcgcagcttcaaccccgtccaggcgcagcggaaagctgataaagcgaaggccatcaagaaaggtagagccgaagtcgctgcccgtagaaatgagaaactagcccaccgaaaccccgacagactacagaaacagatcgatgaccttaagcaaattaccacaagcggcggaaaactcaccaagcacgaagagtctgttctcgaggggttagaacgggacctcaaggcagtcaacaaggcaagagaagcactaggcgacaaggcacccaccttcggtagaggtggcgacaggacgagagggcaagacaatggtgtattaggcaagaggaggagaggaggctatcaaaacgattccagtgatgacgacaacgtgcctgacgatgtgaagagcatacccatgcctagagacactcctcctcctattcccaaagatgtgctggacaaatggcacgccaaacgtagggcttcgagaaacgcaaacgatacaccattgggcgaacgcgagggacggccctccactcaacatgaatcaacaccagcgccagcacccgtcgaagccaagacagtgtatgaagctaagccccaggtccgcgatctgcgaaaggaggccgtcagtgcatttgtgcctacagctgttcgcatgaagctggacaagagccagggccaaggcggcttgatggaacccgaggaggcagatcgacttgagaatgaaggatacttgaaaacagttcccgacaccgaaacaggaaccgatgctgcatctgaggctgcaggacctggacgggtcacaatagaagaggtcgaggatgacgatgactactagatggtcaacccggtgaacactagaggactcggacgcgaatgccaccgaatgcgcctactggtgcgctcttacctggactacttgatatttgcctatgcacggttcagaagattgtgttgcctaatacactattagccacgagacgatgaagcacgatgtgttactcgatatctgcaaggcaagctccctttcta

SEQ ID NO: 5203 - DNA, 1329 bp, Muscodor strobelii
  misc_feature: SGI cDNA ID NO. 561445
  misc_feature: Encodes the peptide sequence at SEQ ID NO 5204
atgtcaaacggaccccaggactctcgcacgtctggcagtcatgagatcacttaccatacaaacccaaacccacagcttttcgttgtacaagctgacgatgatacccctgtggagaatgcccatgctaccatcgagaatgagaaggaagatcttgagttagctcgctctgtcactctccttggcgacgaaacatacccagaaggcggcaaagaggcatggcttgtagttttcggctcatgttgtggcttgatagcttcactgggtctagtcaacaccaacggcacgtttcaagcatacatctccaagcatcagctagcgaactacagtgaaagcacaataggctggatattcggactcaatacttctctctgtttcttctgtggtgtctatattggccccctattcgacaaatatggacctcgctggcttattgggccgggtgctatccttgtcgttgcgggtatcatgctcttcagtgtatgcactgaatactggcactttatcaccgtctatggcattgtcctcgggttggccgactcccttctcttcacgcccagcattgcagctatcggtcatttctttcgcgaacgccgcggtatagcctcaggggttgcgagtacgggaggtggtatcggcggaatagtgttccctttgatgctccaagctctctttatgcgagtcggctgggcgtgggctatacgcgctttaggattcctctgcccgcatcctgatatccgtatcttcaaggaccacgcgtttctcctcttaactatcggcgtcttccttctcgagttcgggctcttcattccccttacctatatatcgagctacgctcttgcgaatggcttcagcgaatcgtttgcgtttcagattcttcccatcttgaatgcggggagtgtattaggccgtgttatccccggatggtgggctgacaaggtcggaccgtataactctaacatggcctgtatgctcctcaccatcatatcctgcttcgccatatggctcccttttggccacactacgcctggtctcgtcgtctttgccgtcttattcggctttgcgactggcaataacatctccatcacaccagtctgtgttggcaagttgtgtcacacgcagcactacgggagatactacgctacctgttacactgtggtgtctgtcgcgtgtctgattaacattccgatcgctggcgctgtggtcgccgctaccaatggcaactatacctggctgatcgttttcactggagcaacacaagttgccgctctgctctttgtctatgcagccaaggttgcgaaagttggatggaaaccgtgggttaagttctag

SEQ ID NO: 5204 - protein, 442 aa, Muscodor strobelii
  misc_feature: SGI Peptide ID NO. 561445
  misc_feature (78)..(394): Pfam Id: PF07690 Pfam Desc: Major Facilitator Superfamily
  misc_feature (78)..(240): Pfam Id: PF07690 Pfam Desc: Major Facilitator Superfamily
  misc_feature (247)..(394): Pfam Id: PF07690 Pfam Desc: Major Facilitator Superfamily
  misc_feature (2)..(442): NCBI GI: 39970515 Blast Desc: MGG_02724 [Magnaporthe grisea 70-15] gi|149209979|ref|XP_001522364.1| MGCH7_ch7g471 [Magnaporthe grisea 70-15] gi|86196426|gb|EAQ71064.1| MGCH7_ch7g471 grisea
  misc_feature (14)..(437): NCBI GI: 261353202 Blast Desc: riboflavin transporter MCH5 [Verticillium albo-atrum VaMs.102]
  misc_feature (28)..(439): NCBI GI: 46129234 Blast Desc: FG08802.1 [Gibberella zeae PH-1]
  misc_feature (50)..(439): NCBI GI: 256734155 Blast Desc: [Nectria haematococca mpVI 77-13-4]
  misc_feature (11)..(442): NCBI GI: 242786794 Blast Desc: MFS monocarboxylate transporter, [Talaromyces stipitatus ATCC 10500] gi|218721022|gb|EED20441.1| MFS monocarboxylate transporter, [Talaromyces stipitatus ATCC 10500]
  misc_feature (2)..(442): NCBI GI: 242789156 Blast Desc: monocarboxylate transporter, [Talaromyces stipitatus ATCC 10500] gi|218717892|gb|EED17312.1| monocarboxylate transporter, [Talaromyces stipitatus ATCC 10500]
  misc_feature (16)..(437): NCBI GI: 156063080 Blast Desc: SS1G_01656 [Sclerotinia sclerotiorum 1980] gi|154696992|gb|EDN96730.1| SS1G_01656 [Sclerotinia sclerotiorum 1980]
  misc_feature (13)..(437): NCBI GI: 255943059 Blast Desc: Pc18g04650 [Penicillium chrysogenum Wisconsin 54-1255] gi|211587031|emb|CAP94689.1| Pc18g04650 [Penicillium chrysogenum Wisconsin 54-1255]
  misc_feature (4)..(442): NCBI GI: 115442702 Blast Desc: conserved [Aspergillus terreus NIH2624] gi|114188027|gb|EAU29727.1| conserved [Aspergillus terreus NIH2624]
  misc_feature (30)..(436): NCBI GI: 212543475 Blast Desc: MFS monocarboxylate transporter, [Penicillium marneffei ATCC 18224] gi|210066799|gb|EEA20892.1| MFS monocarboxylate transporter, [Penicillium marneffei ATCC 18224]
MSNGPQDSRTSGSHEITYHTNPNPQLFVVQADDDTPVENAHATIENEKEDLELARSVTLLGDETYPEGGKEAWLVVFGSCCGLIASLGLVNTNGTFQAYISKHQLANYSESTIGWIFGLNTSLCFFCGVYIGPLFDKYGPRWLIGPGAILVVAGIMLFSVCTEYWHFITVYGIVLGLADSLLFTPSIAAIGHFFRERRGIASGVASTGGGIGGIVFPLMLQALFMRVGWAWAIRALGFLCPHPDIRIFKDHAFLLLTIGVFLLEFGLFIPLTYISSYALANGFSESFAFQILPILNAGSVLGRVIPGWWADKVGPYNSNMACMLLTIISCFAIWLPFGHTTPGLVVFAVLFGFATGNNISITPVCVGKLCHTQHYGRYYATCYTVVSVACLINIPIAGAVVAATNGNYTWLIVFTGATQVAALLFVYAAKVAKVGWKPWVKF

SEQ ID NO: 5205 - DNA, 4301 bp, Muscodor strobelii
  misc_feature: SGI EST ID NO. CUFF.13364.0
  misc_feature: Variant of the nucleotide sequence at SEQ ID NO 5203
ctacaggacagtggtctttatcggacttgtacagtgcatcagagggaggaactcatgcagcaaaccgtctcgcaccaatatccgagcagcagacagaagaacttccgatgagacggcattttcacgatagtacggatcacaacttatacaatcccgaatgacaaaatacgaatccttccaaatgtaaccctgatagttggtgaaacatcaaagtgattattgggagttcacatacatttggacttgcagctatcaccctttgacttgggtacctaaggtactcctgttgtttcaatcaccactgtgttaaggtagcaaggtgggtacagtgtttatcggcccatgataaagctccagctggcccctgcagtgctgcaccttccagcttccagcacttggtcagaacctagcttcaacatcacgagattcctctctccctcctacaaaccacctactttcagcttcgtcttcgtccccattacacgtctactactaattacttgaatcgcatatcctggaagactctgaagatgccaaaagagcgcagcttcaaccccgtccaggcgcagcggaaagctgataaagcgaaggccatcaagaaaggtagagccgaagtcgctgcccgtagaaatgagaaactagcccaccgaaaccccgacagactacagaaacagatcgatgaccttaagcaaattaccacaagcggcggaaaactcaccaagcacgaagagtctgttctcgaggggttagaacgggacctcaaggcagtcaacaaggcaagagaagcactaggcgacaaggcacccaccttcggtagaggtggcgacaggacgagagggcaagacaatggtgtattaggcaagaggaggagaggaggctatcaaaacgattccagtgatgacgacaacgtgcctgacgatgtgaagagcatacccatgcctagagacactcctcctcctattcccaaagatgtgctggacaaatggcacgccaaacgtagggcttcgagaaacgcaaacgatacaccattgggcgaacgcgagggacggccctccactcaacatgaatcaacaccagcgccagcacccgtcgaagccaagacagtgtatgaagctaagccccaggtccgcgatctgcgaaaggaggccgtcagtgcatttgtgcctacagctgttcgcatgaagctggacaagagccagggccaaggcggcttgatggaacccgaggaggcagatcgacttgagaatgaaggatacttgaaaacagttcccgacaccgaaacaggaaccgatgctgcatctgaggctgcaggacctggacgggtcacaatagaagaggtcgaggatgacgatgactactagatggtcaacccggtgaacactagaggactcggacgcgaatgccaccgaatgcgcctactggtgcgctcttacctggactacttgatatttgcctatgcacggttcagaagattgtgttgcctaatacactattagccacgagacgatgaagcacgatgtgttactcgatatctgcaagacttacaggttctatggatataccttgaatagctttcgcacgaaagttctcgtccgtccaccacgtgctcgtacccgccaatttacctcctgcggatccgtcgtcacttagcgctagtatccatgttacgctgttctcggagtgccttcctctcggagtagtttacgggcagttccgcgggccggcttcaatgattggttctcgtaatgcgccctagaattgatcaaggctcttggaggagcggatatgcaaagctatctgaagtggcaagggtggtgttcaaaagttttctggctatccccagattaacgtaatggtttcgtgaaatctggagtcgcgcctaccttgttactggaacgccttgaagtacctcccactggggtcttagtgggtggggggctcaaaaatgtgtgcattccaacgctctcaaccgctaaatttggccgattacggcaaaaacccgaggtcccaggcacaaggactcatcatttcctcgggacacaataacttaaaccgacccatcagaatgatccagtcattatcagagctggctctcaattttctgtatgcacatttcttgtttgacctttttcactggttaagacctgggggttgatagttactattgtctgcaagccagtgatctgtttgtgacctgccaggcatatgctggcaattcaaagtagccgcattctttctcaagcataggatctggtattacatcctgtcacattcttcactttgcagctgtcgaatacaaatacaaatgttttgcacgcttctccgagagtgcctacttcccctaccacactcatcatgtcaaacggaccccaggactctcgcacgtctggcagtcatgagatcacttaccatacaaacccaaacccacagcttttcgttgtacaagctgacgatgatacccctgtggagaatgcccatgctaccatcgagaatgagaaggaagatcttgagttagctcgctctgtcactctccttggcgacgaaacatacccagaaggcggcaaagaggcatggcttgtagttttcggctcatgttgtggcttgatagcttcactgggtctagtcaacaccaacggcacgtttcaagcatacatctccaagcatcagctagcgaactacagtgaaagcacaataggctggatattcggactcaatacttctctctgtttcttctgtggtgtctatattggccccctattcgacaaatatggacctcgctggcttattgggccgggtgctatccttgtcgttgcgggtatcatgctcttcagtgtatgcactgaatactggcactttatcaccgtctatggcattgtcctcgggttggccgactcccttctcttcacgcccagcattgcagctatcggtcatttctttcgcgaacgccgcggtatagcctcaggggttgcgagtacgggaggtggtatcggcggaatagtgttccctttgatgctccaagctctctttatgcgagtcggctgggcgtgggctatacgcgctttaggattcctctgtaagtgatctaacctgtcaactatcggaaactagccctttgtcttaaaacccgcggccccgcgaaaagtcgtaaaaaataactaacccaatacctttctggctaccagctctagtgttgcttattccctccaatcttctcgtgaagaaaaggctgaaggcgccgaagaatctcagcccgcatcctgatatccgtatcttcaaggaccacgcgtttctcctcttaactatcggcgtcttccttctcgagttcgggctcttcattccccttacctatatatcgagctacgctcttgcgaatggcttcagcgaatcgtttgcgtttcagattcttcccatcttgaatgcggggagtgtattaggccgtgttatccccggatggtgggctgacaaggtcggaccgtataactctaacatggcctgtatgctcctcaccatcatatcctgcttcgccatatggctcccttttggccacactacgcctggtctcgtcgtctttgccgtcttattcggctttgcgactggcaataacatctccatcacaccagtctgtgttggcaagttgtgtcacacgcagcactacgggagatactacgctacctgttacactgtggtgtctgtcgcgtgtctgattaacattccgatcgctggcgctgtggtcgccgctaccaatggcaactatacctggctgatcgttttcactggagcaacacaagttgccgctctgctctttgtctatgcagccaaggttgcgaaagttggatggaaaccgtgggttaagttctaggccactgcctctattggtcctgcagaacacactgtggaactattgcactaaaaaggggttatcgtaccaccgcacggcttaatgatacaaacatgcagaaacgatagacttacgagcaagcctgctgctatattactacgccacataaaccgaacacaggtcttactagaagagacggtgtaaagggacgtgtgataccgagctgcttgaatcggtggcgtattaaacatggtcggatcggctctagaaggcgttttaaaaagcaaaataaaatattaagggccaggctttcggtacccaaaacgaagataaatatcaatattttggcaatttctcattgtctacataactactcgttggtcctcatcgatgactctgttattcctccgcgtagcaatatcaggattgtgagttgtcacaaagtggcccacctattcggaat

SEQ ID NO: 5206 - DNA, 1230 bp, Muscodor strobelii
  misc_feature: SGI cDNA ID NO. 561446
  misc_feature: Encodes the peptide sequence at SEQ ID NO 5207
atggcgagtcactcaacacacacatctgcctcgtcataccaggtggtggaaaatgcttactttgactccaatccacctcccaaggcgttgccgcaacacatagctgctgccagagaattcataaatcaacatgctgcggccaaccgccgtgtagtattggtgacttcaggaggaacgacagtgccactggagaaacaaacggtgcgcttcatcgacaacttctcggcaggcacacgtggtgcaacgtccgcggagtatttcctggagtctggatacgcggtcatattcctgcaccgccaattcagtcttctaccatatagtagacattacagtcactcgacagactgctttttggacttcctgcacgaaggcgacgacggcagcgttgtggccaacccagcacaccaacagaagatgatgcgcgtgctgcgcaagtacaacactgctaagcggcaaaacacattgcttatgctaccatttgtgacgataacggactacttacacgagcttcgagctgtggcacagctcatgcgatcattgggaccgaacggtcttttgtatcttgcagctgctgtgagcgacttcttcgtcccgcctgagcgcatggcagagcataagatccagagcacggacgccacggacaagttcaaacaacagcaaggtccaacaacaatcaccacagaaaagcgagagcaggatgaagaggcattcgacaacttcgactcatccccggcagtgccgcggagcaagcgacttatcgtggacttggaccccgtgccaaaatttttgaagaacctcgttgatggctgggctccagagggcatgatcgtgtccttcaagctagagacggatcccaagatcctggtgcacaaggcgaagtactcactggaccgataccagcaccatctcgtcattggaaacttacttacgacacgcaagtgggaggttgtctttgtgagccccggaaacgaggacaaatggatccgagtaccgatttcgcgacgcaaaaagactctcagcggaagcggaatggaggatttgattggcgttgcagaaagagagggaggtggtagtgcgatttcggacgaaaacctgggcaatgaaccaatggatcccgcgactttgccagaaggcgagcctgagatggagattgaaagcctgatcattcctgctgtgcaggaattccacacgaggcatgtcgagtcctctgcagcgaagaatcgaagctaa

SEQ ID NO: 5207 - protein, 409 aa, Muscodor strobelii
  misc_feature: SGI Peptide ID NO. 561446
  misc_feature (45)..(325): Pfam Id: PF04127 Pfam Desc: DNA / pantothenate metabolism flavoprotein
  misc_feature (14)..(408): NCBI GI: 156046280 Blast Desc: SS1G_09394 [Sclerotinia sclerotiorum 1980] gi|154693789|gb|EDN93527.1| SS1G_09394 [Sclerotinia sclerotiorum 1980]
  misc_feature (14)..(408): NCBI GI: 154319726 Blast Desc: BC1G_02344 [Botryotinia fuckeliana B05.10] gi|150856002|gb|EDN31194.1| BC1G_02344 [Botryotinia fuckeliana B05.10]
  misc_feature (17)..(404): NCBI GI: 39970517 Blast Desc: MGG_02725 [Magnaporthe grisea 70-15] gi|149209981|ref|XP_001522365.1| MGCH7_ch7g472 [Magnaporthe grisea 70-15] gi|86196427|gb|EAQ71065.1| MGCH7_ch7g472 grisea
  misc_feature (15)..(407): NCBI GI: 171684491 Blast Desc: protein product [Podospora anserina] gi|170942206|emb|CAP67858.1| protein product [Podospora anserina]
  misc_feature (17)..(406): NCBI GI: 46129236 Blast Desc: FG08803.1 [Gibberella zeae PH-1]
  misc_feature (15)..(406): NCBI GI: 116193567 Blast Desc: CHGG_06501 [Chaetomium globosum CBS 148.51] gi|88182414|gb|EAQ89882.1| CHGG_06501 [Chaetomium globosum CBS 148.51]
  misc_feature (8)..(402): NCBI GI: 256733663 Blast Desc: [Nectria haematococca mpVI 77-13-4]
  misc_feature (15)..(408): NCBI GI: 85115624 Blast Desc: NCU09090 [Neurospora crassa OR74A] gi|28926704|gb|EAA35671.1| [Neurospora crassa OR74A]
  misc_feature (8)..(407): NCBI GI: 189202334 Blast Desc: phosphopantothenate-cysteine ligase [Pyrenophora tritici-repentis Pt-1C-BFP] gi|187984602|gb|EDU50090.1| phosphopantothenate-cysteine ligase [Pyrenophora tritici-repentis
  misc_feature (1)..(406): NCBI GI: 238505746 Blast Desc: phosphopantothenate-cysteine ligase, [Aspergillus flavus NRRL3357] gi|220690195|gb|EED46545.1| phosphopantothenate-cysteine ligase, [Aspergillus flavus
  misc_feature (26)..(328): SWISSPROT Homolog: EC 6.3.2.5 Phosphopantothenate--cysteine ligase
MASHSTHTSASSYQVVENAYFDSNPPPKALPQHIAAAREFINQHAAANRRVVLVTSGGTTVPLEKQTVRFIDNFSAGTRGATSAEYFLESGYAVIFLHRQFSLLPYSRHYSHSTDCFLDFLHEGDDGSVVANPAHQQKMMRVLRKYNTAKRQNTLLMLPFVTITDYLHELRAVAQLMRSLGPNGLLYLAAAVSDFFVPPERMAEHKIQSTDATDKFKQQQGPTTITTEKREQDEEAFDNFDSSPAVPRSKRLIVDLDPVPKFLKNLVDGWAPEGMIVSFKLETDPKILVHKAKYSLDRYQHHLVIGNLLTTRKWEVVFVSPGNEDKWIRVPISRRKKTLSGSGMEDLIGVAEREGGGSAISDENLGNEPMDPATLPEGEPEMEIESLIIPAVQEFHTRHVESSAAKNRS

SEQ ID NO: 5208 - DNA, 2121 bp, Muscodor strobelii
  misc_feature: SGI EST ID NO. CUFF.13403.1
  misc_feature: Variant of the nucleotide sequence at SEQ ID NO 5206
ggaagcgaacagtccaattgccaggccttgctagctctaaagtattccataccaaggtcggctcatttgcggctaccgtttcgccaagtggcccgtgtaatagcgatcgaagttgtttcgtactcggttttacccctcgtggcggagatgggagagctccagtcaatcattcccttcacccgttgatgaccgagctccgctgcggcttatcactcatcacgcccaatgtatgactttgtccgcgcaagaaatcgagctcttgcaggcattccatcgcaaatcatcattcgatccttcaagataaagatagcagcgtctcaacaactgactagacctgccgattcaaccttggtgggccgaccgccaccgtcagacaattagttgagcagcctaagtgcgagtaccctagaggaacctcctgtatctgtctctcccccatctgaacggatacagtaagaaacacaaaataaagccaccatctaatactgggccacaaaactcaacaccatctctcagcctttccttcaatatcgcagagaataaacggccagcttccaggtcgtgttccgtatcgtctgcctcttcacaagacagcatggcgagtcactcaacacacacatctgcctcgtcataccaggtggtggaaaatgcttactttgactccaatccacctcccaaggcgttgccgcaacacatagctgctgccagagaattcataaatcaacatgctgcggccaaccgccgtgtagtattggtgacttcaggaggaacgacagtgccactggagaaacaaacggtgcgcttcatcgacaacttctcggcaggcacacgtggtgcaacgtccgcggagtatttcctggagtctggatacgcggtcatattcctgcaccgccaattcagtcttctaccatatagtagacattacagtcactcgacagactgctttttggacttcctgcacgaaggcgacgacggcagcgttgtggccaacccagcacaccaacagaagatgatgcgcgtgctgcgcaagtacaacactgctaagcggcaaaacacattgcttatgctaccatttgtgacgataacggactacttacacgagcttcgagctgtggcacagctcatgcgatcattgggaccgaacggtcttttgtatcttgcagctgctgtgagcgacttcttcgtcccgcctgagcgcatggcagagcataagatccagagcacggacgccacggacaagttcaaacaacagcaaggtccaacaacaatcaccacagaaaagcgagagcaggatgaagaggcattcgacaacttcgactcatccccggcagtgccgcggagcaagcgacttatcgtggacttggaccccgtgccaaaatttttgaagaacctcgttgatggctgggctccagagggcatgatcgtgtccttcaagctagagacggatcccaagatcctggtgcacaaggcgaagtactcactggaccgataccagcaccatctcgtcattggaaacttacttacgacacgcaagtgggaggttgtctttgtgagccccggaaacgaggacaaatggatccgagtaccgatttcgcgacgcaaaaagactctcagcggaagcggaatggaggatttgattggcgttgcagaaagagagggaggtggtagtgcgatttcggacgaaaacctgggcaatgaaccaatggatcccgcgactttgccagaaggcgagcctgagatggagattgaaagcctgatcattcctgctgtgcaggaattccacacgaggcatgtcgagtcctctgcagcgaagaatcgaagctaaggggtatggaactctgcatccagggtatagaacccgaacccgaacgttgaagaggctttgcgatgcaaatgcactccctcaaatgaccttcaattttcgcaacatctgcgattgttggaatacctagaggatagagatctacttgaacacgtctatctaaatgttgtctcgcgaaaaactacatagtgcatactgagcatattgcataagtccctgcttatgatcggcgcagggattagtgagcgcatagcttgagctggctaaatataactttggcccttcgtcacagtaattcc

SEQ ID NO: 5209 - DNA, 1176 bp, Muscodor strobelii
  misc_feature: SGI cDNA ID NO. 561447
  misc_feature: Elevated expression when VOC is produced
  misc_feature: Encodes the peptide sequence at SEQ ID NO 5210
atgtataccaagccacttctttgcttgactgccttggcggcctttgcttcggcaaaggcagtacccaaacggagctcgccagcacctctcttcaaagctgtcgaagagcatcgtattgacggcatgtatattgtcaagatgaaggatggtttcgagtcagataaacacttgagtgcccacatggtcgacgccgaacgtgtctacactgcgacgagcttcaagggctttgccaagaccatggataaggagacactgtcgacattaaggaataaccctatggttgaatacgtcaaggaggaccagtacttttacttgactgatttcaacaagagagaatttgttacgcaatcaggaacgaactatggtattgccaggatctcacacagagacaagggcagcagtgactttgtatatgactcgtcagcgggtgctggaacatgcatctatatgatcgacacaggtatcaatattggccaccctgacttcaacggccgagcagtctggggttttaacgcaatcgactcggacgacaacgacggagctggtcacggaacctacacagcaggtatcgcggggtctacaacgtacggtgtagccaagcaggccaccctcattgccgtcaaggtctttgacgacagcggagcgactgcaggaaacgcaattttagacgcaattaattgggtgggacaagacgcaccgacacgaaactgcccgagggggtccgttgccaacctatcactcggaggaggttttgatcaggcttcgaacgatgccgttgctgcactcgtaaatgctggaatatttgttgctgtagcttcgggcaacgacaacgctgatgccaacggttattcacccgcctcggagccttctgtctgcacggtgtctgcgagcgactctaacgacgctaaagctagctacagcaactttggctctgttgtcgacatctgggcgccgggaagcgatatcgagagtacttcgtatatgggcggaagcaccactgctagcggtacctctgcgtccagccctgttgttgccggtttgggtgcgtaccttctgggccttggcaacggtgccaatggtctctgtgatggcatcaagagcatcgcaacccagaacgtgttgagcggcgtgcccgatggaactgtgaacctcctcgccttcaacggtgcgacatag

SEQ ID NO: 5210 - protein, 391 aa, Muscodor strobelii
  misc_feature: SGI Peptide ID NO. 561447
  misc_feature (41)..(106): Pfam Id: PF05922 Pfam Desc: Subtilisin N-terminal Region
  misc_feature (131)..(382): Pfam Id: PF00082 Pfam Desc: Subtilase family
  misc_feature (137)..(382): Pfam Id: PF00082 Pfam Desc: Subtilase family
  misc_feature (18)..(389): NCBI GI: 124295071 Blast Desc: SprT [Hypocrea koningii]
  misc_feature (1)..(390): NCBI GI: 117631 Blast Desc: CUDP_METAN RecName: Full=Cuticle-degrading protease; AltName: Full=PR1; AltName: Full=Chymoelastase; Flags: Precursor gi|168343|gb|AAA33417.1| cuticle-degrading protease [Metarhizium
  misc_feature (1)..(390): NCBI GI: 16215677 Blast Desc: subtilisin-like serine protease PR1A [Metarhizium anisopliae var. anisopliae]
  misc_feature (1)..(389): NCBI GI: 16215662 Blast Desc: subtilisin-like protease PR1A [Metarhizium anisopliae var. anisopliae]
  misc_feature (1)..(389): NCBI GI: 6624958 Blast Desc: Subtilisin-like serine protease PR1A [Metarhizium anisopliae var. acridum]
  misc_feature (1)..(389): NCBI GI: 56550029 Blast Desc: subtilisin-like protein PR1A [Metarhizium acridum]
  misc_feature (1)..(390): NCBI GI: 171903987 Blast Desc: insect cuticle degrading enzyme [Metarhizium anisopliae]
  misc_feature (6)..(389): NCBI GI: 161897705 Blast Desc: serine protease [Ophiocordyceps sinensis]
  misc_feature (5)..(383): NCBI GI: 254351271 Blast Desc: subtilisin-like serine protease PR1A [Metarhizium anisopliae]
  misc_feature (1)..(389): NCBI GI: 149132204 Blast Desc: subtilisin-like protein PR1A [Metarhizium acridum]
  misc_feature (21)..(388): SWISSPROT Homolog: EC 3.4.21.64 Peptidase K
  misc_feature: Useful for introducing or modulating the production of volatile compounds
MYTKPLLCLTALAAFASAKAVPKRSSPAPLFKAVEEHRIDGMYIVKMKDGFESDKHLSAHMVDAERVYTATSFKGFAKTMDKETLSTLRNNPMVEYVKEDQYFYLTDFNKREFVTQSGTNYGIARISHRDKGSSDFVYDSSAGAGTCIYMIDTGINIGHPDFNGRAVWGFNAIDSDDNDGAGHGTYTAGIAGSTTYGVAKQATLIAVKVFDDSGATAGNAILDAINWVGQDAPTRNCPRGSVANLSLGGGFDQASNDAVAALVNAGIFVAVASGNDNADANGYSPASEPSVCTVSASDSNDAKASYSNFGSVVDIWAPGSDIESTSYMGGSTTASGTSASSPVVAGLGAYLLGLGNGANGLCDGIKSIATQNVLSGVPDGTVNLLAFNGAT

SEQ ID NO: 5211 - DNA, 2848 bp, Muscodor strobelii
  misc_feature: SGI EST ID NO. CUFF.13215.1
  misc_feature: Variant of the nucleotide sequence at SEQ ID NO 5209
cggtacttgacataggttcggcagatcgtgatcgacagtattgtaacccttgtatgaaccgctctggaatttatcgcgaggcgtgtttgaagtttcggtaagtaggaatcgagaatgaccattctattaagagaacttgtgggactggggctttgctccgatttcaaatgtataaagacgaggttcacccgacgaggcttcatggttctcagtagaagattatcctcagtctcgtctcgcagcgattcttccttgttatctctttcgatagagcagaatattcaagatgtataccaagccacttctttgcttgactgccttggcggcctttgcttcggcaaaggcagtacccaaacggagctcgccagcacctctcttcaaagctgtcgaagagcatcgtattgacggcatgtatattgtcaagatgaaggatggtttcgagtcagataaacacttgagtgcccacatggtcgacgccgaacgtgtctacactgcgacgagcttcaagggctttgccaagaccatggataaggagacactgtcgacattaaggaataaccctatggttgaatacgtcaaggaggaccagtacttttacttgactgatttcaacaagagagaatttgttacgcaatcaggaacgaactatggtattgccaggatctcacacagagacaagggcagcagtgactttgtatatgactcgtcagcgggtgctggaacatgcatctatatgatcgacacaggtatcaatattggccaccctgacttcaacggccgagcagtctggggttttaacgcaatcgactcggacgacaacgacggagctggtcacggaacctacacagcaggtatcgcggggtctacaacgtacggtgtagccaagcaggccaccctcattgccgtcaaggtctttgacgacagcggagcgactgcaggaaacgcaattttagacgcaattaattgggtgggacaagacgcaccgacacgaaactgcccgagggggtccgttgccaacctatcactcggaggaggttttgatcaggcttcgaacgatgccgttgctgcactcgtaaatgctggaatatttgttgctgtagcttcgggcaacgacaacgctgatgccaacggttattcacccgcctcggagccttctgtctgcacggtgtctgcgagcgactctaacgacgctaaagctagctacagcaactttggctctgttgtcgacatctgggcgccgggaagcgatatcgagagtacttcgtatatgggcggaagcgtaagttgatccaatcattccatttacaccccaggcaacatgaaaattccaggctaactcgcaactgttcagaccactgctagcggtacctctgcgtccagccctgttgttgccggtttgggtgcgtaccttctgggccttggcaacggtgccaatggtctctgtgatggcatcaagagcatcgcaacccagaacgtgttgagcggcgtgcccgatggaactgtgaacctcctcgccttcaacggtgcgacatagtctcgaatgtaaaaaattagatgtcgaaataagtagggcggaagtaaagaggctgtgtttcaagaaagtgacaaatgctctaaagcagggcgatcatagtgtatataggtgataactgtacatattgacgatgaagcgaataaaatgacgtatatattgcaatcgaaactgagcggtgaaggtcaagatggagagcccgggtccccctatgattacccgacgcgtatcgttagcggggctcgccgagagacgcgtctacagtgaaccggacattcccgaatgggcgactctttactactcatgcgttttgcctggaaattaccgaaagaacaccaaaggcaacaaaaagggcaatgctgtttgtggcagaattgacgacaaccttcccgtcgtttggtgggcatacctaatggtttttgtcttgtcatcaacaattgaaccccctgccgtacctaacgccacaattccccacttttcctataactcgtcacacaatgtaactcaggccaccaggccttgctaggtatcccactgatacctaccagtcaagctaccagatattcaaatctcagttgtacaacaatcgcctttgttcccgctcatttaagacaattttaatgatcgtgtaaaagatatctcttattgccccagcagaatgcttttgagaatgcaattaagaaaggagaggttttaaaagctgtcgacattccttgcattgtggtggactgtcatgatggatgacgatactgcataactgaaactgaattgcttcttaaggtgaatagtgcttgttggcctggaggggagcttccgcctatgaactgttcgtcgatagcacagacaaaatcttcaatggaaatcatcatgggactcacatgccttgcaatattcttcacgattgcagggaataatgtctaaacggtgtttatgaacaaattgaagggtgcagcatattcgagagaaaattataactacgccgtcttgcggtcgagaccttacttgtataagatagaggggccataaattggtgattcactttgtgattgctttctaccaacgcccgaccaagtaaaatacatgagattcgaataaccagctgtcatagttaaaccgatactattccagaaaatttggaattacaccaagaatacaggtctcaaaatatctcctagtcccataactatcatgagtaaactttgggtccgtattcatacgcatgatgtccggaggtaatccaaggtatgtgcatagcagttgaaaagacatgctgaaagcaacaatattgaagttcgtgcctggatcccttgctgccga

SEQ ID NO: 5212 - DNA, 1260 bp, Muscodor strobelii
  misc_feature: SGI cDNA ID NO. 561448
  misc_feature: Encodes the peptide sequence at SEQ ID NO 5213
atgccagcaaccgaaagcacgaggaccgcctcgcggtggatcactcgtatagttcccttcttcctggctgctgctgtagcctatgcaacctatgtcgtcgttgcgcgtgtcagtgttgactttttcatcaaatatagaaaagagaacggcacagccatcgccattctagtcttatacttcatatttttctcattaatgatcatcacttatctgcgaacactctacacggcgaacttcgacccgggactcgtccctctcggccccggcgcagcccgacagcgaaacaacagaaacgaaaagcacgcgacccggcttcacggatcagacgacatcgagggccgagcatatgaagctggacccaacgctgatatcgacagccctgggctggaggagttttacacgcgagacgtgttcattgcagagcccgatggcagacctaggtggtgttccaagtgccgcaactggaaacacgaccgcgtccatcacagcagcgagatagaccgctgtgtgtatcgcatggaccactactgcccctgggttggcggcatgatcggcgagaactcattcaaatactttgtccagtttactacatacgcgaccttcttctgcgccgttgtcgtgggcgccaccgctcctatagttagacgcaaagggattctagatgaaccggagtcattggccgctctcatcattgcggctttcttcggactgttcgcctctttgatgactcttacatcgatgcggtacatacatcagaacatgacgaatgtcgatttgctgtcatacaagaccaaaatctactatctagctgttcgcgtacctcgcgagacaagatctgacaagttccgcgtcattgtatatcctcgaccgaagctagagactgttccggatgagaacccaagagagggcagcagccagacatcgaatagtcattccggtgacagccaagacttcccaggacacgtgactagccgtgatgacctagcaatgcgcacgttcgcaattcttgaaactgaagcgggcgagaatccatgggatgttggtccatggcggaactgggtatctgtcatggggacgacgccctttgactggctgttacccattcgtccttcaccttgtgccaaccacgagaatcgagaaagtctgtacccaatgggcaagcttctcgatcaacttcgtacgcgatacggtctccctcctggaccaccgtcggacgagagcactatcatggagttgagaaacctgcgcaaccgtgagtag

SEQ ID NO: 5213 - protein, 419 aa, Muscodor strobelii
  misc_feature: SGI Peptide ID NO. 561448
  misc_feature (139)..(202): Pfam Id: PF01529 Pfam Desc: DHHC zinc finger domain
  misc_feature (6)..(417): NCBI GI: 171676165 Blast Desc: protein product [Podospora anserina] gi|170936148|emb|CAP60808.1| protein product [Podospora anserina]
  misc_feature (3)..(419): NCBI GI: 261353431 Blast Desc: palmitoyltransferase PFA5 [Verticillium albo-atrum VaMs.102]
  misc_feature (8)..(399): NCBI GI: 116193783 Blast Desc: CHGG_06609 [Chaetomium globosum CBS 148.51] gi|88182522|gb|EAQ89990.1| CHGG_06609 [Chaetomium globosum CBS 148.51]
  misc_feature (2)..(410): NCBI GI: 256734253 Blast Desc: NECHADRAFT_35964 [Nectria haematococca mpVI 77-13-4]
  misc_feature (2)..(398): NCBI GI: 46130622 Blast Desc: FG08915.1 [Gibberella zeae PH-1] gi|82593022|sp|Q4I1J3.1|PFA5_GIBZE RecName: Full=Palmitoyltransferase PFA5; AltName: Full=Protein fatty 5
  misc_feature (8)..(398): NCBI GI: 238844228 Blast Desc: palmitoyltransferase pfa5 [Microsporum canis CBS 113480]
  misc_feature (6)..(398): NCBI GI: 39970933 Blast Desc: MGG_02933 [Magnaporthe grisea 70-15] gi|149210455|ref|XP_001522602.1| MGCH7_ch7g702 [Magnaporthe grisea 70-15] gi|86196657|gb|EAQ71295.1| MGCH7_ch7g702 grisea
  misc_feature (14)..(398): NCBI GI: 159126500 Blast Desc: DHHC zinc finger membrane protein [Aspergillus fumigatus A1163]
  misc_feature (66)..(400): NCBI GI: 154309310 Blast Desc: BC1G_07549 [Botryotinia fuckeliana B05.10] gi|150852373|gb|EDN27565.1| BC1G_07549 [Botryotinia fuckeliana B05.10]
  misc_feature (14)..(398): NCBI GI: 146324119 Blast Desc: DHHC zinc finger membrane protein [Aspergillus fumigatus Af293] gi|152113093|sp|Q4WUK1.2|PFA5_ASPFU RecName: Full=Palmitoyltransferase pfa5; AltName: Full=Protein fatty 5
MPATESTRTASRWITRIVPFFLAAAVAYATYVVVARVSVDFFIKYRKENGTAIAILVLYFIFFSLMIITYLRTLYTANFDPGLVPLGPGAARQRNNRNEKHATRLHGSDDIEGRAYEAGPNADIDSPGLEEFYTRDVFIAEPDGRPRWCSKCRNWKHDRVHHSSEIDRCVYRMDHYCPWVGGMIGENSFKYFVQFTTYATFFCAVVVGATAPIVRRKGILDEPESLAALIIAAFFGLFASLMTLTSMRYIHQNMTNVDLLSYKTKIYYLAVRVPRETRSDKFRVIVYPRPKLETVPDENPREGSSQTSNSHSGDSQDFPGHVTSRDDLAMRTFAILETEAGENPWDVGPWRNWVSVMGTTPFDWLLPIRPSPCANHENRESLYPMGKLLDQLRTRYGLPPGPPSDESTIMELRNLRNRE

SEQ ID NO: 5214 - DNA, 3808 bp, Muscodor strobelii
  misc_feature: SGI EST ID NO. CUFF.13249.0
  misc_feature: Variant of the nucleotide sequence at SEQ ID NO 5212
ccactgcgtttgtagctgcccaaagagagctgaaacctaaaacccgaaacccacctccccacgggcacgggccgctgacataatgccgtgcctcctgacgtcgatctagacgcagtcagcgcagtaatcccggtgattccctgagcatcatcttgaaccgcccggcgattgggatgcccacagtgctgctgcgagcgattcggcatgctgccgagaccctaagcatcggattccgggtatctggggaaacaatccccacggccttccacttctctccgcccgcgacagttccaccaggatgcgccggaaatgccagcaaccgaaagcacgaggaccgcctcgcggtggatcactcgtatagttcccttcttcctggctgctgctgtagcctatgcaacctatgtcgtcgttgcgcgtgtcagtgttgactttttcatcaaatatagaaaagagaacggcacagccatcgccattctagtcttatacttcatatttttctcattaatgatcatcacttatctgcgaacactctacacggcgaacttcgacccgggactcgtccctctcggccccggcgcagcccgacagcgaaacaacagaaacgaaaagcacgcgacccggcttcacggatcagacgacatcgagggccgagcatatgaagctggacccaacgctgatatcgacagccctgggctggaggagttttacacgcgagacgtgttcattgcagagcccgatggcagacctaggtggtgttccaagtgccgcaactggaaacacgaccgcgtccatcacagcagcgagatagaccgctgtgtgtatcgcatggaccactactgcccctgggttggcggcatgatcggcgagaactcattcaaatactttgtccagtttactacatacgcgaccttcttctgcgccgttgtcgtgggcgccaccgctcctatagttagacgcaaagggattctagatgaaccggagtcattggccgctctcatcattgcggctttcttcggactgttcgcctctttgatgactcttacatcgatgcggtacatacatcagaacatgacgaatgtcgatttgctgtcatacaagaccaaaatctactatctagctgttcgcgtacctcgcgagacaagatctgacaagttccgcgtcattgtatatcctcgaccgaagctagagactgttccggatgagaacccaagagagggcagcagccagacatcgaatagtcattccggtgacagccaagacttcccaggacacgtgactagccgtgatgacctagcaatgcgcacgttcgcaattcttgaaactgaagcgggcgagaatccatgggatgttggtccatggcggaactgggtatctgtcatggggacgacgccctttgactggctgttacccattcgtccttcaccttgtgccaaccacgagaatcgagaaagtctgtacccaatgggcaagcttctcgatcaacttcgtacgcgatacggtctccctcctggaccaccgtcggacgagagcactatcatggagttgagaaacctgcgcaaccgtgagtagcaggcgttgagaacttaggaacaaagatacccgtactatacacattgtttttggcagaggagtttcgctggcattcaagagggtttactactgataattatacattgtatcgatagtgtactccgcgtacataatacattcgtctcgaatacataacgaacagaagttttccatgtgccaccgatttccatgacccgaaaagcctacagaccaaccgaaaccggctattaggggcgaggaccacattattataaaagcttgtcgtcgataacagcttctcatcggtaccaccagttctgggccatggcattcgaaatcttcagaaatgcgtcataggacaattcatcagggtcatctacatccgagttattagactgtgcgcccgctggataaggttggctgaacgcgccgtcaaagttgctacgctgcaaagataaaaagatgaagggcattttaacaagagtcagctttcgctccaaatgtatctcctaaagtgcgggttcagcatcagtacatacaaggttgacttatcgatatatcgcactaataagtcaccgtattgagatccagtccacgactatcactaacgtttgattggatagtcctttcgctgggaaatggcctattgaagatttattggtgagatatatcgataagtcaaccttgtatgtactgatgctgaacccgcactctaggagagtgaaggtactaattccttggcttcggccggcagtcgaagatcccttgacgcttaaggttacgcaacatcaagattcttagtgaatgtcaaaccattggaggttcgtcccacgcttttctagctcatcctctaacattctcgggtctgagttcatgatttctcctgtgattttgtgcttaaagtctcggaaataccgaggatcatgaggcgtccggtctcgttcgatcgggacccattcgtctggcattagccctagacgcggatcgttccttgtcagctcgcccgtttcctcgttgcggaaatgaggaaccgaaacacccatgctgtcgcggtaggactgtattttccagggcgccgggaccttgcccaggatggcctctccgtctgtgatgccgtaagtttgcgtcggtcctatgatcttgtaaccattttctgagtgcagtggtctcagtatcattgggtagtgacacccgaggaagacgcagacgagatcacccacggaggaagttagagttacattgtcgcatcatcgaatatgagaattgggtattttacttacctggtgccgtacccgtcggcgcaagacctagaagtccctgactcacagtgataaacgagaggtttcgcagactcgacgtatggatctcagacaaatcctctggtgaagaagacacgtcgccctgactgtcttcgaagtatttcttcttgagatctttccagctgaaatacgataggtttgtcggatagcgctcgcgactacacgtaagaagcacgaggtctaagaaggcttctatgaacttatcgaaatggctcccggacccgctctgtatgtccaaactgtctgcgcgcctccatagctcgcatagtctgccgctttctccctgaacagcttcatctacttgaagcactgaacctgctagcacgcccctgatgcgcagtgcattgcgtggtgtaacctcgtaactgacttttgatatgcctgaggccgctgtttggcacaccgactggagcatgttgtcggcgcttcgagaccagtcgggcacccaggaggggatgttccatgacgaagtcgtgtgattgatatgagaaaggaggtcgagacgacaggtgatgtcagtatacttaagaaaagcatccttgtaaacatcgacaactggcttttctagttgcggttgaatttgctgcgctagtctcggagggcaaagactcagcaccccgtagatcttgtctctgggatcgctgcatttctgcttcctcgagagcaccaataaccagaagaaatcatgcaggtatctagagttgcagacttcgcgagcttcttcaacgacgcctctcagtctctttgggagtgattttttctcacgaagtgtcagtatggcgcgccggaagacgttccacgggatgcggtcgggaccgcaaacgaccattccccggcgagcgagccgcgcttcctgctgaacccacactcgctcaaaccaatctcgggaaagaagttcgccgatggcgtcccaagactcatcgtcgaaagacaaaggcaac

SEQ ID NO: 5215 - DNA, 810 bp, Muscodor strobelii
  misc_feature: SGI cDNA ID NO. 561449
  misc_feature: Encodes the peptide sequence at SEQ ID NO 5216
atgctccagtcggtgtgccaaacagcggcctcaggcatatcaaaagtcagttacgaggttacaccacgcaatgcactgcgcatcaggggcgtgctagcaggttcagtgcttcaagtagatgaagctgttcagggagaaagcggcagactatgcgagctatggaggcgcgcagacagtttggacatacagagcgggtccgggagccatttcgataagttcatagaagccttcttagacctcgtgcttcttacgtgtagtcgcgagcgctatccgacaaacctatcgtatttcagctggaaagatctcaagaagaaatacttcgaagacagtcagggcgacgtgtcttcttcaccagaggatttgtctgagatccatacgtcgagtctgcgaaacctctcgtttatcactgtgagtcagggacttctaggtcttgcgccgacgggtacggcaccagaaaatggttacaagatcataggaccgacgcaaacttacggcatcacagacggagaggccatcctgggcaaggtcccggcgccctggaaaatacagtcctaccgcgacagcatgggtgtttcggttcctcatttccgcaacgaggaaacgggcgagctgacaaggaacgatccgcgtctagggctaatgccagacgaatgggtcccgatcgaacgagaccggacgcctcatgatcctcggtatttccgagactttaagcacaaaatcacaggagaaatcatgaactcagacccgagaatgttagaggatgagctagaaaagcgtgggacgaacctccaatggtttgacattcactaa

SEQ ID NO: 5216 - protein, 269 aa, Muscodor strobelii
  misc_feature: SGI Peptide ID NO. 561449
  misc_feature (10)..(268): NCBI GI: 256727220 Blast Desc: NECHADRAFT_32743 [Nectria haematococca mpVI 77-13-4]
  misc_feature (1)..(268): NCBI GI: 154311024 Blast Desc: BC1G_06630 [Botryotinia fuckeliana B05.10] gi|150851034|gb|EDN26227.1| BC1G_06630 [Botryotinia fuckeliana B05.10]
  misc_feature (100)..(268): NCBI GI: 145609067 Blast Desc: MGG_09107 [Magnaporthe grisea 70-15] gi|145016510|gb|EDK00940.1| MGG_09107 [Magnaporthe grisea 70-15]
  misc_feature (10)..(268): NCBI GI: 256719970 Blast Desc: NECHADRAFT_98482 [Nectria haematococca mpVI 77-13-4]
  misc_feature (105)..(263): NCBI GI: 169603560 Blast Desc: SNOG_04789 [Phaeosphaeria nodorum SN15] gi|111066060|gb|EAT87180.1| SNOG_04789 [Phaeosphaeria nodorum SN15]
  misc_feature (88)..(266): NCBI GI: 115492481 Blast Desc: [Aspergillus terreus NIH2624] gi|114197728|gb|EAU39428.1| [Aspergillus terreus NIH2624]
  misc_feature (152)..(251): NCBI GI: 46139411 Blast Desc: FG11220.1 [Gibberella zeae PH-1]
MLQSVCQTAASGISKVSYEVTPRNALRIRGVLAGSVLQVDEAVQGESGRLCELWRRADSLDIQSGSGSHFDKFIEAFLDLVLLTCSRERYPTNLSYFSWKDLKKKYFEDSQGDVSSSPEDLSEIHTSSLRNLSFITVSQGLLGLAPTGTAPENGYKIIGPTQTYGITDGEAILGKVPAPWKIQSYRDSMGVSVPHFRNEETGELTRNDPRLGLMPDEWVPIERDRTPHDPRYFRDFKHKITGEIMNSDPRMLEDELEKRGTNLQWFDIH

SEQ ID NO: 5217 - DNA, 642 bp, Muscodor strobelii
  misc_feature: SGI cDNA ID NO. 561450
  misc_feature: Elevated expression when VOC is produced
  misc_feature: Encodes the peptide sequence at SEQ ID NO 5218
atgatttcgggggccgatgatgaggcgataccccccggctttcccgagcatctgtcttcgggtcttgcttggaagggtcatgaaattcgggaggcaaattatgtctactacttcacagactctgagaagctagaaattaacaatgcattgcactcgtttctcgcacaagaaatcgacggcgatcttgtcgattgtcacaacttcccactacctcagctgggccctcggctgagagaactgtcttggggccttgaaattgcaagaggttttttcctgctccggggaatagatcaggatatgtattctgttgaagaaatgacaattatcttcttgggcatccagagctatgtagctgcaaagaggggtcgacaagacgagctggggaatatgctcgtacatatcatcccacgcacatctcaattctctaccaatccgttacctgagcatccacggcactccaagatagctctcccgttccatacagattggggtgatatactagcattccacactcgttccgccgatgtaaatagcggcgagtgcgtgatagcttccgcatacacagtttacaacatacttgccaagaataggccagatatactcaagactctggcgagagacgactggcctttcatcgcgtaa

SEQ ID NO: 5218 - protein, 213 aa, Muscodor strobelii
  misc_feature: SGI Peptide ID NO. 561450
  misc_feature (45)..(204): Pfam Id: PF02668 Pfam Desc: Taurine catabolism dioxygenase TauD, TfdA family
  misc_feature (9)..(211): NCBI GI: 171695172 Blast Desc: protein product [Podospora anserina] gi|170947828|emb|CAP59991.1| protein product [Podospora anserina]
  misc_feature (10)..(211): NCBI GI: 85111075 Blast Desc: NCU03247 [Neurospora crassa OR74A] gi|28925490|gb|EAA34526.1| conserved [Neurospora crassa OR74A]
  misc_feature (9)..(211): NCBI GI: 256734523 Blast Desc: [Nectria haematococca mpVI 77-13-4]
  misc_feature (10)..(211): NCBI GI: 46107296 Blast Desc: FG00531.1 [Gibberella zeae PH-1]
  misc_feature (3)..(211): NCBI GI: 116182476 Blast Desc: CHGG_01866 [Chaetomium globosum CBS 148.51] gi|88186163|gb|EAQ93631.1| CHGG_01866 [Chaetomium globosum CBS 148.51]
  misc_feature (3)..(205): NCBI GI: 145611262 Blast Desc: MGG_11560 [Magnaporthe grisea 70-15] gi|145018564|gb|EDK02843.1| MGG_11560 [Magnaporthe grisea 70-15]
  misc_feature (1)..(211): NCBI GI: 67527903 Blast Desc: AN4198.2 [Aspergillus nidulans FGSC A4] gi|40740107|gb|EAA59297.1| AN4198.2 [Aspergillus nidulans FGSC A4] gi|259481199|tpe|CBF74503.1| TPA: conserved [Aspergillus FGSC
  misc_feature (3)..(211): NCBI GI: 171677350 Blast Desc: protein product [Podospora anserina] gi|170936743|emb|CAP61401.1| protein product [Podospora anserina]
  misc_feature (9)..(211): NCBI GI: 171677255 Blast Desc: protein product [Podospora anserina] gi|170936695|emb|CAP61354.1| protein product [Podospora anserina]
  misc_feature (8)..(210): NCBI GI: 119499816 Blast Desc: taurine catabolism dioxygenase TauD, TfdA family protein [Neosartorya fischeri NRRL 181] gi|119414830|gb|EAW24768.1| taurine catabolism dioxygenase TauD,
  misc_feature: Useful for introducing or modulating the production of volatile compounds
MISGADDEAIPPGFPEHLSSGLAWKGHEIREANYVYYFTDSEKLEINNALHSFLAQEIDGDLVDCHNFPLPQLGPRLRELSWGLEIARGFFLLRGIDQDMYSVEEMTIIFLGIQSYVAAKRGRQDELGNMLVHIIPRTSQFSTNPLPEHPRHSKIALPFHTDWGDILAFHTRSADVNSGECVIASAYTVYNILAKNRPDILKTLARDDWPFIA

SEQ ID NO: 5219 - DNA, 1400 bp, Muscodor strobelii
  misc_feature: SGI EST ID NO. CUFF.13291.0
  misc_feature: Variant of the nucleotide sequence at SEQ ID NO 5217
cgacgagcaatatgattgcttcatgaaccgatgtggagtcttgagtcctaacaggggtctaatcccatttcccttgatatagtcctttcccgcatgagtatttacacttctcccaatcatgcatatcagcgacatgatttcgggggccgatgatgaggcgataccccccggctttcccgagcatctgtcttcgggtcttgcttggaagggtcatgaaattcgggaggcaaattatgtctactacttcacagactctgagaagctagaaattaacaatgcattgcactcgtttctcgcacaagaaatcgacggcgatcttgtcgattgtcacaacttcccactacctcagctgggccctcggctgagagaactgtcttggggccttgaaattgcaagaggttttttcctgctccggggaatagatcaggatatgtattctgttgaagaaatgacaattatcttcttgggcatccagagctatgtagctgcaaagaggggtcgacaagacgagctggggaatatgctcggtacgcccaagagtgccctttcgatcaacaactctaatttcctgttccagtacatatcatcccacgcacatctcaattctctaccaatccgttacctgagcatccacggcactccaagatagctctcgtaagttcaaagtatcgtaaaggttagagagaatctctaaatatagcttcacagccgttccatacagattggggtgatatactagcattccacactcgttccgccgatgtaaatagcggcgagtgcgtgatagcttccgcatacacagtttacaacatacttgccaagaataggccagatatactcaagactctggcgagagacgactggcctttcatcgcgccatacgcccatttccgtccactactgttctaccaaagttcccggcttatcatcaacttccaaactgattcactattcgaagaccgacgttatcggcggcctctgaatttccctccgtgttctccagagcaaatagaagcaataaaagtgctccagaccgtcgcagagaactgtagttatcgtttcactacacaagccggtgacatgcatttcatcaataacctggccatgttacacgggcgagggcaggtccgtggccccgaagatgacaagaggcatctcgctcgattgtggcttcgaagcgatgaccccagcttggatatacctgatcatctgagaagtttatggtatgccatatttgaaggtgatgcagacaggatatggaatattgtgccaatgcctgaaatattttttccgctgcggatgtattctaattgatcattacacaagtgtagtagattgatagattgatagattatgcaattgttactaaagacggacttgtcaaggtctatgttcagaac

SEQ ID NO: 5220 - DNA, 1218 bp, Muscodor strobelii
  misc_feature: SGI cDNA ID NO. 561451
  misc_feature: Encodes the peptide sequence at SEQ ID NO 5221
atgagcgccaacgaccatgtcagtctgtcgttacccggctccgaggctcgcttgggggagagccgaccagacccagttgcggaagaggacggctgctcatcaagatacccgtcagatgagggtcctccagactggtatttggttgaaggctgtacgctagagaatctcgaagcggagtctagaatgacaatgcctccatttttgttccgaggcactcatactgagtccggcggtggtgatcctcgtctcaatgaatacaatgttgtacggccacacgcattcctccctgctcccattaacaacgtcctcgctatccctatcgacaacgtcctccctgctcccattaacaacatcctcactgcccccatcgacgacgtcctccctgccacgatcgacgacatcagataccccaatggccaagatgccggaccacacaacctcgaggacgaagtactctcacacctagttcgcgacgaagtaaactcccacttcagctcctggaccccgacttttcataccgccgaaggctgctgttatgagggcaaacacgggaggaaaatcaccattttgcaaatgaataaacgcatacgcgatcatccaagagatactccggtgggagtgtaccatgccccggacttggttgagtacgctcaaaggggctcatggcaatcgggccggaataggaacacccatgaataccttcatttcgctccagcttctgggccaacgttgtataccgttgatctcaaagagctagggcaggctgggctggatgacctggacctgtggaaaatcacgccggatcaagttcaagatttggatttagacacgactgtgaagaaagcaaagaacgttgcgatcaggctagacagcccgactgacaagtcgccggaattcgtcattgcgacaacggtcaatttattgatgcagccgtcgcccagtgatgagcaactacgagctctcctgattagagaagacgagctaactggtgtattcgagaaggtcctcaacaaagagatggccaaactccgtgagaaccgaatgaccagtaatgatcaaacgactttgattgtcaatcctcatatttgggccgaaagtcttcatctgaaggctcttgttcgcattctcagcaaacttgaagctcgcatcgataaaccagccatgtgtagatgtggccatcttcaggacaaatgtctcgcggaggtcctccaagactga

SEQ ID NO: 5221 - protein, 405 aa, Muscodor strobelii
  misc_feature: SGI Peptide ID NO. 561451
MSANDHVSLSLPGSEARLGESRPDPVAEEDGCSSRYPSDEGPPDWYLVEGCTLENLEAESRMTMPPFLFRGTHTESGGGDPRLNEYNVVRPHAFLPAPINNVLAIPIDNVLPAPINNILTAPIDDVLPATIDDIRYPNGQDAGPHNLEDEVLSHLVRDEVNSHFSSWTPTFHTAEGCCYEGKHGRKITILQMNKRIRDHPRDTPVGVYHAPDLVEYAQRGSWQSGRNRNTHEYLHFAPASGPTLYTVDLKELGQAGLDDLDLWKITPDQVQDLDLDTTVKKAKNVAIRLDSPTDKSPEFVIATTVNLLMQPSPSDEQLRALLIREDELTGVFEKVLNKEMAKLRENRMTSNDQTTLIVNPHIWAESLHLKALVRILSKLEARIDKPAMCRCGHLQDKCLAEVLQD

SEQ ID NO: 5222 - DNA, 390 bp, Muscodor strobelii
  misc_feature: SGI cDNA ID NO. 561452
  misc_feature: Encodes the peptide sequence at SEQ ID NO 5223
atgggcgacaacgaaggcgacatgccacccttgtggcccaccttcaactcaatcatgactgcgatcccggccggcatggaccctgccgaagcctatgccctcttcgagcgccgcatggaaggcgtacgcaaaaacaacgaaggaaaccaagcctgcaaggaaggacgatacgaagatgcacgcctacaccgcgaagctctagccttcaagctcaaacagcacgacaagaactccatccaagtcgctcttactcacaacgccctgggcgtagcattgctcaaagctggtaaactcgacgaagctgatgagttgtttgagaaggctatccgcgtcagggaagagaggcgactaagtatcgagaggagaggaaagtcggcgcggatgcactag

SEQ ID NO: 5223 - protein, 129 aa, Muscodor strobelii
  misc_feature: SGI Peptide ID NO. 561452
  misc_feature (82)..(115): Pfam Id: PF00515 Pfam Desc: Tetratricopeptide repeat
  misc_feature (82)..(115): Pfam Id: PF07719 Pfam Desc: Tetratricopeptide repeat
  misc_feature (45)..(112): NCBI GI: 196010431 Blast Desc: TRIADDRAFT_58866 [Trichoplax adhaerens] gi|190582463|gb|EDV22536.1| TRIADDRAFT_58866 [Trichoplax adhaerens]
  misc_feature (45)..(111): NCBI GI: 196014038 Blast Desc: TRIADDRAFT_60859 [Trichoplax adhaerens] gi|190580597|gb|EDV20679.1| TRIADDRAFT_60859 [Trichoplax adhaerens]
  misc_feature (45)..(111): NCBI GI: 196016354 Blast Desc: TRIADDRAFT_62058 [Trichoplax adhaerens] gi|190579417|gb|EDV19513.1| TRIADDRAFT_62058 [Trichoplax adhaerens]
  misc_feature (45)..(112): NCBI GI: 196011932 Blast Desc: TRIADDRAFT_59928 [Trichoplax adhaerens] gi|190581605|gb|EDV21681.1| TRIADDRAFT_59928 [Trichoplax adhaerens]
MGDNEGDMPPLWPTFNSIMTAIPAGMDPAEAYALFERRMEGVRKNNEGNQACKEGRYEDARLHREALAFKLKQHDKNSIQVALTHNALGVALLKAGKLDEADELFEKAIRVREERRLSIERRGKSARMH

SEQ ID NO: 5224 - DNA, 346 bp, Muscodor strobelii
  misc_feature: SGI EST ID NO. CUFF.13234.0
  misc_feature: Variant of the nucleotide sequence at SEQ ID NO 5222
acaagaactccatccaagtcgctcttactcacaacgccctgggcgtagcattgctcaaagctggtaaactcgacgaagctgatgagttgtttgagaaggctatccgcgtcagggaagagaggcgactaagtatcgagaggagaggaaagtcggcgcggatgcactagagctagatgctgctggtacgagagagaatattggggcgttgcgtgaggcccaagggatattcgatgaagcgaggagcattagactgaggggtgctgcgaaggggggtatgctttgcagtaatgagaaggtgtgtgaggtgttcgttcgcgtcaaaaatttcttccacttcatatctgag

SEQ ID NO: 5225 - DNA, 753 bp, Muscodor strobelii
  misc_feature: SGI cDNA ID NO. 561453
  misc_feature: Encodes the peptide sequence at SEQ ID NO 5226
atgggaggagatggcaaccgacatatcccgtttgccaaggctaagatatcgtcaggcgaggaatatgggttgctcatacaccaactgacgaatagcttcgattttgtaagcatgtatatcatatatgcatttttgttccatgtgcgagacttcaagggagacccgagccaggacatacgtggcgcctactgcttcaagcatcatgatccactggtcgtgcgccagttaaggtgcaccactggtcgcttcatctctcagagtccggaggcactagagaatctgcgtcagcttgataaaggtctcgcaaagagagtttacaggaaagcaaagtcatacgtcactcattgtgactcgctacgcagtagcaccttgaccattctcgacaaccttttcatccacgagaaagaagatccaaccctaaactcgaacgagtatgcgaaaacggagttgaagaaatgcacagattcctgtactcaggaaatcaaacaaatgcagcaagcagcaaatgctataaacagcaagatctttggggacactcgccttgaaagcattctcaatccaacaatatttgatcaaattgcccccgacttcaatcaagataaagaattctgggaacaatggctgcatcagtttgaagcaaatttcggagaagcagatttcggaaccgtcctgtctccggctgccaggtctttaaccgaattgtacgaaaaggagctctttttcgcttccaatccgcgagccacagagggttaa

SEQ ID NO: 5226 - protein, 250 aa, Muscodor strobelii
  misc_feature: SGI Peptide ID NO. 561453
MGGDGNRHIPFAKAKISSGEEYGLLIHQLTNSFDFVSMYIIYAFLFHVRDFKGDPSQDIRGAYCFKHHDPLVVRQLRCTTGRFISQSPEALENLRQLDKGLAKRVYRKAKSYVTHCDSLRSSTLTILDNLFIHEKEDPTLNSNEYAKTELKKCTDSCTQEIKQMQQAANAINSKIFGDTRLESILNPTIFDQIAPDFNQDKEFWEQWLHQFEANFGEADFGTVLSPAARSLTELYEKELFFASNPRATEG

SEQ ID NO: 5227 - DNA, 234 bp, Muscodor strobelii
  misc_feature: SGI EST ID NO. CUFF.13255.0
  misc_feature: Variant of the nucleotide sequence at SEQ ID NO 5225
agagagtttacaggaaagcaaagtcatacgtcactcattgtgactcgctacgcagtagcaccttgaccattctcgacaaccttttcatccacgagaaagaagatccaaccctaaactcgaacgagtatgcgaaaacggagttgaagaaatgcacagattcctgtactcaggaaatcaaacaaatgcagcaagcagcaaatgctataaacagcaagatctttggggacactcgcc

SEQ ID NO: 5228 - DNA, 1158 bp, Muscodor strobelii
  misc_feature: SGI cDNA ID NO. 561454
  misc_feature: Encodes the peptide sequence at SEQ ID NO 5229
atggcttttgcacctcccccagcgcccaaaagcgttctcggccggcaccggctgttggcaccgtcagcgtctgttcgcgtcagtccactatgcttcggaggaatgggtctgggtaccgcctggcaaggtatcatgggcgagacgaccaaagagtcggcgtttgagcttctagacactttctatgaccttggcggcaacttcatcgacactgctaatgcctatcaaggcggtcagagcgagcaatggattggcgaatggatcaagaacacagatcgccgagccgagattgtactggcgacaaagtatactatgaacccggtcacagaccagtccattcaggccagcaactacggcgggaccggtaccaagtcgatgcacaccagcatcgccaatagcctgaagaacctgcaaactgactacgtcgatatctactacgtccatgcttatgactatgctaccgacatcccggagctgatgcagtcgctcaacaccctcgtcgcccaggggaaagtgctgtatcttggcattagcgacacgcctgcatggtttgttgtaaaagccaatgtgtatgcccgtcagcacggactgaggcccttctctgtctatcaaggtcgctactcggcgcaacagcgggacttagaacgtgacatcatccccatgtgccgtcatgagggtatgggtattcaagcttttggtgtgcttgccggcggatttttcaagtcccccggagccggtcaaacaccagggggccgcaacgtgccaccaagtctacttgttggaagggaggagcaagtgtcggcggtgctggatattgttgcaaaacgtcacggtgtccctctcacgagcgtggcgttagcctatgcgttacagaagacgcctcacttgtttccaattatagggggccgcaaggtagagcatctgaaggccaatatcgaggccctgcagctggagctcacgcaagatgacattgacactatagagaaaggctacgattttgacatcggctttccgcatagcttggtaagtggcaccggaaagatcccacgggggccacaagacatcgccatcattggttccatgggatattttgattacgtcgcaagtccagtagccatcaagcctcaccaaggcgagcttacggtggcctggaagccataa

SEQ ID NO: 5229 - protein, 385 aa, Muscodor strobelii
  misc_feature: SGI Peptide ID NO. 561454
  misc_feature (21)..(331): Pfam Id: PF00248 Pfam Desc: Aldo/keto reductase family
  misc_feature (35)..(331): Pfam Id: PF00248 Pfam Desc: Aldo/keto reductase family
  misc_feature (1)..(384): NCBI GI: 212538921 Blast Desc: norsolorinic acid reductase, [Penicillium marneffei ATCC 18224] gi|210069358|gb|EEA23449.1| norsolorinic acid reductase, [Penicillium marneffei ATCC 18224]
  misc_feature (1)..(371): NCBI GI: 242820009 Blast Desc: norsolorinic acid reductase, [Talaromyces stipitatus ATCC 10500] gi|218713895|gb|EED13319.1| norsolorinic acid reductase, [Talaromyces stipitatus ATCC 10500]
  misc_feature (10)..(377): NCBI GI: 145237782 Blast Desc: An07g04560 [Aspergillus niger] gi|134076013|emb|CAK45091.1| protein product [Aspergillus niger]
  misc_feature (1)..(384): NCBI GI: 169617463 Blast Desc: SNOG_11911 [Phaeosphaeria nodorum SN15] gi|160703415|gb|EAT80955.2| SNOG_11911 [Phaeosphaeria nodorum SN15]
  misc_feature (3)..(374): NCBI GI: 256723682 Blast Desc: NECHADRAFT_97340 [Nectria haematococca mpVI 77-13-4]
  misc_feature (1)..(374): NCBI GI: 164423792 Blast Desc: norsolorinic acid reductase [Neurospora crassa OR74A] gi|157070233|gb|EAA32737.2| norsolorinic acid reductase [Neurospora crassa OR74A]
  misc_feature (1)..(374): NCBI GI: 256727425 Blast Desc: NECHADRAFT_58032 [Nectria haematococca mpVI 77-13-4]
  misc_feature (10)..(376): NCBI GI: 154297838 Blast Desc: BC1G_11893 [Botryotinia fuckeliana B05.10] gi|150858334|gb|EDN33526.1| BC1G_11893 [Botryotinia fuckeliana B05.10]
  misc_feature (1)..(366): NCBI GI: 261353083 Blast Desc: norsolorinic acid reductase [Verticillium albo-atrum VaMs.102]
  misc_feature (13)..(374): NCBI GI: 156036492 Blast Desc: SS1G_12935 [Sclerotinia sclerotiorum 1980] gi|154698340|gb|EDN98078.1| SS1G_12935 [Sclerotinia sclerotiorum 1980]
  misc_feature (3)..(376): SWISSPROT Homolog: EC 1.1.1.91 Aryl-alcohol dehydrogenase (NADP(+))
MAFAPPPAPKSVLGRHRLLAPSASVRVSPLCFGGMGLGTAWQGIMGETTKESAFELLDTFYDLGGNFIDTANAYQGGQSEQWIGEWIKNTDRRAEIVLATKYTMNPVTDQSIQASNYGGTGTKSMHTSIANSLKNLQTDYVDIYYVHAYDYATDIPELMQSLNTLVAQGKVLYLGISDTPAWFVVKANVYARQHGLRPFSVYQGRYSAQQRDLERDIIPMCRHEGMGIQAFGVLAGGFFKSPGAGQTPGGRNVPPSLLVGREEQVSAVLDIVAKRHGVPLTSVALAYALQKTPHLFPIIGGRKVEHLKANIEALQLELTQDDIDTIEKGYDFDIGFPHSLVSGTGKIPRGPQDIAIIGSMGYFDYVASPVAIKPHQGELTVAWKP

SEQ ID NO: 5230 - DNA, 1728 bp, Muscodor strobelii
  misc_feature: SGI EST ID NO. CUFF.13259.0
  misc_feature: Variant of the nucleotide sequence at SEQ ID NO 5228
gctttatttactaaatacttccctcttctctgcctatatcccctttgccagagttactaggccaaaaggtcaaaggggcaacaattgatcaaaatccttcactaacgatgtcattctctcaggtctgggtaccgcctggcaaggtatcatgggcgagacgaccaaagagtcggcgtttgagcttctagacactttctatgaccttggcggcaacttcatcgacactgctaatgcctatcaaggcggtcagagcgagcaatggattggcgaatggatcaagaacacagatcgccgagccgagattgtactggcgacaaagtatactatgaacccggtcacagaccagtccattcaggccagcaactacggcgggaccggtaccaagtcgatgcacaccagcatcgccaatagcctgaagaacctgcaaactgactacgtcgatatctactacgtccatgcttatgactatgctaccgacatcccggagctgatgcagtcgctcaacaccctcgtcgcccaggggaaagtgctgtatcttggcattagcgacacgcctgcatggtttgttgtaaaagccaatgtgtatgcccgtcagcacggactgaggcccttctctgtctatcaaggtcgctactcggcgcaacagcgggacttagaacgtgacatcatccccatgtgccgtcatgagggtatgggtattcaagcttttggtgtgcttgccggcggatttttcaagtcccccggagccggtcaaacaccagggggccgcaacgtgccaccaagtctacttgttggaagggaggagcaagtgtcggcggtgctggatattgttgcaaaacgtcacggtgtccctctcacgagcgtggcgttagcctatgcgttacagaagacgcctcacttgtttccaattatagggggccgcaaggtagagcatctgaaggccaatatcgaggccctgcagctggagctcacgcaagatgacattgacactatagagaaaggctacgattttgacatcggctttccgcatagcttggtaagtggcaccggaaagatcccacgggggccacaagacatcgccatcattggttccatgggatattttgattacgtcgcaagtccagtagccatcaagcctcaccaaggcgagcttacggtggcctggaagccataaacctgcgcgatcgagttcatctctcgaaatagaaaaggactgattaagactgtcggatctctaacaaagatcgtaagcgtgggccaaatatgactctggccgctgctgatgtgatattacgctatatacaacgtgggacgcgagagcttttattatggcgaatgattcgacactacgtgttgggctcatagagtcgacttgcgacaaacaatctctagtcccaagatagtcgcttatagaggcatcgaagtctggcaccctcatggttctaaggtcttatatatgtttattttctaggctaatgcgatgattcatcttcctcggcctatgtcacatactaagatgacatatttcgatgatatcattcatcgtgaaagctttgcacgacatcacacgaatccttttgcgtaatggcctgcgttcaaatcccagtgcacgtaaaccatgttctacacggccctaattattcaggattatgagaactgccctcagtcatgaacctgcgagataggtaactcgtgagctgttgtgatggttctaacgtcaaggatccg

SEQ ID NO: 5231 - DNA, 2046 bp, Muscodor strobelii
  misc_feature: SGI cDNA ID NO. 561455
  misc_feature: Reduced expression when VOC is produced
  misc_feature: Encodes the peptide sequence at SEQ ID NO 5232
atgcttcgcgcgccgataacaaggcgctgcgctgccccgtcaacatggcagcgcggcagcgtcgcaattcgtcctcacctcctccctagatcaacagtcaaacacccacctactcgatccctcacacaatccgcaacacgacaacaattcataaacgcaaatgaccgacctttctccccgctcaccccgccctctccttcctccctcggcaaaccaaaaacggcgcgagacttcaagcgcagtcgtcgctggggtcgccgattactcatccttggtttgacgacggggacactctatatcctcgatgatcaactattcgcttctggtgttgcaagatcgctgaggacgtttgggaatggactgtatgttgcgctcgactacaagatcaacttccgcgctgagccgtggtggggagagaccattacggatttacatcgacggagtgccgaaagattgtttgatgtcctgagggcgaatggaggcctgtatttgaagattggacaggcaatcgctatgcagtctgctgtcctgcctccagagttccagaagatgtttgcgcgcatgtttgatgatgcgccgcaggatgagtggaaggacgtcgagaaggttatacgacaagaattcggcgggaagagcgtcgaggaagtcttcggtgtttcgtttacgggcgaggagggaaagggactgatggagaggagggccagagctagcgctagtgttgcgcaggttcattgggcgagattaccggatggcagagaagtcgccgtcaagatccagaaaccagagattgcgaaacaggtcgggtgggatctgtgggcgtttaaggttgtgatgagggtttatacttggtggtttgatctgccgctttatggtattgtgcctttcatcaccgaacggttgttgttggagacggactttgagagtgaggcgaggaatagcgaggttatgcgggatttggtcaataatgagcccgcgctcaagggaagggtgtatgtcccgaaggtgtacgatgagtttacgacgaagagggtgcttgttactgagtggattgagggcgtgaggttgtgggataagagtgcgactggtgggaggtggctgggtggttatggaaaggggtcagcaggtgtccatggggagagactctcgttcacgaaggccgatatggacgctgcgaaacgagaattacggcaaaacacgctcaaagaacggctcaagcccgatcgcgagacctggaaaggtcggaacggaaaaggaggtctaggacttacgggcaaggaagttatgacgacgatggtcgacctattctccgcacaaattttcaaatggggcgtcgtacactgtgacccgcacccaggaaacatcttcatccgacgactaccctccggcaagcccgaactcgtcctcatcgatcacggcctgtacgtctacatgcagcccaagttccgccagcaatacgcactattctggaagagcctcatgacattcgacaacaatacgatagccgaaatcacagaacaatggggtatcaaagcacccgatctatttgcttctgcgacgctcatgcgaccctacgaaggaggagatgggagcacgaaagataaccttacgaaggaactcaccgggaagacacatcaagatcgccactacgagatgcaacagcgcatgaaacagggcgttcgggatgtgctggcggacgaggataagtggccaaaggagctcatcttcatcgggagaaatatgcggatagtgcaaggcaacaaccagttcatggggagccccgtgaaccggataaagatgatgggcaattgggcgagtgtgagtctgtatcaggatccgaacagaccttttcgggagagatttttgaacgcttggagacatgtactattcaagggtgtgttgttcgcgtctgatgtggttttctatacgtttaaggttagacagtggttaggctggggcggtggcatggaggatgaggttgagaagaggatgcaggttatggctaaggattttggtgttgagttgcagcatgaggtctttgagggatag

SEQ ID NO: 5232 - protein, 681 aa, Muscodor strobelii
  misc_feature: SGI Peptide ID NO. 561455
  misc_feature (206)..(336): Pfam Id: PF03109 Pfam Desc: ABC1 family
  misc_feature (236)..(336): Pfam Id: PF03109 Pfam Desc: ABC1 family
  misc_feature (1)..(681): NCBI GI: 46128663 Blast Desc: FG08709.1 [Gibberella zeae PH-1]
  misc_feature (25)..(681): NCBI GI: 39970321 Blast Desc: MGG_02627 [Magnaporthe grisea 70-15] gi|149209739|ref|XP_001522244.1| MGCH7_ch7g352 [Magnaporthe grisea 70-15] gi|86196307|gb|EAQ70945.1| MGCH7_ch7g352 grisea
  misc_feature (29)..(681): NCBI GI: 164429614 Blast Desc: NCU01997 [Neurospora crassa OR74A] gi|38567059|emb|CAE76356.1| conserved [Neurospora crassa] gi|157073550|gb|EAA35626.2| NCU01997 [Neurospora crassa OR74A]
  misc_feature (19)..(681): NCBI GI: 256733588 Blast Desc: [Nectria haematococca mpVI 77-13-4]
  misc_feature (36)..(681): NCBI GI: 116193667 Blast Desc: CHGG_06551 [Chaetomium globosum CBS 148.51] gi|88182464|gb|EAQ89932.1| CHGG_06551 [Chaetomium globosum CBS 148.51]
  misc_feature (44)..(681): NCBI GI: 154297174 Blast Desc: ABC transporter [Botryotinia fuckeliana B05.10] gi|150843075|gb|EDN18268.1| ABC transporter [Botryotinia fuckeliana B05.10]
  misc_feature (37)..(681): NCBI GI: 171685091 Blast Desc: protein product [Podospora anserina] gi|170942506|emb|CAP68158.1| protein product [Podospora anserina]
  misc_feature (41)..(681): NCBI GI: 212536390 Blast Desc: ABC1 domain protein [Penicillium marneffei ATCC 18224] gi|210070750|gb|EEA24840.1| ABC1 domain protein [Penicillium marneffei ATCC 18224]
  misc_feature (23)..(681): NCBI GI: 169780058 Blast Desc: [Aspergillus oryzae RIB40] gi|238505890|ref|XP_002384147.1| ABC1 domain protein [Aspergillus flavus NRRL3357] gi|83773233|dbj|BAE63360.1| protein product ABC1
  misc_feature (19)..(681): NCBI GI: 159127862 Blast Desc: ABC1 domain protein [Aspergillus fumigatus A1163]
  misc_feature: Useful for introducing or modulating the production of volatile compounds
MLRAPITRRCAAPSTWQRGSVAIRPHLLPRSTVKHPPTRSLTQSATRQQFINANDRPFSPLTPPSPSSLGKPKTARDFKRSRRWGRRLLILGLTTGTLYILDDQLFASGVARSLRTFGNGLYVALDYKINFRAEPWWGETITDLHRRSAERLFDVLRANGGLYLKIGQAIAMQSAVLPPEFQKMFARMFDDAPQDEWKDVEKVIRQEFGGKSVEEVFGVSFTGEEGKGLMERRARASASVAQVHWARLPDGREVAVKIQKPEIAKQVGWDLWAFKVVMRVYTWWFDLPLYGIVPFITERLLLETDFESEARNSEVMRDLVNNEPALKGRVYVPKVYDEFTTKRVLVTEWIEGVRLWDKSATGGRWLGGYGKGSAGVHGERLSFTKADMDAAKRELRQNTLKERLKPDRETWKGRNGKGGLGLTGKEVMTTMVDLFSAQIFKWGVVHCDPHPGNIFIRRLPSGKPELVLIDHGLYVYMQPKFRQQYALFWKSLMTFDNNTIAEITEQWGIKAPDLFASATLMRPYEGGDGSTKDNLTKELTGKTHQDRHYEMQQRMKQGVRDVLADEDKWPKELIFIGRNMRIVQGNNQFMGSPVNRIKMMGNWASVSLYQDPNRPFRERFLNAWRHVLFKGVLFASDVVFYTFKVRQWLGWGGGMEDEVEKRMQVMAKDFGVELQHEVFEG

SEQ ID NO: 5233 - DNA, 2487 bp, Muscodor strobelii
  misc_feature: SGI EST ID NO. CUFF.13267.0
  misc_feature: Variant of the nucleotide sequence at SEQ ID NO 5231
ttcttcgcctcatctctgtaaattttacgatcgatagaatattttctctacattctttcgccaatttcgttttgagaagggttgctcacactgacgattttctttgtatgacgtcgaccatagaatttctgtcttagcatcttgcgctagccagtcagccaacctctgttacacgcacacatgcacgcgagctgacctacatcatctgcgacccgaggccggacgcctctttccctacattttttctcctacgccattcgaagcgagataggagaatcagatgcttcgcgcgccgataacaaggcgctgcgctgccccgtcaacatggcagcgcggcagcgtcgcaattcgtcctcacctcctccctagatcaacagtcaaacacccacctactcgatccctcacacaatccgcaacacgacaacaattcataaacgcaaatgaccgacctttctccccgctcaccccgccctctccttcctccctcggcaaaccaaaaacggcgcgagacttcaagcgcagtcgtcgctggggtcgccgattactcatccttggtttgacgacggggacactctatatcctcgatgatcaactattcgcttctggtgttgcaagatcgctgaggacgtttgggaatggactgtatgttgcgctcgactacaagatcaacttccgcgctgagccgtggtggggagagaccattacggatttacatcgacggagtgccgaaagattgtttgatgtcctgagggcgaatggaggcctgtatttgaagattggacaggcaatcgctatgcagtctgctgtcctgcctccagagttccagaagatgtttgcgcgcatgtttgatgatgcgccgcaggatgagtggaaggacgtcgagaaggttatacgacaagaattcggcgggaagagcgtcgaggaagtcttcggtgtttcgtttacgggcgaggagggaaagggactgatggagaggagggccagagctagcgctagtgttgcgcaggttcattgggcgagattaccggatggcagagaagtcgccgtcaagatccagaaaccagagattgcgaaacaggtcgggtgggatctgtgggcgtttaaggttgtgatgagggtttatacttggtggtttgatctgccgctttatggtattgtgcctttcatcaccgaacggttgttgttggagacggactttgagagtgaggcgaggaatagcgaggttatgcgggatttggtcaataatgagcccgcgctcaagggaagggtgtatgtcccgaaggtgtacgatgagtttacgacgaagagggtgcttgttactgagtggattgagggcgtgaggttgtgggataagagtgcgactggtgggaggtggctgggtggttatggaaaggggtcagcaggtgtccatggggagagactctcgttcacgaaggccgatatggacgctgcgaaacgagaattacggcaaaacacgctcaaagaacggctcaagcccgatcgcgagacctggaaaggtcggaacggaaaaggaggtctaggacttacgggcaaggaagttatgacgacgatggtcgacctattctccgcacaaattttcaaatggggcgtcgtacactgtgacccgcacccaggaaacatcttcatccgacgactaccctccggcaagcccgaactcgtcctcatcgatcacggcctgtacgtctacatgcagcccaagttccgccagcaatacgcactattctggaagagcctcatgacattcgacaacaatacgatagccgaaatcacagaacaatggggtatcaaagcacccgatctatttgcttctgcgacgctcatgcgaccctacgaaggaggagatgggagcacgaaagataaccttacgaaggaactcaccgggaagacacatcaagatcgccactacgagatgcaacagcgcatgaaacagggcgttcgggatgtgctggcggacgaggataagtggccaaaggagctcatcttcatcgggagaaatatgcggatagtgcaaggcaacaaccagttcatggggagccccgtgaaccggataaagatgatgggcaattgggcgagtgtgagtctgtatcaggatccgaacagaccttttcgggagagatttttgaacgcttggagacatgtactattcaagggtgtgttgttcgcgtctgatgtggttttctatacgtttaaggttagacagtggttaggctggggcggtggcatggaggatgaggttgagaagaggatgcaggttatggctaaggattttggtgttgagttgcagcatgaggtctttgagggatagagggtagtgagtgaggtgtaagtgaagagaatggaagaagtgatgataccattgtacaatctgacacgatagaaggggttatagacggggcggctagatgtagatacactactcagaatcatatacatcagacgtcaggcttatggaagcctgtgtattac

SEQ ID NO: 5234 - DNA, 2118 bp, Muscodor strobelii
  misc_feature: SGI cDNA ID NO. 561456
  misc_feature: Reduced expression when VOC is produced
  misc_feature: Encodes the peptide sequence at SEQ ID NO 5235
atgctacggccggcgacgccgctcgcggtctttctgtttatcgcctttgctttattgcttctctccgtgctgtccactccggtcatccaggccatccccctgggggtttacaacgacaagaccctcggccatatcgagtttggagtcttcgggtactgccacgacactggctgcagccctatagagattggatatgacacatccatcttcatacccgccgatgcctcccagttcgatctgccgcaggcgacgcgctcgacgttgtccgccatcttgatcatccatccggtcgctgcctttctaacgcttatcatgttcggtatggctgtcgctgctcacttccacgcgccctcgcattcgtcccgctatctttgtgggcttttcatcttcggtatcattgatttcctagcttgtctgctggcctttttgatcgacgttctgctcttcgtcccccatatcgcctggggctcttggctggtacttgccgcgactatcattgtcttgttgagtctaattgtctcttgtgctatgcgccgtactcttgtcggtaggaaagcaaggaagaagcgcatagcagagaacgctgaaatgagtggagagaactactacaaccgccaagcgcaacaagaccaggctctctccagcgccgccgcattgagtcatcagccgacggtccccagtatcagtggagccaatggaccagctgagagtctgcccacctttgcctcgtacgagaagagcaacgatcacagtagcgacgagcgcattccattaactgccaggacaccatctgagcgatcgcccaacaacccgcctatcgatatgaacgcatcggatctatctaatggccgatctctcactggatcaacagcagcatctctaccccgagatcagtatggaaacccgattggccaaaacgtggatgcctacggaatgcggagaggcccatctcaggatcgcatgaacggccgcggccgtggtggacctccagcaggctacagaggacgaggcgcatataacaggggcggatatggaaatggatacggtctgccacaaaatggtcgaggcggatacgggcctccaggccgaggtgcatatggtccggggccaaacggaagaggaggatacggccccagaggaggataccgcggaggggcaagaggaggcgcgagaggaccaccgccgccaggttatccaggtggtgcgattgcatatgaccgaagaccgtcagcaggatcccaaggcggttatggcccagaccgacaaatgacgtccgaccaaatgaacggcccctatgatgcaaatcccagcatgacaacggtcggaacaaacggaactggctacgcggcgtatcgccctggccaaggtgacgacttgccgcgtgctgagtctccgcctcccctaccgggtgctgagctaccgataggtcaagctgtggaaatggacgagaggactggtagtcccgcccagtcacctgcaggatttggccagttcaacaacaacccaagtaataacattagggatagcgatacggacgttgcgggcatgttggctctgcaggagggtagaatgccttcggctcagagggaggaacatttgagcgagggaagcaaatacagtcaggacatgccatatgtaccagctcggcaagcatggaaccaaggaccagggcggtcatcgccaagtgttccatcgcctctgcacattccgcagcgtccccaggagcttaccggcccgacgcccccacctcccggttctaacagtgggaactattacgaggatgtagaccctcgtttcgccgagccagctcctaaacctcagcagccgcccccggctgacgatcttcatctatcaccaggcgcgcgtagccccacggtgtcggagcggtcaggatttacctctgtttcgcaacggggtgtgaatccgcggtggaatccgcctccaggtcagggatatgggcagcaaatgatgccaccgcggcggcctgttaatcgtaatgacccgggtgtcaacatattaaacagcaacccggattttgagctcccgacacgccggggtccttctcggggtggagtcggtggaggcatgactcctgattcggcttacccaggtatataa

SEQ ID NO: 5235 - protein, 705 aa, Muscodor strobelii
  misc_feature: SGI Peptide ID NO. 561456
  misc_feature (24)..(172): Pfam Id: PF08739 Pfam Desc: pH-response regulator, PalI / Rim9
  misc_feature (1)..(703): NCBI GI: 256734095 Blast Desc: NECHADRAFT_91967 [Nectria haematococca mpVI 77-13-4]
  misc_feature (1)..(322): NCBI GI: 85115376 Blast Desc: NCU01996 [Neurospora crassa OR74A] gi|73621352|sp|Q7SFN5.1|PALI_NEUCR RecName: Full=pH-response regulator protein palI/rim-9 gi|28926657|gb|EAA35625.1| crassa to
  misc_feature (1)..(322): NCBI GI: 149209745 Blast Desc: MGCH7_ch7g355 [Magnaporthe grisea 70-15] gi|73621351|sp|Q51MB1.1|PALI_MAGGR RecName: Full=pH-response regulator protein palI/RIM9 gi|86196310|gb|EAQ70948.1| grisea
  misc_feature (1)..(322): NCBI GI: 145610238 Blast Desc: MGG_02630 [Magnaporthe grisea 70-15] gi|145017585|gb|EDK01948.1| MGG_02630 [Magnaporthe grisea 70-15]
  misc_feature (1)..(332): NCBI GI: 116193669 Blast Desc: CHGG_06552 [Chaetomium globosum CBS 148.51] gi|88182465|gb|EAQ89933.1| CHGG_06552 [Chaetomium globosum CBS 148.51]
  misc_feature (1)..(698): NCBI GI: 261200331 Blast Desc: pH signal transduction protein PalI [Ajellomyces dermatitidis SLH14081] gi|239593638|gb|EEQ76219.1| pH signal transduction protein PalI [Ajellomyces dermatitidis SLH14081] pH
  misc_feature (1)..(300): NCBI GI: 261353554 Blast Desc: pH-response regulator protein palI/rim-9 [Verticillium albo-atrum VaMs.102]
  misc_feature (1)..(322): NCBI GI: 171685089 Blast Desc: protein product [Podospora anserina] gi|170942505|emb|CAP68157.1| protein product [Podospora anserina]
  misc_feature (1)..(681): NCBI GI: 145234150 Blast Desc: An02g13150 [Aspergillus niger] gi|134057389|emb|CAK37943.1| protein product [Aspergillus niger]
  misc_feature (1)..(317): NCBI GI: 46128661 Blast Desc: FG08708.1 [Gibberella zeae PH-1]
  misc_feature: Useful for introducing or modulating the production of volatile compounds
MLRPATPLAVFLFIAFALLLLSVLSTPVIQAIPLGVYNDKTLGHIEFGVFGYCHDTGCSPIEIGYDTSIFIPADASQFDLPQATRSTLSAILIIHPVAAFLTLIMFGMAVAAHFHAPSHSSRYLCGLFIFGIIDFLACLLAFLIDVLLFVPHIAWGSWLVLAATIIVLLSLIVSCAMRRTLVGRKARKKRIAENAEMSGENYYNRQAQQDQALSSAAALSHQPTVPSISGANGPAESLPTFASYEKSNDHSSDERIPLTARTPSERSPNNPPIDMNASDLSNGRSLTGSTAASLPRDQYGNPIGQNVDAYGMRRGPSQDRMNGRGRGGPPAGYRGRGAYNRGGYGNGYGLPQNGRGGYGPPGRGAYGPGPNGRGGYGPRGGYRGGARGGARGPPPPGYPGGAIAYDRRPSAGSQGGYGPDRQMTSDQMNGPYDANPSMTTVGTNGTGYAAYRPGQGDDLPRAESPPPLPGAELPIGQAVEMDERTGSPAQSPAGFGQFNNNPSNNIRDSDTDVAGMLALQEGRMPSAQREEHLSEGSKYSQDMPYVPARQAWNQGPGRSSPSVPSPLHIPQRPQELTGPTPPPPGSNSGNYYEDVDPRFAEPAPKPQQPPPADDLHLSPGARSPTVSERSGFTSVSQRGVNPRWNPPPGQGYGQQMMPPRRPVNRNDPGVNILNSNPDFELPTRRGPSRGGVGGGMTPDSAYPGI

SEQ ID NO: 5236 - DNA, 3542 bp, Muscodor strobelii
  misc_feature: SGI EST ID NO. CUFF.13727.0
  misc_feature: Variant of the nucleotide sequence at SEQ ID NO 5234
ctgtattctcctccctctccaaactccccgttgaggtctctcccactcaacgtcgagttcaacggccgtcgctggattgtgatgcaacctttccttgttgtctctggatgaaggcccggcactgccaccatccaccgtcatacacccaccaccgctcttccattcgtacctcatcgtttgactcccgtttactcgtcactccatccgtcactcatttgccgaccacaatcattaattctaccaaaccacttacatactattacctcacataaactacgcccgcaaaccacgaaccgaccttgacggattggactggactggctgatcgattgatctctgtctgcgcatctcgaatgactggctaccgggtgaattaatgattcgattgattgtgtttgaattcgtcttgataaggacataattgctacacatgtcgccgacacgatccatacttctgaccccgaaccgaacattatctcaacgactggaataacgcttttgcaagacgacaacacacacgggctccgtctgcagtatccacgcttcttctcagtgtcgcggctctctttgggccagcgagctgacgagccgccatcatgctacggccggcgacgccgctcgcggtctttctgtttatcgcctttgctttattgcttctctccgtgctgtccactccggtcatccaggccatccccctgggggtttacaacgacaagaccctcggccatatcgagtttggagtcttcgggtactgccacgacactggctgcagccctatagagattggatatgacacatgtatgcccctgatgctctgatcatagcctccagcactgaccaatgaatctgtagccatcttcatacccgccgatgcctcccagttcgatctgccgcaggcgacgcgctcgacgttgtccgccatcttgatcatccatccggtcgctgcctttctaacgcttatcatgttcggtatggctgtcgctgctcacttccacgcgccctcgcattcgtcccgctatctttgtgggcttttcatcttcggtatcattgatttcctagcttgtctgctggcctttttgatcgacgttctgctcttcgtcccccatatcgcctggggctcttggctggtacttgccgcgactatcattgtcttgttgagtctaattgtctcttgtgctatgcgccgtactcttgtcggtaggaaagcaaggaagaagcgcatagcagagaacgctgaaatgagtggagagaactactacaaccgccaagcgcaacaagaccaggctctctccagcgccgccgcattgagtcatcagccgacggtccccagtatcagtggagccaatggaccagctgagagtctgcccacctttgcctcgtacgagaagagcaacgatcacagtagcgacgagcgcattccattaactgccaggacaccatctgagcgatcgcccaacaacccgcctatcgatatgaacgcatcggatctatctaatggccgatctctcactggatcaacagcagcatctctaccccgagatcagtatggaaacccgattggccaaaacgtggatgcctacggaatgcggagaggcccatctcaggatcgcatgaacggccgcggccgtggtggacctccagcaggctacagaggacgaggcgcatataacaggggcggatatggaaatggatacggtctgccacaaaatggtcgaggcggatacgggcctccaggccgaggtgcatatggtccggggccaaacggaagaggaggatacggccccagaggaggataccgcggaggggcaagaggaggcgcgagaggaccaccgccgccaggttatccaggtggtgcgattgcatatgaccgaagaccgtcagcaggatcccaaggcggttatggcccagaccgacaaatgacgtccgaccaaatgaacggcccctatgatgcaaatcccagcatgacaacggtcggaacaaacggaactggctacgcggcgtatcgccctggccaaggtgacgacttgccgcgtgctgagtctccgcctcccctaccgggtgctgagctaccgataggtcaagctgtggaaatggacgagaggactggtagtcccgcccagtcacctgcaggatttggccagttcaacaacaacccaagtaataacattagggatagcgatacggacgttgcgggcatgttggctctgcaggagggtagaatgccttcggctcagagggaggaacatttgagcgagggaagcaaatacagtcaggacatgccatatgtaccagctcggcaagcatggaaccaaggaccagggcggtcatcgccaagtgttccatcgcctctgcacattccgcagcgtccccaggagcttaccggcccgacgcccccacctcccggttctaacagtgggaactattacgaggatgtagaccctcgtttcgccgagccagctcctaaacctcagcagccgcccccggctgacgatcttcatctatcaccaggcgcgcgtagccccacggtgtcggagcggtcaggatttacctctgtttcgcaacggggtgtgaatccgcggtggaatccgcctccaggtcagggatatgggcagcaaatgatgccaccgcggcggcctgttaatcgtaatgacccgggtgtcaacatattaaacagcaacccggattttgagctcccgacacgccggggtccttctcggggtggagtcggtggaggcatgactcctgattcggcttacccaggtatataacgagcgccttattttcggacgcggatattttcattttcacttttggcaaattcttgaagtgtacgaactctacgctgtgggagcatacacgcccattcctttcatgggcattctagtgctgtaatgttcggagaaggctactacggaaatccttatcttcatcttcacacctccttcgatatacccattctcagtacagcgcctcgattctcccgccgactcttctcttcttcccggagcgctagctgttgtgcttttatgtcccgatagactttccgcgcacaacggcaatcaataattggccgtcctcgaagttttgccatcgatggactggcactcgacgtataaaacttttcctttacttggtcatggcgttgctgcatgaataggcggttgtaagatgcagatatttgccggcacgttgagaggtgaattatggtctgtcagcaaatggatacgctcttggagatgggcgactgggcttttaaagactttgtagtgaggagatggactggctaccaaagtcggcgccgcggccgaagctcgggcgtgtgtggtggtggtaatgacagacagatctgcaagcggtgtataggtaacaacaatactgccaactcaaggaagggctctaccgctctacttgtcgaacagacaataagaagaagtaaaagcgataacgactgccaacatgatcttactctgtgtgaagtgctcaatgacacatactccagcctacatggattcgcttatggtacttgccttaaggttgccaat

SEQ ID NO: 5237 - DNA, 1710 bp, Muscodor strobelii
  misc_feature: SGI cDNA ID NO. 561457
  misc_feature: Reduced expression when VOC is produced
  misc_feature: Encodes the peptide sequence at SEQ ID NO 5238
atgccatcatacacctaccggcccatcgaagaagaggatgaaatccgaatactcgttcttcttccacacggcgaggacgcgaacgcgcctatccagtgccgtctcaaacacgtctacctaacagagcgacctgaatacgaagcactttcttacacatggggcgaccaaacccagcaattccccattactgtcgacgaaaccgacagcacagtgaacgtaggacaaaactgtatctcggcactcaaagcactgcgccaagcagataaagagagacccctatggatcgacgcgctatgcatcaaccagcaagatatcgcagagaaaactcgacagatccctataattggggatatatacacgtccgcacgtcaaaccgtcatctatctccaatatgacggaccaaacgaagcattcaagggaaaaggcgcagggcctgaactgcagcgatgttgggatgcgcacaccggacctttggaaggagaggcacaacctccactagacgataccgcgaagaaagagctatttaacgttgagaattatccctggttccgccgctcctggataatccaagaaaccgtcctctcattctctcgcaccgtcctctgcgggccgttcaaatggtcattcgagaccttcatgttcctcgcgccaaaccggaaagacctcgaagtcatcagaatctccgaggattatgccatcaatcggagtaacatgggaggctggaaccacgtctgggatggaacgattcgtcaacggatgccgggcgacatgctgcctagttctgcgctggagtatctcgttgatactagggagttcgggtgtaagttgaagagtgatcgggtatattctattttgagtctttttaatccgcagctgccgattgaggtcgattattcgaggacatgggaacaagtttgtgaggatttgagcgcggcgttgttgcggattggtgattcgagatttctctatagtacgaagaggaaagggtggagagcggattgggacacgattacgcaggatcttgggggtgaggatgtccatcgtattggcatgagtagggcgatgtttgctgttaggcaggagttaaggtgggcgagggtgccgagaggagatgatgggagtatgaattttatcgggtttaaaattggagttgtcacgaagattagtggggagaaattgagtgggagtaaagatgaaaagaaaattaaggagcggtgggatatggttttgaaggatcttggtctgtcggtcagagagaaggagagcggtgcttggccgggcattcatattcagaagaggaatcgggagggcgttaagtggtatcgtgattggatcaacggtgaggaggacgaagaggatgaatcgcgtggactttcggaacagccgcgcggtggattttcgtctaccagtgcgctcttttacaaagacaggccagtgtttctctgcgaggaagaaggtattgtgggtatagggacacaagatctccagattggtgatgagatctggtatatttgcggtttggatgtccccatatgcgcgatcaggcctattgccagacatgtcgagacgcaaggtgatgttacgatggaggctgttgaggcggagatggtcggcttgtgtttcctgggtgtgaataacgatatgaaggcgatgcaaccaacagacgagattttcccgcatgggggtttcaaggtagtctcatttgcatag

SEQ ID NO: 5238 - protein, 569 aa, Muscodor strobelii
  misc_feature: SGI Peptide ID NO. 561457
  misc_feature (46)..(191): Pfam Id: PF06985 Pfam Desc: Heterokaryon incompatibility protein (HET)
  misc_feature (1)..(334): NCBI GI: 256730222 Blast Desc: NECHADRAFT_82497 [Nectria haematococca mpVI 77-13-4]
  misc_feature (3)..(314): NCBI GI: 256722966 Blast Desc: NECHADRAFT_86875 [Nectria haematococca mpVI 77-13-4]
  misc_feature (4)..(338): NCBI GI: 256724619 Blast Desc: NECHADRAFT_95927 [Nectria haematococca mpVI 77-13-4]
  misc_feature (4)..(363): NCBI GI: 156061491 Blast Desc: SS1G_02890 [Sclerotinia sclerotiorum 1980] gi|154700292|gb|EDO00031.1| SS1G_02890 [Sclerotinia sclerotiorum 1980]
  misc_feature (1)..(347): NCBI GI: 169619623 Blast Desc: SNOG_13010 [Phaeosphaeria nodorum SN15] gi|111058690|gb|EAT79810.1| SNOG_13010 [Phaeosphaeria nodorum SN15]
  misc_feature (1)..(516): NCBI GI: 256723257 Blast Desc: NECHADRAFT_102011 [Nectria haematococca mpVI 77-13-4]
  misc_feature (6)..(213): NCBI GI: 115449831 Blast Desc: [Aspergillus terreus NIH2624] gi|114187656|gb|EAU29356.1| [Aspergillus terreus NIH2624]
  misc_feature (4)..(329): NCBI GI: 170940109 Blast Desc: protein product [Podospora anserina]
  misc_feature (4)..(401): NCBI GI: 171678763 Blast Desc: protein product [Podospora anserina] gi|170937451|emb|CAP62109.1| protein product [Podospora anserina]
  misc_feature (4)..(289): NCBI GI: 46109906 Blast Desc: FG01835.1 [Gibberella zeae PH-1]
  misc_feature: Useful for introducing or modulating the production of volatile compounds
MPSYTYRPIEEEDEIRILVLLPHGEDANAPIQCRLKHVYLTERPEYEALSYTWGDQTQQFPITVDETDSTVNVGQNCISALKALRQADKERPLWIDALCINQQDIAEKTRQIPIIGDIYTSARQTVIYLQYDGPNEAFKGKGAGPELQRCWDAHTGPLEGEAQPPLDDTAKKELFNVENYPWFRRSWIIQETVLSFSRTVLCGPFKWSFETFMFLAPNRKDLEVIRISEDYAINRSNMGGWNHVWDGTIRQRMPGDMLPSSALEYLVDTREFGCKLKSDRVYSILSLFNPQLPIEVDYSRTWEQVCEDLSAALLRIGDSRFLYSTKRKGWRADWDTITQDLGGEDVHRIGMSRAMFAVRQELRWARVPRGDDGSMNFIGFKIGVVTKISGEKLSGSKDEKKIKERWDMVLKDLGLSVREKESGAWPGIHIQKRNREGVKWYRDWINGEEDEEDESRGLSEQPRGGFSSTSALFYKDRPVFLCEEEGIVGIGTQDLQIGDEIWYICGLDVPICAIRPIARHVETQGDVTMEAVEAEMVGLCFLGVNNDMKAMQPTDEIFPHGGFKVVSFA

SEQ ID NO: 5239 - DNA, 3104 bp, Muscodor strobelii
  misc_feature: SGI EST ID NO. CUFF.13282.0
  misc_feature: Variant of the nucleotide sequence at SEQ ID NO 5237
gaaatgtatagtggcaaagatctttatataatcagtccggtccgctcaaagcggcgcgccttgaaatatgagaatgacaaaccgaacgcatgaacagagatccgtgacaaccgttcaagtcaaaagtccaatccgcttagtgagtacttgatcaatcaagaacaacgccagatacccatcttcgcgctcagtcaacatgccatcatacacctaccggcccatcgaagaagaggatgaaatccgaatactcgttcttcttccacacggcgaggacgcgaacgcgcctatccagtgccgtctcaaacacgtctacctaacagagcgacctgaatacgaagcactttcttacacatggggcgaccaaacccagcaattccccattactgtcgacgaaaccgacagcacagtgaacgtaggacaaaactgtatctcggcactcaaagcactgcgccaagcagataaagagagacccctatggatcgacgcgctatgcatcaaccagcaagatatcgcagagaaaactcgacagatccctataattggggatatatacacgtccgcacgtcaaaccgtcatctatctccaatatgacggaccaaacgaagcattcaagggaaaaggcgcagggcctgaactgcagcgatgttgggatgcgcacaccggacctttggaaggagaggcacaacctccactagacgataccgcgaagaaagagctatttaacgttgagaattatccctggttccgccgctcctggataatccaagaaaccgtcctctcattctctcgcaccgtcctctgcgggccgttcaaatggtcattcgagaccttcatgttcctcgcgccaaaccggaaagacctcgaagtcatcagaatctccgaggattatgccatcaatcggagtaacatgggaggctggaaccacgtctgggatggaacgattcgtcaacggatgccgggcgacatgctgcctagttctgcgctggagtatctcgttgatactagggagttcgggtgtaagttgaagagtgatcgggtatattctattttgagtctttttaatccgcagctgccgattgaggtcgattattcgaggacatgggaacaagtttgtgaggatttgagcgcggcgttgttgcggattggtgattcgagatttctctatagtacgaagaggaaagggtggagagcggattgggacacgattacgcaggatcttgggggtgaggatgtccatcgtattggcatgagtagggcgatgtttgctgttaggcaggagttaaggtgggcgagggtgccgagaggagatgatgggagtatgaattttatcgggtttaaaattggagttgtcacgaagattagtggggagaaattgagtgggagtaaagatgaaaagaaaattaaggagcggtgggatatggttttgaaggatcttggtctgtcggtcagagagaaggagagcggtgcttggccgggcattcatattcagaagaggaatcgggagggcgttaagtggtatcgtgattggatcaacggtgaggaggacgaagaggatgaatcgcgtggactttcggaacagccgcgcggtggattttcgtctaccagtgcgctcttttacaaagacaggccagtgtttctctgcgaggaagaaggtattgtgggtatagggacacaagatctccagattggtgatgagatctggtatatttgcggtttggatgtccccatatgcgcgatcaggcctattgccagacatgtcgagacgcaaggtgatgttacgatggaggctgttgaggcggagatggtcggcttgtgtttcctgggtgtgaataacgatatgaaggcgatgcaaccaacagacgagattttcccgcatgggggtttcaaggtagtctcatttgcatagatacctgccaggctagctattcttcacatactattgctcttcgatttcacgttcccaattcatataagtgacatggttggacaatattgatgatctcttcaattatcgaaggtgtgctgcaacacagacatgactccaggctcgaatttgcgagactacatgtagtgatgtttccgtcgtgtttaactgaattttgaggtcttccaacagtctttctaatcaacacgcgcaaaaactaacgtacacaattgaagagacgcgatgccgacgaccgagtacgtcatatcctcctttacaaactaatgttcatgtctcccgccgtataatacggacaattgatccacgtaatcgctgagtaccttctgcgaagactcgcacgactgcttaatttcttcaaaacgccgcatccactgctcccagaattttgcatcatggttgaagttgatcttcgttttttgatgaaagactgatacgtcgagaatgcctgcgaagtcttgaccgaaaattttactgttcatatcttcaacatggtgctgcagctctctacagctctggatgtagttgttgatatttgtagtccaagtctccttctgatcctgatcgtatgtgtagggaggctttgaagcgcgttcttgttcgagacagtctaggttatagaggagatacccgactgatcgacaacgcacccgacacatttcaaggtaatcgtctgcagcgttatacacgtctttcataagtttgtcgtcgaccacccaaagagtttcctctgcttctgggcttcttctgataatgtgttcaataaagtactcatccatgtaccgcgcaaccatagcatcgaaactgaaacatttcacacgagtttcgggcaactcatcactgattagggtaaaaaatcgattgatgatgtacatgcccatgacatctgcggtgttgaacattgactgatgtataagcaagcggtattcctcgcctgtcgaccatttggcctcacaaaacttcaaacgtcggttatccgggctgctctcctctagctgtggccctgacatggtgatgattcgttgccttttgctcactaaaaagaagtttatgagtgttgaaaggttaaatttgaaagatattctgtcgatgaatcggtggaatctcagtaggtgtagcgtagtgggctaaattggaagggccaaatggtcatcgaacgtag

SEQ ID NO: 5240 - DNA, 747 bp, Muscodor strobelii
  misc_feature: SGI cDNA ID NO. 561458
  misc_feature: Elevated expression when VOC is produced
  misc_feature: Encodes the peptide sequence at SEQ ID NO 5241
atgtcagggccacagctagaggagagcagcccggataaccgacgtttgaagttttgtgaggccaaatggtcgacaggcgaggaataccgcttgcttatacatcagtcaatgttcaacaccgcagatgtcatgggcatgtacatcatcaatcgattttttaccctaatcagtgatgagttgcccgaaactcgtgtgaaatgtttcagtttcgatgctatggttgcgcggtacatggatgagtactttattgaacacattatcagaagaagcccagaagcagaggaaactctttgggtggtcgacgacaaacttatgaaagacgtgtataacgctgcagacgattaccttgaaatgtgtcgggtgcgttgtcgatcagtcgggtatctcctctataacctagactgtctcgaacaagaacgcgcttcaaagcctccctacacatacgatcaggatcagaaggagacttggactacaaatatcaacaactacatccagagctgtagagagctgcagcaccatgttgaagatatgaacagtaaaattttcggtcaagacttcgcaggcattctcgacgtatcagtctttcatcaaaaaacgaagatcaacttcaaccatgatgcaaaattctgggagcagtggatgcggcgttttgaagaaattaagcagtcgtgcgagtcttcgcagaaggtactcagcgattacgtggatcaattgtccgtattatacggcgggagacatgaacattag

SEQ ID NO: 5241 - protein, 248 aa, Muscodor strobelii
  misc_feature: SGI Peptide ID NO. 561458
  misc_feature: Useful for introducing or modulating the production of volatile compounds
MSGPQLEESSPDNRRLKFCEAKWSTGEEYRLLIHQSMFNTADVMGMYIINRFFTLISDELPETRVKCFSFDAMVARYMDEYFIEHIIRRSPEAEETLWVVDDKLMKDVYNAADDYLEMCRVRCRSVGYLLYNLDCLEQERASKPPYTYDQDQKETWTTNINNYIQSCRELQHHVEDMNSKIFGQDFAGILDVSVFHQKTKINFNHDAKFWEQWMRRFEEIKQSCESSQKVLSDYVDQLSVLYGGRHEH

SEQ ID NO: 5242 - DNA, 3104 bp, Muscodor strobelii
  misc_feature: SGI EST ID NO. CUFF.13282.0
  misc_feature: Variant of the nucleotide sequence at SEQ ID NO 5240
ctacgttcgatgaccatttggcccttccaatttagcccactacgctacacctactgagattccaccgattcatcgacagaatatctttcaaatttaacctttcaacactcataaacttctttttagtgagcaaaaggcaacgaatcatcaccatgtcagggccacagctagaggagagcagcccggataaccgacgtttgaagttttgtgaggccaaatggtcgacaggcgaggaataccgcttgcttatacatcagtcaatgttcaacaccgcagatgtcatgggcatgtacatcatcaatcgattttttaccctaatcagtgatgagttgcccgaaactcgtgtgaaatgtttcagtttcgatgctatggttgcgcggtacatggatgagtactttattgaacacattatcagaagaagcccagaagcagaggaaactctttgggtggtcgacgacaaacttatgaaagacgtgtataacgctgcagacgattaccttgaaatgtgtcgggtgcgttgtcgatcagtcgggtatctcctctataacctagactgtctcgaacaagaacgcgcttcaaagcctccctacacatacgatcaggatcagaaggagacttggactacaaatatcaacaactacatccagagctgtagagagctgcagcaccatgttgaagatatgaacagtaaaattttcggtcaagacttcgcaggcattctcgacgtatcagtctttcatcaaaaaacgaagatcaacttcaaccatgatgcaaaattctgggagcagtggatgcggcgttttgaagaaattaagcagtcgtgcgagtcttcgcagaaggtactcagcgattacgtggatcaattgtccgtattatacggcgggagacatgaacattagtttgtaaaggaggatatgacgtactcggtcgtcggcatcgcgtctcttcaattgtgtacgttagtttttgcgcgtgttgattagaaagactgttggaagacctcaaaattcagttaaacacgacggaaacatcactacatgtagtctcgcaaattcgagcctggagtcatgtctgtgttgcagcacaccttcgataattgaagagatcatcaatattgtccaaccatgtcacttatatgaattgggaacgtgaaatcgaagagcaatagtatgtgaagaatagctagcctggcaggtatctatgcaaatgagactaccttgaaacccccatgcgggaaaatctcgtctgttggttgcatcgccttcatatcgttattcacacccaggaaacacaagccgaccatctccgcctcaacagcctccatcgtaacatcaccttgcgtctcgacatgtctggcaataggcctgatcgcgcatatggggacatccaaaccgcaaatataccagatctcatcaccaatctggagatcttgtgtccctatacccacaataccttcttcctcgcagagaaacactggcctgtctttgtaaaagagcgcactggtagacgaaaatccaccgcgcggctgttccgaaagtccacgcgattcatcctcttcgtcctcctcaccgttgatccaatcacgataccacttaacgccctcccgattcctcttctgaatatgaatgcccggccaagcaccgctctccttctctctgaccgacagaccaagatccttcaaaaccatatcccaccgctccttaattttcttttcatctttactcccactcaatttctccccactaatcttcgtgacaactccaattttaaacccgataaaattcatactcccatcatctcctctcggcaccctcgcccaccttaactcctgcctaacagcaaacatcgccctactcatgccaatacgatggacatcctcacccccaagatcctgcgtaatcgtgtcccaatccgctctccaccctttcctcttcgtactatagagaaatctcgaatcaccaatccgcaacaacgccgcgctcaaatcctcacaaacttgttcccatgtcctcgaataatcgacctcaatcggcagctgcggattaaaaagactcaaaatagaatatacccgatcactcttcaacttacacccgaactccctagtatcaacgagatactccagcgcagaactaggcagcatgtcgcccggcatccgttgacgaatcgttccatcccagacgtggttccagcctcccatgttactccgattgatggcataatcctcggagattctgatgacttcgaggtctttccggtttggcgcgaggaacatgaaggtctcgaatgaccatttgaacggcccgcagaggacggtgcgagagaatgagaggacggtttcttggattatccaggagcggcggaaccagggataattctcaacgttaaatagctctttcttcgcggtatcgtctagtggaggttgtgcctctccttccaaaggtccggtgtgcgcatcccaacatcgctgcagttcaggccctgcgccttttcccttgaatgcttcgtttggtccgtcatattggagatagatgacggtttgacgtgcggacgtgtatatatccccaattatagggatctgtcgagttttctctgcgatatcttgctggttgatgcatagcgcgtcgatccataggggtctctctttatctgcttggcgcagtgctttgagtgccgagatacagttttgtcctacgttcactgtgctgtcggtttcgtcgacagtaatggggaattgctgggtttggtcgccccatgtgtaagaaagtgcttcgtattcaggtcgctctgttaggtagacgtgtttgagacggcactggataggcgcgttcgcgtcctcgccgtgtggaagaagaacgagtattcggatttcatcctcttcttcgatgggccggtaggtgtatgatggcatgttgactgagcgcgaagatgggtatctggcgttgttcttgattgatcaagtactcactaagcggattggacttttgacttgaacggttgtcacggatctctgttcatgcgttcggtttgtcattctcatatttcaaggcgcgccgctttgagcggaccggactgattatataaagatctttgccactatacatttc

SEQ ID NO: 5243 - DNA, 1596 bp, Muscodor strobelii
  misc_feature: SGI cDNA ID NO. 561459
  misc_feature: Encodes the peptide sequence at SEQ ID NO 5244
atgagtcaacaacaaccaccccatcgccgttccagctttggaaacctacttcgacgcacgaagtccggcgaccttggcaagagcggaaggaaggcctcccagggccaacccaaagaaccaatccctcgatccccccctcgactcccagctctctacaatggtgcatctccccagcctctgcaggagtttggaggtgatactcgcccagactctctggccatagctactggcaaggctgatcactcttttcaccattatcctccccgtgcctccattgatcctggacgcccgtcgatgtcctccaacttcgccgcccctcccgtgccaccagttcccaacggtgcgtgggtcgacccctacgcccgtaccgagagtatgacacaccgcggccgatacagctatgcgagtagcgccatcagcaccatcaacagccctagaagggttcgtaggaggaaagatcctactccattcaacattctggtcatcggcactcgtggttcgggcaagtcttctttcctcgagttcctcaagacatcccttgctctacctgccaagaagagatctcaacgacacactgagatcgaacatgaggtcacatcctccgctaccccgtcgggcaacttcattccgcactatctcgagagcgaaatcgacggagagcgtatcggcttgaccatctgggactctgagggcttagagaagaacgtggtggatctacagctgcgcgagatgtctacgttcttggaaggcaaattcgaggagacgtttgcagaagagatgaaagtgattcgatcgcctggcgtacaggatacgcacatccacgctgtctttctcgtgctcgatcctgttcgccttgaccgcaatattgctgcttccaaagctgcttcttcgaacggatactcgggaaagcacactcaggatacgactcgtttcgttggtgggttggacgaagacctagaccttcaagtcatgcggaccttgcaaggaaagacaaccgtcatcccggtcatttcgaaagcggacaccgtaaccaccgctcacatgaatttcttgaagaaaactgtgtgggccagtctcaagaaggccaattttgatcctcttgaggttctgggtcttgatgacgacaccgaaagctctgcgggttccagcagaattgacgagggtgaagagccagacgacgaagccgtagtgtcggacgaagaagacgacgtggtccagaagcccgcgccggtctccgatcttgaggataacgacgaagttgaaggcgagggtcgatcttcttctgcatctaagcgtaaatccaacggttcgcaacacccggtcaagcctctcgacgcggatacctcggatgagcttcctttcctgcctatgtcgattataagccccgacctgtacgagcctggcgcaactgatcggaagttcccctggggcacggcgaacccctacgatcccgctcactgtgacttcacccgtctcaaggacgccgtcttcagtgagtggcgcagtgagctgcgcgaggccagccgagaacagtggtacgagggctggcgaaccagtcgactgaagcaccgcgaaccttcgaatcgacgccgttag

SEQ ID NO: 5244 - protein, 531 aa, Muscodor strobelii
  misc_feature: SGI Peptide ID NO. 561459
  misc_feature (156)..(528): Pfam Id: PF00735 Pfam Desc: Septin
  misc_feature (472)..(528): Pfam Id: PF00735 Pfam Desc: Septin
  misc_feature (7)..(524): NCBI GI: 116193663 Blast Desc: CHGG_06549 [Chaetomium globosum CBS 148.51] gi|88182462|gb|EAQ89930.1| CHGG_06549 [Chaetomium globosum CBS 148.51]
  misc_feature (7)..(531): NCBI GI: 171685093 Blast Desc: protein product [Podospora anserina] gi|170942507|emb|CAP68159.1| protein product [Podospora anserina]
  misc_feature (6)..(525): NCBI GI: 145610240 Blast Desc: MGG_02626 [Magnaporthe grisea 70-15] gi|145017587|gb|EDK01950.1| MGG_02626 [Magnaporthe grisea 70-15]
  misc_feature (9)..(531): NCBI GI: 256733589 Blast Desc: NECHADRAFT_36570 [Nectria haematococca mpVI 77-13-4]
  misc_feature (5)..(531): NCBI GI: 261353552 Blast Desc: Sep4b [Verticillium albo-atrum VaMs.102]
  misc_feature (9)..(530): NCBI GI: 154293469 Blast Desc: BC1G_13886 [Botryotinia fuckeliana B05.10] gi|150845268|gb|EDN20461.1| BC1G_13886 [Botryotinia fuckeliana B05.10]
  misc_feature (9)..(530): NCBI GI: 156057185 Blast Desc: SS1G_04323 [Sclerotinia sclerotiorum 1980] gi|154702109|gb|EDO01848.1| SS1G_04323 [Sclerotinia sclerotiorum 1980]
  misc_feature (1)..(531): NCBI GI: 46128665 Blast Desc: FG08710.1 [Gibberella zeae PH-1]
  misc_feature (34)..(523): NCBI GI: 85115384 Blast Desc: NCU01998 [Neurospora crassa OR74A] gi|28926659|gb|EAA35627.1| NCU01998 [Neurospora crassa OR74A] gi|38566878|emb|CAE76183.1| septin aspE [Neurospora crassa]
  misc_feature (9)..(523): NCBI GI: 225559291 Blast Desc: conserved [Ajellomyces capsulatus G186AR]
MSQQQPPHRRSSFGNLLRRTKSGDLGKSGRKASQGQPKEPIPRSPPRLPALYNGASPQPLQEFGGDTRPDSLAIATGKADHSFHHYPPRASIDPGRPSMSSNFAAPPVPPVPNGAWVDPYARTESMTHRGRYSYASSAISTINSPRRVRRRKDPTPFNILVIGTRGSGKSSFLEFLKTSLALPAKKRSQRHTEIEHEVTSSATPSGNFIPHYLESEIDGERIGLTIWDSEGLEKNVVDLQLREMSTFLEGKFEETFAEEMKVIRSPGVQDTHIHAVFLVLDPVRLDRNIAASKAASSNGYSGKHTQDTTRFVGGLDEDLDLQVMRTLQGKTTVIPVISKADTVTTAHMNFLKKTVWASLKKANFDPLEVLGLDDDTESSAGSSRIDEGEEPDDEAVVSDEEDDVVQKPAPVSDLEDNDEVEGEGRSSSASKRKSNGSQHPVKPLDADTSDELPFLPMSIISPDLYEPGATDRKFPWGTANPYDPAHCDFTRLKDAVFSEWRSELREASREQWYEGWRTSRLKHREPSNRRR

SEQ ID NO: 5245 - DNA, 3642 bp, Muscodor strobelii
  misc_feature: SGI EST ID NO. CUFF.13444.0
  misc_feature: Variant of the nucleotide sequence at SEQ ID NO 5243
gtgatttccaccaagtacattttatcgatgtcttcgtcctggaagctcccctgactcaatccatctcacgcaccgttgacgcttcgtcatcactcactcgtttattctgtgtgttgtcgcgggtaatgactgacttgtcgttgcatttttctttttcgctcacattcccaggagcaatttcatgctttatgcgacatcaccatcgccacgagcgaccaatccgtgccgcagctgcatactgcccacagtgagaccctgaataaactgggacagaacattgaaaggcaagagcatcttcgaagaccatctttgcgatacgagcgacgcctaccttccgaaccactctcaaacgagacttgtctaagacttcaatttgcaacaccgaccgcaagcgatagtatttgcttggagcgcgcaattgactgcagagaatctcggtagtttctggcagcttgtcatccaagtcgcaagattcagactccgttggttctttgcatagtgccaacgtaaaatatcgacgacgctttgttctggaaaaattgccagcattggtatatttctaattctcgtcaaacgagtgcaacaaagaaagtacctatcgtacaaccatcccatcctattccatctttcatgcaacgccgcctatgcttgcgtaactccattgcgacagacttccactcgtcaatttaaggtgtccccccagagcaaccacctctctccaaaagacaggcgcacctgcagctcttctctgagtaccgcattgcttgtccagtcttgcctacttgcgttgttgcatattgtcatacgagcttggaaactgcgatcgggactttcctcttgagtggtatctcatcatacgcggagcagtcatcgtctgtggaatcaacggcgacgcgccgttatccactttgggccggctccttgtagcttccagattaacttcatctagtccactaagcgtactttctaaacctcccaccgtttcatcatcgccgttacctcgatactcgctcctgccacgaaagcagccggtgtaccggattacgcacctgcctgagattcacatttgatattgcttgtggacattcgcgccccctctcggagaacttgtcaacatgagtcaacaacaaccaccccatcgccgttccagctttggaaacctacttcgacgcacgaagtccggcgaccttggcaagagcggaaggaaggcctcccagggccaacccaaagaaccaatccctcgatccccccctcgactcccagctctctacaatggtgcatctccccagcctctgcaggagtttggaggtgatactcgcccagactctctggccatagctactggcaaggctgatcactcttttcaccattatcctccccgtgcctccattgatcctggacgcccgtcgatgtcctccaacttcgccgcccctcccgtgccaccagttcccaacggtgcgtgggtcgacccctacgcccgtaccgagagtatgacacaccgcggccgatacagctatgcgagtagcgccatcagcaccatcaacagccctagaagggttcgtaggaggaaagatcctactccattcaacattctggtcatcggcactcgtggttcgggcaagtcttctttcctcgagttcctcaagacatcccttgctctacctgccaagaagagatctcaacgacacactgagatcgaacatgaggtcacatcctccgctaccccgtcgggcaacttcattccgcactatctcgagagcgaaatcgacggagagcgtatcggcttgaccatctgggactctgagggcttagagaagaacgtggtggatctacagctgcgcgagatgtctacgttcttggaaggcaaattcgaggagacgtttgcagaagagatgaaagtgattcgatcgcctggcgtacaggatacgcacatccacgctgtctttctcgtgctcgatcctgttcgccttgaccgcaatattgctgcttccaaagctgcttcttcgaacggatactcgggaaagcacactcaggatacgactcgtttcgttggtgggttggacgaagacctagaccttcaagtcatgcggaccttgcaaggaaagacaaccgtcatcccggtcatttcgaaagcggacaccgtaaccaccgctcacatgaatttcttgaagaaaactgtgtgggccagtctcaagaaggccaattttgatcctcttgaggttctgggtcttgatgacgacaccgaaagctctgcgggttccagcagaattgacgagggtgaagagccagacgacgaagccgtagtgtcggacgaagaagacgacgtggtccagaagcccgcgccggtctccgatcttgaggataacgacgaagttgaaggcgagggtcgatcttcttctgcatctaagcgtaaatccaacggttcgcaacacccggtcaagcctctcgacgcggatacctcggatgagcttcctttcctgcctatgtcgattataagccccgacctgtacgagcctggcgcaactgatcggaagttcccctggggcacggcgaacccctacgatcccgctcactgtgacttcacccgtctcaaggacgccgtcttcagtgagtggcgcagtgagctgcgcgaggccagccgagaacagtggtacgagggctggcgaaccagtcgactgaagcaccgcgaaccttcgaatcgacgccgttaggcaatgcgatgggattcgcgaggttttccccgtttttacagatgagacgttttgccgcaactccgccataccgcatgtctagcgatgtctgtttccttgtttctcatacctaccagcctggacttgccgcctctttcttttgatttgtttacgaccttcaccaacaatacccctcaattcgttgtcattatgtacgccatccctgttgattgtaccttggacgattgtgtatcaacttcgcatttgtacctctgcactttcgtcactggttgttgagcaagagaatggccctcgcaggcgctggctagatcacatgtggcggaacacgcaaaatgtctatctttcctggatcctggctcactagcttcaaaagtaaggaaatagcttgggagtcaagacccgaaaatggataggagaagaaattaggaaatggagacctctctctgggtatgttttgatcaagagcatatctgtattgatcttactcattgctttcgtgcttgggcgaaaagtacggacgagaggaaggatgtggcagggagcttttttgtgttgatgacgatgtgttattctttttttctggcagaaacagaaaccgcagtcgcatatcttcttgtctgtctgttgaggcttaggtacgctacattgccataaaatgttaggatttttgttctgttacagctggttcctatctgatttgacttgattgtgatttgtgggatatctatgaaagttgagttgagtcgggggggagaaaaagtgtacgtggaggaaaggcgccaggagttataggggagatctgcgttaggtactatgccacgttgtttcgcgtctaggcttgtcgtccttgaagaggctgggctctacgaatgtctgagttgacactgttgtgtctcttgagtgatactatgaaggctagccttattttaca

SEQ ID NO: 5246 - DNA, 1245 bp, Muscodor strobelii
  misc_feature: SGI cDNA ID NO. 561460
  misc_feature: Encodes the peptide sequence at SEQ ID NO 5247
atgcgtcttttgaatgtgtccaccttgcgtctcgaatctttcacagacgagcgcacggcgccgccgtatgccattctatcacacacatgggacgatgaggagattctattcgaagatgtggagaggctacccttttccacctggacacggatgaagggcttcaccaaattgagtatcagtgcgcagcaagctcagaaagacgggtatcagtatctatggatcgatacctgctgtatcgacaaggggagcagcgccgagttgtcggaagcaattaactcaatgttcagctggtacgcttgtgcaaaagtctgctacgcatatcttatcgatgtcgataaagaagcagctattgccaaagaaagccgacatctcaggtcgcctgacgatcacggaattttgcaggggtccgtagaggggacatcgagtcatcaaattgagggtagccgatggtttaatcgaggatggactttgcaagaactgatcgcaccatcgcatgttcgcttctacgacaagaactggaagaacctggggtcaagggagacgctggcggaccaactagcacgaatcactggaatcgacaaggactttttgtcccgcagcgaaggcggacccaggggttttgggcagactccaatcagttccatacttgcgtcttttagcgttgccacgcgcatggtatgggcctcgaaaagagagaccacgcggcttgaggacacagcatactgtctgcttggcatatttggagtcaatatgccgctgctctacggagaaggcgagaaggcatttcgccgtttacaggaagagataatcaagaactcgacggatacttcaattctggcctatactgagaaaggtcaagacttcaacttgctcgcaagccatccccgaagcttccatatatcacccgctgtctggacatggggcagggaaatgccacgaatgttactcggacagcatcaaataactgttgaaatggttatatgcccagcattcgacgtcaagactaggcgcaatattaaacacgtgtacttcggtgtgtttgactgtacgtatgcagatgagtcactgtttcggccggccattcttatccagcttctaagcgacaatccgttgacattcgtgcggcgagagtacagtgaactctttctgatcactcccaactccgatgtcgcatttacgacggctctctattggggctatacgcagctagctggactcgaatacggaggtgtgttcgctgtataa

SEQ ID NO: 5247 - protein, 414 aa, Muscodor strobelii
  misc_feature: SGI Peptide ID NO. 561460
  misc_feature (23)..(159): Pfam Id: PF06985 Pfam Desc: Heterokaryon incompatibility protein (HET)
  misc_feature (62)..(159): Pfam Id: PF06985 Pfam Desc: Heterokaryon incompatibility protein (HET)
  misc_feature (1)..(375): NCBI GI: 189190380 Blast Desc: HET domain containing protein [Pyrenophora tritici-repentis Pt-1C-BFP] gi|187973135|gb|EDU40634.1| HET domain containing protein [Pyrenophora tritici-repentis
  misc_feature (1)..(309): NCBI GI: 145608538 Blast Desc: MGG_06555 [Magnaporthe grisea 70-15] gi|145016004|gb|EDK00494.1| MGG_06555 [Magnaporthe grisea 70-15]
  misc_feature (1)..(364): NCBI GI: 256733553 Blast Desc: [Nectria haematococca mpVI 77-13-4]
  misc_feature (1)..(389): NCBI GI: 171693413 Blast Desc: protein product [Podospora anserina] gi|170946655|emb|CAP73458.1| protein product [Podospora anserina]
  misc_feature (1)..(298): NCBI GI: 85092369 Blast Desc: NCU04912 [Neurospora crassa OR74A] gi|28920765|gb|EAA30124.1| [Neurospora crassa OR74A]
  misc_feature (1)..(363): NCBI GI: 46128083 Blast Desc: FG08419.1 [Gibberella zeae PH-1]
  misc_feature (1)..(364): NCBI GI: 169623337 Blast Desc: SNOG_14906 [Phaeosphaeria nodorum SN15] gi|160704965|gb|EAT77758.2| SNOG_14906 [Phaeosphaeria nodorum SN15]
  misc_feature (1)..(384): NCBI GI: 46110399 Blast Desc: FG02081.1 [Gibberella zeae PH-1]
  misc_feature (1)..(399): NCBI GI: 256728599 Blast Desc: NECHADRAFT_51098 [Nectria haematococca mpVI 77-13-4]
  misc_feature (1)..(281): NCBI GI: 169776259 Blast Desc: [Aspergillus oryzae RIB40] gi|83771331|dbj|BAE61463.1| protein product [Aspergillus oryzae]
MRLLNVSTLRLESFTDERTAPPYAILSHTWDDEEILFEDVERLPFSTWTRMKGFTKLSISAQQAQKDGYQYLWIDTCCIDKGSSAELSEAINSMFSWYACAKVCYAYLIDVDKEAAIAKESRHLRSPDDHGILQGSVEGTSSHQIEGSRWFNRGWTLQELIAPSHVRFYDKNWKNLGSRETLADQLARITGIDKDFLSRSEGGPRGFGQTPISSILASFSVATRMVWASKRETTRLEDTAYCLLGIFGVNMPLLYGEGEKAFRRLQEEIIKNSTDTSILAYTEKGQDFNLLASHPRSFHISPAVWTWGREMPRMLLGQHQITVEMVICPAFDVKTRRNIKHVYFGVFDCTYADESLFRPAILIQLLSDNPLTFVRREYSELFLITPNSDVAFTTALYWGYTQLAGLEYGGVFAV

SEQ ID NO: 5248 - DNA, 2700 bp, Muscodor strobelii
  misc_feature: SGI EST ID NO. CUFF.13319.1
  misc_feature: Variant of the nucleotide sequence at SEQ ID NO 5246
cgccctctttaccatgattgctttgtacacaatgaatgtaggtgtctgaacacagacaatgcgtcttttgaatgtgtccaccttgcgtctcgaatctttcacagacgagcgcacggcgccgccgtatgccattctatcacacacatgggacgatgaggagattctattcgaagatgtggagaggctacccttttccacctggacacggatgaagggcttcaccaaattgagtatcagtgcgcagcaagctcagaaagacgggtatcagtatctatggatcgatacctgctgtatcgacaaggggagcagcgccgagttgtcggaagcaattaactcaatgttcagctggtacgcttgtgcaaaagtctgctacgcatatcttatcgatgtcgataaagaagcagctattgccaaagaaagccgacatctcaggtcgcctgacgatcacggaattttgcaggggtccgtagaggggacatcgagtcatcaaattgagggtagccgatggtttaatcgaggatggactttgcaagaactgatcgcaccatcgcatgttcgcttctacgacaagaactggaagaacctggggtcaagggagacgctggcggaccaactagcacgaatcactggaatcgacaaggactttttgtcccgcagcgaaggcggacccaggggttttgggcagactccaatcagttccatacttgcgtcttttagcgttgccacgcgcatggtatgggcctcgaaaagagagaccacgcggcttgaggacacagcatactgtctgcttggcatatttggagtcaatatgccgctgctctacggagaaggcgagaaggcatttcgccgtttacaggaagagataatcaagaactcgacggatacttcaattctggcctatactgagaaaggtcaagacttcaacttgctcgcaagccatccccgaagcttccatatatcacccgctgtctggacatggggcagggaaatgccacgaatgttactcggacagcatcaaataactgttgaaatggttatatgcccagcattcgacgtcaagactaggcgcaatattaaacacgtgtacttcggtgtgtttgactgtacgtatgcagatgagtcactgtttcggccggccattcttatccagcttctaagcgacaatccgttgacattcgtgcggcgagagtacagtgaactctttctgatcactcccaactccgatgtcgcatttacgacggctctctattggggctatacgcagctagctggactcgaatacggagtgatgacatctgaagcaacgcgaacaacaataaccctaagggctcaatcccaacgctcggaatgatgtagcttacctactcttctaattcaacccttgccggaagactgtgatcgcgaatattatgttgacaactcagtgcccaggagaagtggcaggcagatcatacatgagcctgtatatagtcttcacggaattaccgacatcacgcatggcatattgtccttctttgatggagaacaaagccgtttcctgttgacttgggggactacaggggaccttccttggactcaagtcccatggtgtaaggtgttttcgcttgaggatgtgatccctcaagccgcgcctaaagaaggacagcactgggactacgacgagccaaatatggaagcgcgaatccatcggctgtttcaagacttccgagaactaaatcgcgaccgcgacttagccgaagatctgacagacgtagattcattgacaatctgggacgaatcgcctcatactatcaccgcaagaatacgcagtacagcattcctggatagcacgacattcaatttgaatatcgcagtgagccctgttaagattagcgacgaatcaaagctcgctcatcggcctaggagtcattcggcgtctacatgattgatgaatgggtatagcctcatagccctttatctcatattatccctaccttgtcacatttataccatcgatcattgcctatcacatctgctgttcgagtctaaaatcgaggtccggaaaatatgatcaatctcacgcatgggtgctgtagcctcgtgtctgtagctgtgttgcgcgaaacataggttaaggaacactgagatggtagtactacccatctaccccgtgagcctcctttgaccatctacgggacagcagactgtcgccaatcttatattgacaagtttgaacatccgcaattcgtgtcaactcaaaacttaacaaattagctaccctcacctttaaacgcgcaagctatcagtctcttcctcccccaagaccgagccgagatgcctgcttcgaactctgataccatctatgagcccatccaatgaccgtgctccagaggcaccggcactagctaccgagacacatttcacctaataagcagtacagcgccgcgtaggtaacgagaggagttctagcgactcgcgcctctggttctagagcaccatgtctcgcaaacagatcatgttcttatatacatcgtacatcaacttagtatagccgtctcaagtaaaggaacaagcatttttttgggctcaattcattggcccttgctgatttgcgtgcacccagcagtgagatttagaactatcatcacatagttgccagggcgcttgactacggcaagtaaactggagagacctgctgcagatgcaagatatagatcgata

SEQ ID NO: 5249 - DNA, 2073 bp, Muscodor strobelii
  misc_feature: SGI cDNA ID NO. 561461
  misc_feature: Encodes the peptide sequence at SEQ ID NO 5250
atggttctttgcgatgcatgcctctcaatcccattcgccaacctcccagagcgtctggagcatgaaggctggtcgcgaataggcgacgagtctgacttgccttcactccaccttaaagtctcttcgggtggcactgagcagccatatcctgatggctaccactggcatgagaacctcaaagctctcgagacttctgctgaaacgtgcccactttgctctctagtccaagcaggtgtagaggcatggaaaaggaaacgcgacactgggcttagcaagaaattctatcaagtatttagagacgtatacgaccatcctgtgccgatggacaatgagcttctacttacaaagcgctcgggcccgggcttccttgtccttgtcagaagcaaggagcgcaaagataccgcctacttacttacaggggtagccttctgcgttgagctttcgcacgagaaagcagggacgatcacttcccggccgcttgactgtgattcgggctcatcgcatagtctggatctcgtctcggaacttttgaagcgttgtcatgattctcacgagcagtgttcacggggagaaacccgtttaccttctcgcatcctcaatattggcgagtcaggggatacaattaagttagttaatacatttgaagagcaaagaggtatttatgccagcttgtcttactgttggggagaaatagcgaacttcacaacctcccaacagtcaatccaggcccgacgcttagggattcaactctcggatttgcccaagacgttcctcgacgctatcaagatctgccgccatcttaaaatccactacctctggatcgacagtctctgcatctgtcaagatgatgcagaggattgggctcgagagtccgctcgtatgattgacgtatattcaaatgcgcacctcgtccttgccgccaatcagacaaaggacagcgcgcagggcatctttcacattcgctccgagggaccgtcttgtgttattaatgttccaggctacgcaacacatgtacatgcgcaactgattaccaatcgagatgaatatgattggggtcggagaggctttccggatgagcctttgtctcaaagaggttgggcgttacaggagcgcgtgttagcaaggcgtgtgctgcattataacacgaaacagatttatttcgagtgcgatcgaggggtcgtcggcgaagatggaagtttccatgattttcgatacggcgctctgtccaatttccgctcggcgattgatgggaaagaagaaacgcctgagaaggacatccgatcgtggggccaacttctctgggaatatgggcaaagaaaattgtcaaagtccacagacactatgcctgctattagcggtctcgctgctctattcggaacaaggctgaaatcgaaatatgtcgctggcatttgggacaaagcgttcattgagggcttgtcgtggcaaggcctgggtgaccggaaaccgcgaacaacagaaagctatatcggcccaagctggagctgggctagttacgatggaatagctgccacaggtccacgaccagggtggaaagagattgctcgacttgtagattggcatgttgaattgaagagcgagcacaatccctatggcgaggtgaacgacgcctggctcaaaattcacggccctcttactgcgctatttgctctcaacgacattccacagaaagaaaaagagcatgtggaaaagatgaaaaccgtcgggcttcaatctttaccattcgtgcgaacaacgtatacggacaacgctgaatatcatcgtcttacactcgactacaacgaggtggcagcgagtggcaaatggaaagatttgaatcctcatgtcatgttactatatgtaacgaagggagattccgacgaggatgatggtgatgatgtagaaggagaatccaaagaagacacccgacaatattatggtctcgtcatcactaaagatgagactaatcaagaaagagatgcgatgaggcggattggctggttgttcataccatatgaggttggaaaatcaatcagcgatgagcagaggaattggaacactgtgacattgatttaa

SEQ ID NO: 5250 - protein, 690 aa, Muscodor strobelii
  misc_feature: SGI Peptide ID NO. 561461
  misc_feature (221)..(370): Pfam Id: PF06985 Pfam Desc: Heterokaryon incompatibility protein (HET)
  misc_feature (221)..(307): Pfam Id: PF06985 Pfam Desc: Heterokaryon incompatibility protein (HET)
  misc_feature (46)..(565): NCBI GI: 46126545 Blast Desc: FG07650.1 [Gibberella zeae PH-1]
  misc_feature (226)..(681): NCBI GI: 256722409 Blast Desc: NECHADRAFT_62329 [Nectria haematococca mpVI 77-13-4]
  misc_feature (1)..(669): NCBI GI: 256724784 Blast Desc: NECHADRAFT_48202 [Nectria haematococca mpVI 77-13-4]
  misc_feature (217)..(554): NCBI GI: 46114324 Blast Desc: FG03004.1 [Gibberella zeae PH-1]
  misc_feature (143)..(573): NCBI GI: 238502093 Blast Desc: conserved [Aspergillus flavus NRRL3357] gi|220691090|gb|EED47438.1| conserved [Aspergillus flavus NRRL3357]
  misc_feature (171)..(573): NCBI GI: 238484489 Blast Desc: conserved [Aspergillus flavus NRRL3357] gi|220701533|gb|EED57871.1| conserved [Aspergillus flavus NRRL3357]
  misc_feature (153)..(506): NCBI GI: 115400135 Blast Desc: [Aspergillus terreus NIH2624] gi|114191322|gb|EAU33022.1| [Aspergillus terreus NIH2624]
  misc_feature (172)..(549): NCBI GI: 116179172 Blast Desc: CHGG_00214 [Chaetomium globosum CBS 148.51] gi|88184511|gb|EAQ91979.1| CHGG_00214 [Chaetomium globosum CBS 148.51]
  misc_feature (173)..(573): NCBI GI: 169605273 Blast Desc: SNOG_05659 [Phaeosphaeria nodorum SN15] gi|160706737|gb|EAT86723.2| SNOG_05659 [Phaeosphaeria nodorum SN15]
  misc_feature (156)..(507): NCBI GI: 115433933 Blast Desc: [Aspergillus terreus NIH2624] gi|114189955|gb|EAU31655.1| [Aspergillus terreus NIH2624]
MVLCDACLSIPFANLPERLEHEGWSRIGDESDLPSLHLKVSSGGTEQPYPDGYHWHENLKALETSAETCPLCSLVQAGVEAWKRKRDTGLSKKFYQVFRDVYDHPVPMDNELLLTKRSGPGFLVLVRSKERKDTAYLLTGVAFCVELSHEKAGTITSRPLDCDSGSSHSLDLVSELLKRCHDSHEQCSRGETRLPSRILNIGESGDTIKLVNTFEEQRGIYASLSYCWGEIANFTTSQQSIQARRLGIQLSDLPKTFLDAIKICRHLKIHYLWIDSLCICQDDAEDWARESARMIDVYSNAHLVLAANQTKDSAQGIFHIRSEGPSCVINVPGYATHVHAQLITNRDEYDWGRRGFPDEPLSQRGWALQERVLARRVLHYNTKQIYFECDRGVVGEDGSFHDFRYGALSNFRSAIDGKEETPEKDIRSWGQLLWEYGQRKLSKSTDTMPAISGLAALFGTRLKSKYVAGIWDKAFIEGLSWQGLGDRKPRTTESYIGPSWSWASYDGIAATGPRPGWKEIARLVDWHVELKSEHNPYGEVNDAWLKIHGPLTALFALNDIPQKEKEHVEKMKTVGLQSLPFVRTTYTDNAEYHRLTLDYNEVAASGKWKDLNPHVMLLYVTKGDSDEDDGDDVEGESKEDTRQYYGLVITKDETNQERDAMRRIGWLFIPYEVGKSISDEQRNWNTVTLI

SEQ ID NO: 5251 - DNA, 2465 bp, Muscodor strobelii
  misc_feature: SGI EST ID NO. CUFF.13329.0
  misc_feature: Variant of the nucleotide sequence at SEQ ID NO 5249
gtggacaaatgtgacattgtagaatatgttgttttgagcattgtcttattcgggaatgtcatttattttgtgtcctgcctagcaggcatccaactcagccgttagcacaacccaccgaccatattgaagattcgattgagacataactcatctttttcgcgataatcctaaagcaggccaataatcaacggtctccaagatggttctttgcgatgcatgcctctcaatcccattcgccaacctcccagagcgtctggagcatgaaggctggtcgcgaataggcgacgagtctgacttgccttcactccaccttaaagtctcttcgggtggcactgagcagccatatcctgatggctaccactggcatgagaacctcaaagctctcgagacttctgctgaaacgtgcccactttgctctctagtccaagcaggtgtagaggcatggaaaaggaaacgcgacactgggcttagcaagaaattctatcaagtatttagagacgtatacgaccatcctgtgccgatggacaatgagcttctacttacaaagcgctcgggcccgggcttccttgtccttgtcagaagcaaggagcgcaaagataccgcctacttacttacaggggtagccttctgcgttgagctttcgcacgagaaagcagggacgatcacttcccggccgcttgactgtgattcgggctcatcgcatagtctggatctcgtctcggaacttttgaagcgttgtcatgattctcacgagcagtgttcacggggagaaacccgtttaccttctcgcatcctcaatattggcgagtcaggggatacaattaagttagttaatacatttgaagagcaaagaggtatttatgccagcttgtcttactgttggggagaaatagcgaacttcacaacctcccaacagtcaatccaggcccgacgcttagggattcaactctcggatttgcccaagacgttcctcgacgctatcaagatctgccgccatcttaaaatccactacctctggatcgacagtctctgcatctgtcaagatgatgcagaggattgggctcgagagtccgctcgtatgattgacgtatattcaaatgcgcacctcgtccttgccgccaatcagacaaaggacagcgcgcagggcatctttcacattcgctccgagggaccgtcttgtgttattaatgttccaggctacgcaacacatgtacatgcgcaactgattaccaatcgagatgaatatgattggggtcggagaggctttccggatgagcctttgtctcaaagaggttgggcgttacaggagcgcgtgttagcaaggcgtgtgctgcattataacacgaaacagatttatttcgagtgcgatcgaggggtcgtcggcgaagatggaagtttccatgattttcgatacggcgctctgtccaatttccgctcggcgattgatgggaaagaagaaacgcctgagaaggacatccgatcgtggggccaacttctctgggaatatgggcaaagaaaattgtcaaagtccacagacactatgcctgctattagcggtctcgctgctctattcggaacaaggctgaaatcgaaatatgtcgctggcatttgggacaaagcgttcattgagggcttgtcgtggcaaggcctgggtgaccggaaaccgcgaacaacagaaagctatatcggcccaagctggagctgggctagttacgatggaatagctgccacaggtccacgaccagggtggaaagagattgctcgacttgtagattggcatgttgaattgaagagcgagcacaatccctatggcgaggtgaacgacgcctggctcaaaattcacggccctcttactgcgctatttgctctcaacgacattccacagaaagaaaaagagcatgtggaaaagatgaaaaccgtcgggcttcaatctttaccattcgtgcgaacaacgtatacggacaacgctgaatatcatcgtcttacactcgactacaacgaggtggcagcgagtggcaaatggaaagatttgaatcctcatgtcatgttactatatgtaacgaagggagattccgacgaggatgatggtgatgatgtagaaggagaatccaaagaagacacccgacaatattatggtctcgtcatcactaaagatgagactaatcaagaaagagatgcgatgaggcggattggctggttgttcataccatatgaggttggaaaatcaatcagcgatgagcagaggaattggaacactgtgacattgatttaaagcgaagttgtgtcgagaacaacttatcgtgtgtagtttatttgttcttatgatttgcgaagtctggagctgcgtcttgcaggagactctgccagcctttgagcaaaaaagataatacgtccgatacattatgcaatataggttaagatcaaacggttcggattactcgaattaatagactataatattccgg

SEQ ID NO: 5252 - DNA, 834 bp, Muscodor strobelii
  misc_feature: SGI cDNA ID NO. 561462
  misc_feature: Encodes the peptide sequence at SEQ ID NO 5253
atgcagggacactcggaacttgaggcgatgccagcggatggaacgcccagcggtaacggaatgatgtataacgggaatctcaatgtttacagttccgagaaagagtcatatactccctacagctctgaaaaagagtcacttcctcccagtagtcattatggaaagttcgaaggcagtcctcagtatgccaaagccgaaaacagtacgcattatacaaacgtctatgcaaacgtccaagagtcgagtcaggatcctgatcaacgccaacctcatcgtcggaagatattgggcgttactccgctcgttttctggcttctgcttgttggcctggttattatactggctggtgccctcggaggtggtctaggcgctggcctgagtgcgaaatctcgagcgccgaaggcttcagaatcaactagtccaacatcaagcgaatcccgacctcaatcgactagcatgctatcatcgtctttaccaacgcaaagcggacagtcgaaaacagctgctactacatcaacaataagttcaagcacaggaagtaccacgactacgacttccagtcctaccccaacgtcatcaactacttcagcgacctacgcaggtggagtcaacatggacgacgcatgttctgaacagtacggaaccggatggactgcttatattgccagcgataatcctacttctaatgattggaaatgtgagcaggatggcgacatggcaggcaagcctgtcgatgttggagaatactgccagaccacatatggccccgacgcatactcagactcacaggatggcggtgtttatgattgggggtgcttcatcgactcatcatag

SEQ ID NO: 5253 - protein, 277 aa, Muscodor strobelii
  misc_feature: SGI Peptide ID NO. 561462
MQGHSELEAMPADGTPSGNGMMYNGNLNVYSSEKESYTPYSSEKESLPPSSHYGKFEGSPQYAKAENSTHYTNVYANVQESSQDPDQRQPHRRKILGVTPLVFWLLLVGLVIILAGALGGGLGAGLSAKSRAPKASESTSPTSSESRPQSTSMLSSSLPTQSGQSKTAATTSTISSSTGSTTTTTSSPTPTSSTTSATYAGGVNMDDACSEQYGTGWTAYIASDNPTSNDWKCEQDGDMAGKPVDVGEYCQTTYGPDAYSDSQDGGVYDWGCFIDSS

SEQ ID NO: 5254 - DNA, 1272 bp, Muscodor strobelii
  misc_feature: SGI EST ID NO. CUFF.13331.0
  misc_feature: Variant of the nucleotide sequence at SEQ ID NO 5252
cacgttttttcttgagagcgcttaggcccctacatatgcccagcacgaaatgctgatgccttcagggttttatgtcctctcttgacttggaaaccccaattgacgcttcaattcttgcccgcgcacgatgcggtgcaccaagtagactttgattctcaataattcttttcttttgtatttgcgcgattatcactatcacctcaataatgcagggacactcggaacttgaggcgatgccagcggatggaacgcccagcggtaacggaatgatgtataacgggaatctcaatgtttacagttccgagaaagagtcatatactccctacagctctgaaaaagagtcacttcctcccagtagtcattatggaaagttcgaaggcagtcctcagtatgccaaagccgaaaacagtacgcattatacaaacgtctatgcaaacgtccaagagtcgagtcaggatcctgatcaacgccaacctcatcgtcggaagatattgggcgttactccgctcgttttctggcttctgcttgttggcctggttattatactggctggtgccctcggaggtggtctaggcgctggcctgagtgcgaaatctcgagcgccgaaggcttcagaatcaactagtccaacatcaagcgaatcccgacctcaatcgactagcatgctatcatcgtctttaccaacgcaaagcggacagtcgaaaacagctgctactacatcaacaataagttcaagcacaggaagtaccacgactacgacttccagtcctaccccaacgtcatcaactacttcagcgacctacgcaggtggagtcaacatggacgacgcatgttctgaacagtacggaaccggatggactgcttatattgccagcgataatcctacttctaatgattggaaatgtgagcaggatggcgacatggcaggcaagcctgtcgatgttggagaatactgccagaccacatatggccccgacgcatactcagactcacaggatggcggtgtttatgattgggggtgcttcatcgactcatcatagtcggtactatcttgggtttcgatagttggaacgtcaatatgccgatgctcttgaaatcagaaaggaggtagacgtgagagtaaggcgcttggggcgttgatatgacgattgaagggacgactcgtttgcattagagatctcttatctgcattggcactacagcgttacagtttgtaaatatgttcattctcattgctaattacacactcagattacgtaataccgataagaa

SEQ ID NO: 5255 - DNA, 1590 bp, Muscodor strobelii
  misc_feature: SGI cDNA ID NO. 561463
  misc_feature: Encodes the peptide sequence at SEQ ID NO 5256
atggaccttcgaaataaaccaagcttggctttcagcacaaattcggcgaccccccttaacccaggtgggaggggagacgacaccgctggattcacctttcttgacgagccctctggtgctgataccgatatcgagctgcaaggttgggagccaccgagtagaactcgatccaaaggcgatgcagaagatcgagaatcttccaacattgttgactgggatgaacctgatgatcccgaaaacccatacaactggtcatttagtcgcaaatgtgttaactgcggtcttgtatgcgccatggctttcatcgtccctctcgcttcgtccatcttcgcaccgggtgtccccgaagtgctagaggagttccattccgactctgtaatactggcatcacttgtcgtttcagtctatgtgataggaggcggcgccggtcccttgatcgttgccccattgtccgaaatctatggccgcgttattgtctatcacatttgcaatgtagggtttgtggcttttttgatcgcctgtgcactagcacccagcctcaacgctctcatcgtactccgtctaatatgcggcattttcggcgccgcgcccctcacaaatgggggaggcactatcgcagatgtcgttgtccaagagaaacgaggtggcgtcatcgcgctatacagcctcgggcctcttctcggccctgtcgtagggccagttgcaggaggattcctcgccgaagcgaagggatggaggtggactttttgggtactggcgatcgctgccggcgccatctctctagcgatgctagtctttctgaaagagacttatagccccgtgcttttagacagaaaagcgagacgactgcgaaaagcaactggcaacaacatgttgcgctcaaaactagattccggtctaggacccacggacttcttcaaacgcgggcttatccggcctgttaaaatgcttttccgttcccctatcatcgttattatggctttctatactgctatcacgtacggatacctttatatcatgtttacgagcattaccgagatcttcgagtcgacttatgggttctccacaagcacagccggcttggcattccttggccttggagttggcagtttaataggtatattcatctttagtgcgacatcagacagatatctgaaaaggaaggcggcagaaccatctggcatgaaacctgagcatcgtctgcagcttctacctctcggagcagccgcagtgcctgctggtcttttcatttatggatggacggcccagtacgaaatatatttcatcgttcctatcattggcacgggaatcgtcggcattggccttctcattgtcttcttaggaatccagacatatttggtcgacgctttcgcaattttcgctgcatctgctcttgctaccaacactatcgttcgatcaattgcaggtggacttcttccgctcgctgggttgccattgtataacgcactaggatacggctggggaaatagcgtcttgggcttcattgccgtcgctcttttcccggcttctttcgctattcagagatatggggagtatctaagaaaccgattcacaatccagaatttgtga

SEQ ID NO: 5256 - protein, 529 aa, Muscodor strobelii
  misc_feature: SGI Peptide ID NO. 561463
  misc_feature (96)..(480): Pfam Id: PF07690 Pfam Desc: Major Facilitator Superfamily
  misc_feature (93)..(520): Pfam Id: PF00083 Pfam Desc: Sugar (and other) transporter
  misc_feature (99)..(193): Pfam Id: PF00083 Pfam Desc: Sugar (and other) transporter
  misc_feature (37)..(529): NCBI GI: 242763248 Blast Desc: bicyclomycin resistance protein, [Talaromyces stipitatus ATCC 10500] gi|218723733|gb|EED23150.1| bicyclomycin resistance protein, [Talaromyces stipitatus ATCC 10500]
  misc_feature (43)..(527): NCBI GI: 145612049 Blast Desc: MGG_08060 [Magnaporthe grisea 70-15] gi|145019297|gb|EDK03525.1| MGG_08060 [Magnaporthe grisea 70-15]
  misc_feature (63)..(529): NCBI GI: 85092504 Blast Desc: NCU06077 [Neurospora crassa OR74A] gi|28920843|gb|EAA30189.1| conserved [Neurospora crassa OR74A]
  misc_feature (54)..(529): NCBI GI: 46126303 Blast Desc: FG07529.1 [Gibberella zeae PH-1]
  misc_feature (35)..(529): NCBI GI: 256722065 Blast Desc: NECHADRAFT_51294 [Nectria haematococca mpVI 77-13-4]
  misc_feature (60)..(529): NCBI GI: 242827307 Blast Desc: MFS multidrug transporter, [Talaromyces stipitatus ATCC 10500] gi|218712062|gb|EED11490.1| MFS multidrug transporter, [Talaromyces stipitatus ATCC 10500]
  misc_feature (55)..(524): NCBI GI: 256730662 Blast Desc: NECHADRAFT_13650 [Nectria haematococca mpVI 77-13-4]
  misc_feature (62)..(527): NCBI GI: 240108931 Blast Desc: Major Facilitator Superfamily protein [Coccidioides posadasii C735 delta SOWgp]
  misc_feature (62)..(527): NCBI GI: 119181306 Blast Desc: CIMG_05771 [Coccidioides immitis RS]
  misc_feature (27)..(524): NCBI GI: 242782825 Blast Desc: bicyclomycin resistance protein, [Talaromyces stipitatus ATCC 10500] gi|218720224|gb|EED19643.1| bicyclomycin resistance protein, [Talaromyces stipitatus ATCC 10500]
MDLRNKPSLAFSTNSATPLNPGGRGDDTAGFTFLDEPSGADTDIELQGWEPPSRTRSKGDAEDRESSNIVDWDEPDDPENPYNWSFSRKCVNCGLVCAMAFIVPLASSIFAPGVPEVLEEFHSDSVILASLVVSVYVIGGGAGPLIVAPLSEIYGRVIVYHICNVGFVAFLIACALAPSLNALIVLRLICGIFGAAPLTNGGGTIADVVVQEKRGGVIALYSLGPLLGPVVGPVAGGFLAEAKGWRWTFWVLAIAAGAISLAMLVFLKETYSPVLLDRKARRLRKATGNNMLRSKLDSGLGPTDFFKRGLIRPVKMLFRSPIIVIMAFYTAITYGYLYIMFTSITEIFESTYGFSTSTAGLAFLGLGVGSLIGIFIFSATSDRYLKRKAAEPSGMKPEHRLQLLPLGAAAVPAGLFIYGWTAQYEIYFIVPIIGTGIVGIGLLIVFLGIQTYLVDAFAIFAASALATNTIVRSIAGGLLPLAGLPLYNALGYGWGNSVLGFIAVALFPASFAIQRYGEYLRNRFTIQNL

SEQ ID NO: 5257 - DNA, 1401 bp, Muscodor strobelii
  misc_feature: SGI cDNA ID NO. 561464
  misc_feature: Encodes the peptide sequence at SEQ ID NO 5258
atgctgagtgcgaccttaacaaccataacagtccttggcttggccgtttggctactgtggccactgggctcttctcgtctggcatggatcccaggcccctggcagcgacgcctgacaggcacgcattcaactacccccaatctacatatctcgctgatcgacttcatagatgtcttccaactggcagacgccctgcaggggcgaacaagtgcttccctccagagtcttcatcggcggtacggctcgatcgtccgtcttggaccaagcactgtttcgatatcagaccctaatatgatccctgccatctatggcattcgcgccggtctccctaagcttgacgcaaatttcactggacgtgccggaggtaatgatgtgccgatgcatgcatggatgcattattttggctatgattccgtcatgaacatgacaatttcgacggatttcggatttatagaaaatggaggagataaagatggcatattttctgggttggacatggctctcacatacagagcatcagtattcacaatgccatggatcaatacgttagtggccaatacaccactaaagcagatctttgccaaacgcatagcaaagttccagcaacgatcaagaagcctcatacagagtcgaatggcacaaggagtcccggactccactcatccggatttgctttcgcaactactcggagccaagacggcatttccggacattgtggatgacttggttctcaatggctatgtcacgctgccggtcctcgccggagccgacacggttgcaatcgttttaggcacaattgtgtatcatttagcaagaaatggacagattgtcaaaactttgcagtcagaactgcaactggcgaacctaagtctgccacctagctttgccaaggtccgtcatctaccgtatctgggggctataattcgcgaagctctccgcatacatccaattagtgccttcatctcgaggcgtacggttcctccaggcgaaagcgttgtcctcgctgacggtcagcgcatacccgcgggaactgttgtggcaatctcgccctggatcactcacttcgatacatccatatacggccacgatgctcatgagttcaatccggctcgttggttacagacgggcgatgaaacaccagagcaatatgaggagcgacttcgatatatgaccagggcagatttatcgtggggtcatggggatcgagtttgcatcgggaaaaacattgcgagacttgaaatgtttaaactcgtcgctactctttatagtctgttcgatatcacctctggtgatcctaccaaggtttgggagataaaagagacgcttcttaccaaacagactggcattgaggttcacttatcgcggcggcccggggtagatctaaaatctttatgtgtgtaa

SEQ ID NO: 5258 - protein, 466 aa, Muscodor strobelii
  misc_feature: SGI Peptide ID NO. 561464
  misc_feature (11)..(453): Pfam Id: PF00067 Pfam Desc: Cytochrome P450
  misc_feature (254)..(373): Pfam Id: PF00067 Pfam Desc: Cytochrome P450
  misc_feature (398)..(453): Pfam Id: PF00067 Pfam Desc: Cytochrome P450
  misc_feature (1)..(464): NCBI GI: 121714665 Blast Desc: cytochrome P450 monooxygenase, [Aspergillus clavatus NRRL 1] gi|119403097|gb|EAW13517.1| cytochrome P450 monooxygenase, [Aspergillus clavatus NRRL 1]
  misc_feature (2)..(456): NCBI GI: 256727965 Blast Desc: NECHADRAFT_46422 [Nectria haematococca mpVI 77-13-4]
  misc_feature (104)..(456): NCBI GI: 156060403 Blast Desc: SS1G_02340 [Sclerotinia sclerotiorum 1980] gi|154699748|gb|EDN99486.1| SS1G_02340 [Sclerotinia sclerotiorum 1980]
  misc_feature (52)..(454): NCBI GI: 189193947 Blast Desc: pisatin demethylase [Pyrenophora tritici-repentis Pt-1C-BFP] gi|187978876|gb|EDU45502.1| pisatin demethylase [Pyrenophora tritici-repentis Pt-1C-BFP]
  misc_feature (118)..(456): NCBI GI: 255949784 Blast Desc: Pc22g17460 [Penicillium chrysogenum Wisconsin 54-1255] gi|211592676|emb|CAP99034.1| Pc22g17460 [Penicillium chrysogenum Wisconsin 54-1255]
  misc_feature (105)..(456): NCBI GI: 115391561 Blast Desc: [Aspergillus terreus NIH2624] gi|114194209|gb|EAU35909.1| [Aspergillus terreus NIH2624]
  misc_feature (12)..(456): NCBI GI: 169785215 Blast Desc: [Aspergillus oryzae RIB40] gi|83775816|dbj|BAE65935.1| protein product [Aspergillus oryzae]
  misc_feature (12)..(456): NCBI GI: 238506191 Blast Desc: benzoate 4-monooxygenase cytochrome P450, [Aspergillus flavus NRRL3357] gi|220689010|gb|EED45361.1| benzoate 4-monooxygenase cytochrome P450, [Aspergillus flavus NRRL3357]
  misc_feature (91)..(461): NCBI GI: 46114280 Blast Desc: FG02982.1 [Gibberella zeae PH-1]
  misc_feature (3)..(456): NCBI GI: 171682724 Blast Desc: protein product [Podospora anserina] gi|170941321|emb|CAP66971.1| protein product [Podospora anserina]
  misc_feature (130)..(458): SWISSPROT Homolog: EC 1.14.13.12 Benzoate 4-monooxygenase
MLSATLTTITVLGLAVWLLWPLGSSRLAWIPGPWQRRLTGTHSTTPNLHISLIDFIDVFQLADALQGRTSASLQSLHRRYGSIVRLGPSTVSISDPNMIPAIYGIRAGLPKLDANFTGRAGGNDVPMHAWMHYFGYDSVMNMTISTDFGFIENGGDKDGIFSGLDMALTYRASVFTMPWINTLVANTPLKQIFAKRIAKFQQRSRSLIQSRMAQGVPDSTHPDLLSQLLGAKTAFPDIVDDLVLNGYVTLPVLAGADTVAIVLGTIVYHLARNGQIVKTLQSELQLANLSLPPSFAKVRHLPYLGAIIREALRIHPISAFISRRTVPPGESVVLADGQRIPAGTVVAISPWITHFDTSIYGHDAHEFNPARWLQTGDETPEQYEERLRYMTRADLSWGHGDRVCIGKNIARLEMFKLVATLYSLFDITSGDPTKVWEIKETLLTKQTGIEVHLSRRPGVDLKSLCV

SEQ ID NO: 5259 - DNA, 1077 bp, Muscodor strobelii
  misc_feature: SGI cDNA ID NO. 561465
  misc_feature: Elevated expression when VOC is produced
  misc_feature: Encodes the peptide sequence at SEQ ID NO 5260
atgcctgtcgcacagcctgtggttgtatcatgggctgacctcaacgcaggtgacatttcattcgacattttgcaagaggcgttcggaccagattctctcggcattctcatagtgaaagatgtagacgaaaagttcatcaaattaagacatcagcttctctcttacgcttcttacatgggcaatctatccgagaaggaattagaacaattcacgaatgaggcagccaaatacttggtaggttggtccaagggcaaggagaagctcaaggacggcagtgcagatgagtacaaggggtcatattatgccaactgcgcattctacgttgacgacaacttagaatgccccaaccctacaaggcaattcacttttgaggccttccctgaatacctagctccgaactcttggccgtcggaagaaatgctaccgggatttcaaaagacgatgaaggacttgtgccgcttgataatcgacacggctgttctggtcgctagagcatgcgacaggtttgctgagaaggagatcgatggatatccgatcggttacttggagaaagtcgtcaaatcctcatccacgacgaaggctcggctattgcactactatcctatgcccgacgaggcactggaaagggcaatggaagaggataattggtgtgcagttcataaggatcacggctgtctaacgggacttacgtcagccatgtttgtcgatgagctaaagacggacgtcgaggtccccaaaaccactggcgcagcggtattaccaacgttggaggaattgcccggctcgcctgatcctgacgccggattgtggatcaaggatagaaagggtgtacctgtccaagtcaagataccgcgcgactgcatcgcatttcagactggtgagactttagagcggatcactaatgggaagttcaaggccgttgagcattcagtgaggggtgcgtatgcaaagggcgtcgctcggaatactttggccgttttcacgcagccaaacttggaggacgaggttgatatggagcagcacatcaatttcggcgaattcgcgaggggtattattgctaagaataccgttgggtag

SEQ ID NO: 5260 - protein, 358 aa, Muscodor strobelii
  misc_feature: SGI Peptide ID NO. 561465
  misc_feature (2)..(357): NCBI GI: 164427880 Blast Desc: NCU02560 [Neurospora crassa OR74A] gi|157071921|gb|EAA36455.2| conserved [Neurospora crassa OR74A]
  misc_feature (4)..(357): NCBI GI: 256735564 Blast Desc: [Nectria haematococca mpVI 77-13-4]
  misc_feature (4)..(357): NCBI GI: 46134911 Blast Desc: FG09304.1 [Gibberella zeae PH-1]
  misc_feature (8)..(357): NCBI GI: 38567146 Blast Desc: conserved [Neurospora crassa]
  misc_feature (2)..(357): NCBI GI: 171695912 Blast Desc: protein product [Podospora anserina] gi|170948198|emb|CAP60362.1| protein product [Podospora anserina]
  misc_feature (2)..(357): NCBI GI: 116181504 Blast Desc: CHGG_01380 [Chaetomium globosum CBS 148.51] gi|88185677|gb|EAQ93145.1| CHGG_01380 [Chaetomium globosum CBS 148.51]
  misc_feature (5)..(357): NCBI GI: 154297287 Blast Desc: BC1G_12479 [Botryotinia fuckeliana B05.10] gi|150843006|gb|EDN18199.1| BC1G_12479 [Botryotinia fuckeliana B05.10]
  misc_feature (27)..(357): NCBI GI: 156053856 Blast Desc: SS1G_05776 [Sclerotinia sclerotiorum 1980] gi|154703556|gb|EDO03295.1| SS1G_05776 [Sclerotinia sclerotiorum 1980]
  misc_feature (4)..(355): NCBI GI: 119189751 Blast Desc: CIMG_04923 [Coccidioides immitis RS]
  misc_feature (1)..(355): NCBI GI: 119496831 Blast Desc: NFIA_020000 [Neosartorya fischeri NRRL 181] gi|119413351|gb|EAW23292.1| conserved [Neosartorya fischeri NRRL 181]
  misc_feature: Useful for introducing or modulating the production of volatile compounds
MPVAQPVVVSWADLNAGDISFDILQEAFGPDSLGILIVKDVDEKFIKLRHQLLSYASYMGNLSEKELEQFTNEAAKYLVGWSKGKEKLKDGSADEYKGSYYANCAFYVDDNLECPNPTRQFTFEAFPEYLAPNSWPSEEMLPGFQKTMKDLCRLIIDTAVLVARACDRFAEKEIDGYPIGYLEKVVKSSSTTKARLLHYYPMPDEALERAMEEDNWCAVHKDHGCLTGLTSAMFVDELKTDVEVPKTTGAAVLPTLEELPGSPDPDAGLWIKDRKGVPVQVKIPRDCIAFQTGETLERITNGKFKAVEHSVRGAYAKGVARNTLAVFTQPNLEDEVDMEQHINFGEFARGIIAKNTVG

SEQ ID NO: 5261 - DNA, 2226 bp, Muscodor strobelii
  misc_feature: SGI EST ID NO. CUFF.13362.0
  misc_feature: Variant of the nucleotide sequence at SEQ ID NO 5259
ctgatttcacccattgaggtaggtggatccgtagccaggtggatttccacaccttggtcaacggcagtctcctacatacgggactctccgattagctaggtagaaaaatagtctgggctgcgatagccgacgctttcctttgagagcccggattgcaaatatcgcgactcaaatattgatgccctgcgtgcatggccatgtgcatactcgcggacaagaaacgaccagattcacgactccatcatgcctgtcgcacagcctgtggttgtatcatgggctgacctcaacgcaggtgacatttcattcgacattttgcaagaggcgttcggaccagattctctcggcattctcatagtgaaagatgtagacgaaaagttcatcaaattaagacatcagcttctctcttacgcttcttacatgggcaatctatccgagaaggaattagaacaattcacgaatgaggcagccaaatacttggtaggttggtccaagggcaaggagaagctcaaggacggcagtgcagatgagtacaaggggtcatattatgccaactgcgcattctacgttgacgacaacttagaatgccccaaccctacaaggcaattcacttttgaggccttccctgaatacctagctccgaactcttggccgtcggaagaaatgctaccgggatttcaaaagacgatgaaggacttgtgccgcttgataatcgacacggctgttctggtcgctagagcatgcgacaggtttgctgagaaggagatcgatggatatccgatcggttacttggagaaagtcgtcaaatcctcatccacgacgaaggctcggctattgcactactatcctatgcccgacgaggcactggaaagggcaatggaagaggataattggtgtgcagttcataaggatcacggctgtctaacgggacttacgtcagccatgtttgtcgatgagctaaagacggacgtcgaggtccccaaaaccactggcgcagcggtattaccaacgttggaggaattgcccggctcgcctgatcctgacgccggattgtggatcaaggatagaaagggtgtacctgtccaagtcaagataccgcgcgactgcatcgcatttcagactggtgagactttagagcggatcactaatgggaagttcaaggccgttgagcattcagtgaggggtgcgtatgcaaagggcgtcgctcggaatactttggccgttttcacgcagccaaacttggaggacgaggttgatatggagcagcacatcaatttcggcgaattcgcgaggggtattattgctaagaataccgttgggtagaattgattctattgaccaaccgttggaactagctgctcactgacagtgaattgtcgtcaaaaacactacttcgggcggatagccggcgtccagcaagattgactcgtacttacgcgaaatttctgagggacgcacctacgatgtctatgtgaatagtataacctaggcacatgtacatttacggcatatatgcagaaaacagctagaacacagatgttacatacacgcaccaatattgggtgagctgaaggaggagaggcggggcagatgctgcatggctaaaagcgaccgaaatatgccttgcgacgaactcgataaatatctggtggtaaagcctgttcattcgacatttgatctagttcgaaatgcttataggatcaacgaaatatgtgccccgcaacacgactcaatagacactttgccgtcaaacggcctacagtatggaggcattggcagcaataggtctggcagggaatatccttacgttcgttgacttcggcttccaagttctagttgctgcgaaagacatacaggggtcagcaactgggcatatcaagtcggatgacgatgttgaattcataacgagacacctgagagacctttgcttctcactcgaaactccacacatccccatttcgcgcattacagactcacacgcctctctaacaagattgactactcaatgccagcgatgggcggacgaccttctgtcactgttagatgactgtcgggctgtggatccacgaaacaagcgcaaggtgctgagagctgcttggtcgagtgttcgaaattcgaagaaaaagaagcagcttgaaacatcgctagaggcttgtagagatcaattgggtttacatctcgcagccttaaacaggtccgtcaactgacttgcgtaacttctgtgtgaat

SEQ ID NO: 5262 - DNA, 807 bp, Muscodor strobelii
  misc_feature: SGI cDNA ID NO. 561466
  misc_feature: Encodes the peptide sequence at SEQ ID NO 5263
atggtaaagccgctaagcttcaagggcgacaagaagcctaagaagagaaagcgcaccgaagccgagtctgcctccgagaatgtagcttcttcggagctagcaaccacagctcctcaagatcaaggagaggatgacgatagctgggtatcagccgaagcggttggggatgtgacgggacccgtgatgatcgtattgccaagctcgccgccaacctgtattgcatgcgacgcgaatggcaaggtattcactgatcccattgagaacatcatcgatggcaatccatccactgcagaaccgcacgatgtacgacaagtgtgggtcgcgaacaagatgtacggtaccgaaaactacagattcaagggtcgatatggcaagtatctcgcatgcgacaaatacggcatcctctccgcgacatcagaagccatagcaccacccgaaacatggacgatcatcgcaacacctgacacgccaggaacactccagctccaaacactgaacgagacattcctcactgtagcagaatccaagaaaccaaatggtgcgcccgagctacgtggagatgcaacggagatcacattcgagtccacattacgaattcgcatgcaagcgcgtttcaaaccaaggttaaaagccacgaaggaaatgaaagagaagtccaaaatcagccggaaagagctggaggaagcagtagggcggcggttagaggaggacgaagtgaaagtcctaaagaaagcgagacgagaaggcgactatcatgaacagctcttgaacctcaaatccaagaacaaacacgacaagtatggttga

SEQ ID NO: 5263 - protein, 268 aa, Muscodor strobelii
  misc_feature: SGI Peptide ID NO. 561466
  misc_feature (86)..(267): Pfam Id: PF06229 Pfam Desc: FRG1-like family
  misc_feature (233)..(267): Pfam Id: PF06229 Pfam Desc: FRG1-like family
  misc_feature (1)..(268): NCBI GI: 39943064 Blast Desc: MGG_03612 [Magnaporthe grisea 70-15] gi|145009811|gb|EDJ94467.1| MGG_03612 [Magnaporthe grisea 70-15]
  misc_feature (1)..(267): NCBI GI: 156053858 Blast Desc: SS1G_05777 [Sclerotinia sclerotiorum 1980] gi|154703557|gb|EDO03296.1| SS1G_05777 [Sclerotinia sclerotiorum 1980]
  misc_feature (1)..(268): NCBI GI: 154297289 Blast Desc: BC1G_12480 [Botryotinia fuckeliana B05.10] gi|150843007|gb|EDN18200.1| BC1G_12480 [Botryotinia fuckeliana B05.10]
  misc_feature (17)..(268): NCBI GI: 116181502 Blast Desc: CHGG_01379 [Chaetomium globosum CBS 148.51] gi|88185676|gb|EAQ93144.1| CHGG_01379 [Chaetomium globosum CBS 148.51]
  misc_feature (1)..(268): NCBI GI: 256734852 Blast Desc: NECHADRAFT_75536 [Nectria haematococca mpVI 77-13-4]
  misc_feature (1)..(261): NCBI GI: 46134913 Blast Desc: FG09305.1 [Gibberella zeae PH-1]
  misc_feature (62)..(268): NCBI GI: 85119682 Blast Desc: NCU02559 [Neurospora crassa OR74A] gi|28927502|gb|EAA36454.1| conserved [Neurospora crassa OR74A] gi|38567147|emb|CAE76442.1| conserved [Neurospora crassa]
  misc_feature (1)..(268): NCBI GI: 240279889 Blast Desc: conserved [Ajellomyces capsulatus H143]
  misc_feature (1)..(267): NCBI GI: 119496857 Blast Desc: FRG1-like family protein [Neosartorya fischeri NRRL 181] gi|119413364|gb|EAW23305.1| FRG1-like family protein [Neosartorya fischeri NRRL 181]
  misc_feature (1)..(268): NCBI GI: 240111101 Blast Desc: CPC735_069360 [Coccidioides posadasii C735 delta SOWgp]
MVKPLSFKGDKKPKKRKRTEAESASENVASSELATTAPQDQGEDDDSWVSAEAVGDVTGPVMIVLPSSPPTCIACDANGKVFTDPIENIIDGNPSTAEPHDVRQVWVANKMYGTENYRFKGRYGKYLACDKYGILSATSEAIAPPETWTIIATPDTPGTLQLQTLNETFLTVAESKKPNGAPELRGDATEITFESTLRIRMQARFKPRLKATKEMKEKSKISRKELEEAVGRRLEEDEVKVLKKARREGDYHEQLLNLKSKNKHDKYG

SEQ ID NO: 5264 - DNA, 2447 bp, Muscodor strobelii
  misc_feature: SGI EST ID NO. CUFF.13422.0
  misc_feature: Variant of the nucleotide sequence at SEQ ID NO 5262
gttctccatatttaccagtgtgtcaatagctttcaacatgcgaacaccgaatatcgtcatctacttaaacagtcgataaccgacttcattagcatcccggatcaacataggccactattcaactacctattggcgaaatggtaaagccgctaagcttcaagggcgacaagaagcctaagaagagaaagcgcaccgaagccgagtctgcctccgagaatgtagcttcttcggagctagcaaccacagctcctcaagatcaaggagaggatgacgatagctgggtatcagccgaagcggttggggatgtgacgggacccgtgatgatcgtattgccaagctcgccgccaacctgtattgcatgcgacgcgaatggcaaggtattcactgatcccattgagaacatcatcgatggcaatccatccactgcagaaccgcacgatgtacgacaagtgtgggtcgcgaacaagatgtacggtaccgaaaactacagattcaagggtcgatatggcaagtatctcgcatgcgacaaatacggcatcctctccgcgacatcagaagccatagcaccacccgaaacatggacgatcatcgcaacacctgacacgccaggaacactccagctccaaacactgaacgagacattcctcactgtagcagaatccaagaaaccaaatggtgcgcccgagctacgtggagatgcaacggagatcacattcgagtccacattacgaattcgcatgcaagcgcgtttcaaaccaaggttaaaagccacgaaggaaatgaaagagaagtccaaaatcagccggaaagagctggaggaagcagtagggcggcggttagaggaggacgaagtgaaagtcctaaagaaagcgagacgagaaggcgactatcatgaacagctcttgaacctcaaatccaagaacaaacacgacaagtatggttgatcatttcatgatctagatttgccattaagcactacctggtggtttccacgctttgatgaatccatcctcgccagcactgaatactctctgtatgtcatcatagaaggcaaagctacggacaatctcctcagagtgcgctcctggcaatcctgcgctgttatgccggtcgagggtccatgtctcgcctttcgtgagatggatcaactcgaacgcttgttgcctgctacggtcagtcatcatgatttagtttgcccagaacagcttcgacttactcatgggcacctgcacctatcacggccccggcaccatttgccttggcagtgatattggcgatgtattggcagccgagcacgcttctcatatccccgaaatccgttgtcgctgcgcctttctcgtagccctctgccatgtcgtagagagccaacctttcgtcgtgtgaaagtgcatagacctcggtgtcattcaggaaggaagcatggtgtatggaggagccgtgattgaaagtctgtattatgacttcatcctcgtctgtgattctcgtgtcgcagatatttacgagaccgtcggttgatcctgataacaagatgttgggatcgtttgctttgaaattcagctgacgtaggtcagcctaagcaatacgcttgtcatgaaagtactgccatacctcagtgacatcgtcactatgaacttctttgtagtgcagtttcgggtttgatttcatgcgagaatccctgaatgccaatcaacacaacatatctctcaatgacttatacagatatagcctaccatattattatcgaggcttggtgattttgtagctccgtcccagcggctatagaataccctgcatctgagcacgccactgataacacagaaacctggccctctactatatttcagcactctcatgctcaccccagaagtatcacaccgtcacctaccagcagtgaatcgggcagcctcggcctgtcgtgcatcctgtcttaaatcccacaaagaaattgtgccattttctcctgcagtagctacgactgagttggccgaatcatatgctccagcacacgtgatattgccatgtttcgtaatgagattaactgttggaccagtcttcaaactggaggggctgaatagcgagagcttctgatctgaagaaatagtagcagggccggatgtgagtgggacgatgtgcaggacatagacttcctcacggaggggtatcttgtaggcgtctatgcactcaagaggatacatctttgtgttgtgtcaagttgccaaatgccagtttaaggcaggtacgatcaaattgttatcgcctctattagtgagaagagttgggtaccccgcgatgaagcttgacacaagtggatggtgtccgttgcaagatttgacggaagatctgacatttacttctgtcaaaaaaccgtagtttgtaaagttgaagagattgcgcacttggtatccaacgaaagattagtatctctggttgctgtcctttcgttgaat

SEQ ID NO: 5265 - DNA, 1014 bp, Muscodor strobelii
  misc_feature: SGI cDNA ID NO. 561467
  misc_feature: Encodes the peptide sequence at SEQ ID NO 5266
atgtatcctcttgagtgcatagacgcctacaagatacccctccgtgaggaagtctatgtcctgcacatcgtcccactcacatccggccctgctactatttcttcagatcagaagctctcgctattcagcccctccagtttgaagactggtccaacagttaatctcattacgaaacatggcaatatcacgtgtgctggagcatatgattcggccaactcagtcgtagctactgcaggagaaaatggcacaatttctttgtgggatttaagacaggatgcacgacaggccgaggctgcccgattcactgctgagggccaggtttctgtgttatcagtggcgtgctcagatgcagggtattctatagccgctgggacggagctacaaaatcaccaagcctcgataataatatgggattctcgcatgaaatcaaacccgaaactgcactacaaagaagttcatagtgacgatgtcactgagctgaatttcaaagcaaacgatcccaacatcttgttatcaggatcaaccgacggtctcgtaaatatctgcgacacgagaatcacagacgaggatgaagtcataatacagactttcaatcacggctcctccatacaccatgcttccttcctgaatgacaccgaggtctatgcactttcacacgacgaaaggttggctctctacgacatggcagagggctacgagaaaggcgcagcgacaacggatttcggggatatgagaagcgtgctcggctgccaatacatcgccaatatcactgccaaggcaaatggtgccggggccgtgataggtgcaggtgcccatgagcaacaagcgttcgagttgatccatctcacgaaaggcgagacatggaccctcgaccggcataacagcgcaggattgccaggagcgcactctgaggagattgtccgtagctttgccttctatgatgacatacagagagtattcagtgctggcgaggatggattcatcaaagcgtggaaaccaccaggtagtgcttaa

SEQ ID NO: 5266 - protein, 337 aa, Muscodor strobelii
  misc_feature: SGI Peptide ID NO. 561467
  misc_feature (1)..(333): NCBI GI: 164427871 Blast Desc: NCU02570 [Neurospora crassa OR74A] gi|157071917|gb|EAA36465.2| conserved [Neurospora crassa OR74A]
  misc_feature (1)..(333): NCBI GI: 46134947 Blast Desc: FG09322.1 [Gibberella zeae PH-1]
  misc_feature (1)..(333): NCBI GI: 256735565 Blast Desc: [Nectria haematococca mpVI 77-13-4]
  misc_feature (1)..(333): NCBI GI: 171687237 Blast Desc: protein product [Podospora anserina] gi|170943580|emb|CAP69232.1| protein product [Podospora anserina]
  misc_feature (1)..(333): NCBI GI: 145616040 Blast Desc: MGG_03611 [Magnaporthe grisea 70-15] gi|145009812|gb|EDJ94468.1| MGG_03611 [Magnaporthe grisea 70-15]
  misc_feature (1)..(333): NCBI GI: 261355194 Blast Desc: WD repeat-containing protein [Verticillium albo-atrum VaMs.102]
  misc_feature (1)..(273): NCBI GI: 38567135 Blast Desc: conserved [Neurospora crassa]
  misc_feature (1)..(335): NCBI GI: 67517051 Blast Desc: AN0806.2 [Aspergillus nidulans FGSC A4] gi|40746480|gb|EAA65636.1| AN0806.2 [Aspergillus nidulans FGSC A4] gi|259488912|tpe|CBF88747.1| TPA: WD repeat protein nidulans
  misc_feature (19)..(335): NCBI GI: 145241792 Blast Desc: An09g02280 [Aspergillus niger] gi|134078082|emb|CAK40165.1| protein product [Aspergillus niger]
  misc_feature (1)..(337): NCBI GI: 255941864 Blast Desc: Pc16g14030 [Penicillium chrysogenum Wisconsin 54-1255] gi|211586324|emb|CAP94073.1| Pc16g14030 [Penicillium chrysogenum Wisconsin 54-1255]
MYPLECIDAYKIPLREEVYVLHIVPLTSGPATISSDQKLSLFSPSSLKTGPTVNLITKHGNITCAGAYDSANSVVATAGENGTISLWDLRQDARQAEAARFTAEGQVSVLSVACSDAGYSIAAGTELQNHQASIIIWDSRMKSNPKLHYKEVHSDDVTELNFKANDPNILLSGSTDGLVNICDTRITDEDEVIIQTFNHGSSIHHASFLNDTEVYALSHDERLALYDMAEGYEKGAATTDFGDMRSVLGCQYIANITAKANGAGAVIGAGAHEQQAFELIHLTKGETWTLDRHNSAGLPGAHSEEIVRSFAFYDDIQRVFSAGEDGFIKAWKPPGSA

SEQ ID NO: 5267 - DNA, 1720 bp, Muscodor strobelii
  misc_feature: SGI EST ID NO. CUFF.13423.1
  misc_feature: Variant of the nucleotide sequence at SEQ ID NO 5265
cgaaaggacagcaaccagagatactaatctttcgttggataccaagtgcgcaatctcttcaactttacaaactacggttttttgacagaagtaaatgtcagatcttccgtcaaatcttgcaacggacaccatccacttgtgtcaagcttcatcgcggggtacccaactcttctcactaatagaggcgataacaatttgatcgtacctgccttaaactggcatttggcaacttgacacaacacaaagatgtatcctcttgagtgcatagacgcctacaagatacccctccgtgaggaagtctatgtcctgcacatcgtcccactcacatccggccctgctactatttcttcagatcagaagctctcgctattcagcccctccagtttgaagactggtccaacagttaatctcattacgaaacatggcaatatcacgtgtgctggagcatatgattcggccaactcagtcgtagctactgcaggagaaaatggcacaatttctttgtgggatttaagacaggatgcacgacaggccgaggctgcccgattcactgctgagggccaggtttctgtgttatcagtggcgtgctcagatgcagggtattctatagccgctgggacggagctacaaaatcaccaagcctcgataataatatgggattctcgcatgaaatcaaacccgaaactgcactacaaagaagttcatagtgacgatgtcactgagctgaatttcaaagcaaacgatcccaacatcttgttatcaggatcaaccgacggtctcgtaaatatctgcgacacgagaatcacagacgaggatgaagtcataatacagactttcaatcacggctcctccatacaccatgcttccttcctgaatgacaccgaggtctatgcactttcacacgacgaaaggttggctctctacgacatggcagagggctacgagaaaggcgcagcgacaacggatttcggggatatgagaagcgtgctcggctgccaatacatcgccaatatcactgccaaggcaaatggtgccggggccgtgataggtgcaggtgcccatgagcaacaagcgttcgagttgatccatctcacgaaaggcgagacatggaccctcgaccggcataacagcgcaggattgccaggagcgcactctgaggagattgtccgtagctttgccttctatgatgacatacagagagtattcagtgctggcgaggatggattcatcaaagcgtggaaaccaccaggtagtgcttaatggcaaatctagatcatgaaatgatcaaccatacttgtcgtgtttgttcttggatttgaggttcaagagctgttcatgatagtcgccttctcgtctcgctttctttaggactttcacttcgtcctcctctaaccgccgccctactgcttcctccagctctttccggctgattttggacttctctttcatttccttcgtggcttttaaccttggtttgaaacgcgcttgcatgcgaattcgtaatgtggactcgaatgtgatctccgttgcatctccacgtagctcgggcgcaccatttggtttcttggattctgctacagtgaggaatgtctcgttcagtgtttggagctggagtgttcctggcgtgtcaggtgttgcgatgatcgtccatgtttcgggtggtgctatggcttctgatgtcgcggagaggatgccgtatttgtcgcatgcgagataccta

SEQ ID NO: 5268 - DNA, 2511 bp, Muscodor strobelii
  misc_feature: SGI cDNA ID NO. 561468
  misc_feature: Encodes the peptide sequence at SEQ ID NO 5269
atgcggcattcgcttgtgtccgccctgttgctgtcgcaacttgcggcgcccattcttgctgccgaccagaaagttctagcatctgacagtccgaattccaattctgcctattccgaacatgccgccgagacagaccttggccccagccaacgtcatgcctggaatccgtatcagaatggctgggagctggtgaacgaggcgtttgtagagttacgcaagatcaggataccgacccatcgacggacaaagaagcagacagggctcttcaccaccattgcctcatacgcactgaaagctctcccgagcatacgcgcaagctctgcacccactcaagaacacatcgcgcccgtcatcactggcccgttactcgatggagtcaagctattacagcaggcagcggaccagaacaacaccgatgccatttacttactcggccagttcaacttctacggcaactactcgcatccaagaaacttcaaaacagcgttcgatcattattatagactggcatcagaatatggaaacagctctgcacagtacatggtcggtctcatgtatgccacaggtctgggggatgcggtagagcgggaccaggcaaaagcgcttctctatcatacctttgccgctgaccagggccacacccgatcagaaatgactgttgcagcccgacacgtgaacggcatcggagttccgaagaactgcgagatcgcatgcaaatactacaagagagtggcggataaggccatggtgtggttccgatcggggccgcctggcggaatgacagtcattcccgaagcataccgactctctgatgaagttggaggtgtatatggagagggagccagtttcgttagctccggaatcaacgcgctcaaagcgagccccaactccgatgcctacgcctcgatcgacgatgttattgagtatctcgacctcatgtctcaaaagggagattttaaggcatcctttaacctgggaagactatactacgagggacagcggggtctcgaccgaaacgtggagctggctaggaggtacttctatgctgttacgagcaagtattggcgtactaaggatggccgtacggtggatgcggcgaaaccccaactcgagaagattgcgagcaaagctgctggctacattgggcggatgtatttgcgaggcgaaggcgggaagcaggacttcaagcttgccaagggctggtttgaacggggtatcaagcatggagacgcacagtcacaatggggactggggctcatgaatctccacgcctatggtgttccgaaaaatgtccccaaagcattcgagttattcaaagctgcagcggatcaggacttccacctcgctcacgtcgcattgggtgctctacacctagaccagggccagcccgatgacctcaaagtcgccaattcatacttcgaggccgctgttcggtggcaaaacttagaggctcagtactacctcgcagagatgatccaccatggagtcgggcgtgacaagacgtgtgccgtcgcaatggcgtactataagagtgtcgctgagcgctccgaacctcttgtctcttcctggacggaggccaaccaggcatatgaagatggcgatcaagagcttgcctttcttgactatgttatggctgcagagcaaggctacgagaaggcgcagaataacgttgccttcctacttgatccgacacactcagtcttcaccattccaagctggctaaagcgtcatgcggctaagccaaaactccttcagaactctgctctagcattgatctactggactcgatctgcaatacagtcgaatatcgactccttagtcaagatgggcgactattatctcgccggcattggaacagaggctgcttttgagaaggcagctcagtgctacgcgggcgcgtcagagtattaccaaagtgcccaagctctgtacaatttaggctggatgcatgagaatggtatcggcttgacgcaggactttcaccttgccaagcgctattacgaccaagccaaagagaccaacgacgaggcatacctacccgtaaccttgagcctctacaagttgcgagcacgaagtgcttggaacacattcacgcgtggaaaaatcaactcaatccacgacgaaccctcacaaaagaaagaatggtccttcacagaatggctagcaaacttcctgcgcgacgaaaatgcgccgtacgacgaggtgtacgaagactactatgatgacacgattaccggcagcgacggcgagccgatgggcgatgagtttgacgatgacctggacggcatatttgagagtctgatgatattgtctctggtgggtggcatcatgttcttgatgtggtatagagcccagagacaacaggcacatagagaacagcaagagagagaacgacgcacgcagggtgttcagcaacagtatggtgcacaacagcagcacccacgaggaggtctaccgccgccgcaagacccgaatttcgcgcagtggggtgcgggcggtgttgggcattag

SEQ ID NO: 5269 - protein, 836 aa, Muscodor strobelii
  misc_feature: SGI Peptide ID NO. 561468
  misc_feature (176)..(213): Pfam Id: PF08238 Pfam Desc: Sel1 repeat
  misc_feature (411)..(446): Pfam Id: PF08238 Pfam Desc: Sel1 repeat
  misc_feature (640)..(675): Pfam Id: PF08238 Pfam Desc: Sel1 repeat
  misc_feature (375)..(410): Pfam Id: PF08238 Pfam Desc: Sel1 repeat
  misc_feature (62)..(833): NCBI GI: 116181526 Blast Desc: CHGG_01391 [Chaetomium globosum CBS 148.51] gi|88185688|gb|EAQ93156.1| CHGG_01391 [Chaetomium globosum CBS 148.51]
  misc_feature (1)..(835): NCBI GI: 256734709 Blast Desc: NECHADRAFT_30793 [Nectria haematococca mpVI 77-13-4]
  misc_feature (60)..(836): NCBI GI: 145616042 Blast Desc: MGG_13508 [Magnaporthe grisea 70-15] gi|145009813|gb|EDJ94469.1| MGG_13508 [Magnaporthe grisea 70-15]
  misc_feature (58)..(828): NCBI GI: 171687239 Blast Desc: protein product [Podospora anserina] gi|170943581|emb|CAP69233.1| protein product [Podospora anserina]
  misc_feature (58)..(833): NCBI GI: 46108054 Blast Desc: FG00909.1 [Gibberella zeae PH-1]
  misc_feature (2)..(836): NCBI GI: 38567136 Blast Desc: conserved [Neurospora crassa]
  misc_feature (64)..(836): NCBI GI: 156053860 Blast Desc: SS1G_05778 [Sclerotinia sclerotiorum 1980] gi|154703558|gb|EDO03297.1| SS1G_05778 [Sclerotinia sclerotiorum 1980]
  misc_feature (60)..(836): NCBI GI: 119494982 Blast Desc: ubiquitin-protein ligase Sel1/Ubx2, [Neosartorya fischeri NRRL 181] gi|119412450|gb|EAW22391.1| ubiquitin-protein ligase Sel1/Ubx2, [Neosartorya fischeri NRRL 181]
  misc_feature (55)..(836): NCBI GI: 146322648 Blast Desc: ubiquitin-protein ligase Sel1/Ubx2 [Aspergillus fumigatus Af293] gi|129557772|gb|EBA27413.1| ubiquitin-protein ligase Sel1/Ubx2, [Aspergillus fumigatus Af293] ubiquitin-protein
  misc_feature (54)..(833): NCBI GI: 242778243 Blast Desc: ubiquitin-protein ligase Sel1/Ubx2, [Talaromyces stipitatus ATCC 10500] gi|218722818|gb|EED22236.1| ubiquitin-protein ligase Sel1/Ubx2, [Talaromyces stipitatus ATCC
MRHSLVSALLLSQLAAPILAADQKVLASDSPNSNSAYSEHAAETDLGPSQRHAWNPYQNGWELVNEAFVELRKIRIPTHRRTKKQTGLFTTIASYALKALPSIRASSAPTQEHIAPVITGPLLDGVKLLQQAADQNNTDAIYLLGQFNFYGNYSHPRNFKTAFDHYYRLASEYGNSSAQYMVGLMYATGLGDAVERDQAKALLYHTFAADQGHTRSEMTVAARHVNGIGVPKNCEIACKYYKRVADKAMVWFRSGPPGGMTVIPEAYRLSDEVGGVYGEGASFVSSGINALKASPNSDAYASIDDVIEYLDLMSQKGDFKASFNLGRLYYEGQRGLDRNVELARRYFYAVTSKYWRTKDGRTVDAAKPQLEKIASKAAGYIGRMYLRGEGGKQDFKLAKGWFERGIKHGDAQSQWGLGLMNLHAYGVPKNVPKAFELFKAAADQDFHLAHVALGALHLDQGQPDDLKVANSYFEAAVRWQNLEAQYYLAEMIHHGVGRDKTCAVAMAYYKSVAERSEPLVSSWTEANQAYEDGDQELAFLDYVMAAEQGYEKAQNNVAFLLDPTHSVFTIPSWLKRHAAKPKLLQNSALALIYWTRSAIQSNIDSLVKMGDYYLAGIGTEAAFEKAAQCYAGASEYYQSAQALYNLGWMHENGIGLTQDFHLAKRYYDQAKETNDEAYLPVTLSLYKLRARSAWNTFTRGKINSIHDEPSQKKEWSFTEWLANFLRDENAPYDEVYEDYYDDTITGSDGEPMGDEFDDDLDGIFESLMILSLVGGIMFLMWYRAQRQQAHREQQERERRTQGVQQQYGAQQQHPRGGLPPPQDPNFAQWGAGGVGH

SEQ ID NO: 5270 - DNA, 4770 bp, Muscodor strobelii
  misc_feature: SGI EST ID NO. CUFF.13833.0
  misc_feature: Variant of the nucleotide sequence at SEQ ID NO 5268
agctgacgtcgctttcccgccgatctggacagctttacaagtaacacctgtctatcggtacgtcgctgaacctttcagcttaaaggtccatcatagtgtcacggtcacggttgccgcttttgattcatttcacaaattcagttcgcagcggtacactcacctccaaaggcgatctcctcactactcctttgcggaccatgatatctctacagttatcatcatcttgctcttagcagatcaaaccaacatgcggcattcgcttgtgtccgccctgttgctgtcgcaacttgcggcgcccattcttgctgccgaccagaaagttctagcatctgacagtccgaattccaattctgcctattccgaacatgccgccgagacagaccttggccccagccaacgtcatgcctggaatccgtatcagaatggctgggagctggtgaacgaggcgtttgtagagttacgcaagatcaggataccgacccatcgacggacaaagaagcagacagggctcttcaccaccattgcctcatacgcactgaaagctctcccgagcatacgcgcaagctctgcacccactcaagaacacatcgcgcccgtcatcactggcccgttactcgatggagtcaagctattacagcaggcagcggaccagaacaacaccgatgccatttacttactcggccagttcaacttctacggcaactactcgcatccaagaaacttcaaaacagcgttcgatcattattatagactggcatcagaatatggaaacagctctgcacagtacatggtcggtctcatgtatgccacaggtctgggggatgcggtagagcgggaccaggcaaaagcgcttctctatcatacctttgccgctgaccagggccacacccgatcagaaatgactgttgcagcccgacacgtgaacggcatcggagttccgaagaactgcgagatcgcatgcaaatactacaagagagtggcggataaggccatggtgtggttccgatcggggccgcctggcggaatgacagtcattcccgaagcataccgactctctgatgaagttggaggtgtatatggagagggagccagtttcgttagctccggaatcaacgcgctcaaagcgagccccaactccgatgcctacgcctcgatcgacgatgttattgagtatctcgacctcatgtctcaaaagggagattttaaggcatcctttaacctgggaagactatactacgagggacagcggggtctcgaccgaaacgtggagctggctaggaggtacttctatgctgttacgagcaagtattggcgtactaaggatggccgtacggtggatgcggcgaaaccccaactcgagaagattgcgagcaaagctgctggctacattgggcggatgtatttgcgaggcgaaggcgggaagcaggacttcaagcttgccaagggctggtttgaacggggtatcaagcatggagacgcacagtcacaatggggactggggctcatgaatctccacgcctatggtgttccgaaaaatgtccccaaagcattcgagttattcaaagctgcagcggatcaggacttccacctcgctcacgtcgcattgggtgctctacacctagaccagggccagcccgatgacctcaaagtcgccaattcatacttcgaggccgctgttcggtggcaaaacttagaggctcagtactacctcgcagagatgatccaccatggagtcgggcgtgacaagacgtgtgccgtcgcaatggcgtactataagagtgtcgctgagcgctccgaacctcttgtctcttcctggacggaggccaaccaggcatatgaagatggcgatcaagagcttgcctttcttgactatgttatggctgcagagcaaggctacgagaaggcgcagaataacgttgccttcctacttgatccgacacactcagtcttcaccattccaagctggctaaagcgtcatgcggctaagccaaaactccttcagaactctgctctagcattgatctactggactcgatctgcaatacagtcgaatatcgactccttagtcaagatgggcgactattatctcgccggcattggaacagaggctgcttttgagaaggcagctcagtgctacgcgggcgcgtcagagtattaccaaagtgcccaagctctgtacaatttaggctggatgcatgagaatggtatcggcttgacgcaggactttcaccttgccaagcgctattacgaccaagccaaagagaccaacgacgaggcatacctacccgtaaccttgagcctctacaagttgcgagcacgaagtgcttggaacacattcacgcgtggaaaaatcaactcaatccacgacgaaccctcacaaaagaaagaatggtccttcacagaatggctagcaaacttcctgcgcgacgaaaatgcgccgtacgacgaggtgtacgaagactactatgatgacacgattaccggcagcgacggcgagccgatgggcgatgagtttgacgatgacctggacggcatatttgagagtctgatgatattgtctctggtgggtggcatcatgttcttgatgtggtatagagcccagagacaacaggcacatagagaacagcaagagagagaacgacgcacgcagggtgttcagcaacagtatggtgcacaacagcagcacccacgaggaggtctaccgccgccgcaagacccgaatttcgcgcagtggggtgcgggcggtgttgggcattagtgttgagcatggagtattgaggaagagagagaggggaagctgtacatatgttgtagtgttatgaaagaaagaaaatgcatgggtgtatgataaagctttgaatggtgtcatctgtagcattcattgctcgtgtgtaagtgttcctaacacagcacttttatgcgtattcaaagcagttcaccaagattaccacaatgtagtggcccttgtattgatatccatgttcatatttgtctcctctctaggatgcaccacttccagtacctatcagcactttgcgagataattataaataggtacacaatccaggctctcatcattagctatatagtaggtaggtatcgaaagcgcttctgtcccgcagtccactctattacaaacacgttgtttatctcgtactctcgctgtctcgcttcggtgtatatagcatcaggatgggatgcgatggcgtcgactctcagagcttgcggttgctgatcgacagcagttgctctattccaatacctccaaagccagtcatattacatcgacccattgtcgcgtgttctttatttctcaaatcctccacttcatgacctacctcctacggaactcatcctcgtcctcaacctttggaggcggaggtccagtaggcggcgcatagtcatctctactcgcacttccaccattcatgctctgtccagccccattcatgcccgcatccatgtctcttctagcctgcgcagggtcgattttagatccgtcgttctccatgtacatcggcggccgtgtggcatcatacacaggtggcggtggtgccatattgtgcattccgtattcgtttgccccgcctgggttctggccgtagacgggtcggtagtatacggcgtgggcttgtgggtggacgtattgcgcgtaggcagggtcgtatgttccgcgctcggagcgagagagcaaccactgggtcttgttagtgagtgctggagagcgtgttgggcatgaagcatagagatccgagggaagatgggtgcaagagaaaatgggagaagaaaggatgagccctacagagtggtaagccatgggtcgaaggccctttcgcattcgtcttcgcgcgtgcgcccgcccgcctactatccagagcaggagcacgaagatgaatgtgaggaataggacgtatttcacgatgtagccttcctatttgctcgttgttagctgtgccagttcctatcttgtctctgccgcaatgcaaaagcctagctagtgggtttgcgaatgagtgtcgcataccttggtgtaccagaagtaaacgccgtcatctcgtttctcgatctgtcgtcgggagagagcgcctgatgctaggtctcggaccatgtgcccgctaatgcggcttgcaaattccatcgtggtttctgctcctccgatggacgcgaggttgtttggaatgtttgatgtcgtcgtaaatgagatgagttgtaggtagatcggtgttaggcacgtaggtagctgtggtggcgacttccaggttcttggcttgccaagtcaacgggctgggctctaacgggaatgtccgccgtattgactaacagacattcgaaaatcaggctggatttggaagtgagtgaagtagggtatgcagtcgattggagataggtagaggaggtcgttgaggtgagttctacaatgtggtagatcgtaagtcgggtcggagttcaagttggagctggaagtcgaccaagcaacgaaccaactaggtacttggtggaggtgctaacaccagacgccacaccttaatcgcaaccccaataccgaggtcctggactagacgcgcaatgcgactagccaaaatcgcctcactgaggtgtgcaagaacaatcaaggaaacaattagtcgtgtgtgaatttaatgagaggtcacattcagcagagttttcacgattagaggaattgaaggatgccaagttttcggaaaaacacattcaagaaaaagcgaggtggtcaatccggttctgaaacatcatttcgccacaaagttt

SEQ ID NO: 5271 - DNA, 606 bp, Muscodor strobelii
  misc_feature: SGI cDNA ID NO. 561469
  misc_feature: Encodes the peptide sequence at SEQ ID NO 5272
atggaatttgcaagccgcattagcgggcacatggtccgagacctagcatcaggcgctctctcccgacgacagatcgagaaacgagatgacggcgtttacttctggtacaccaaggaaggctacatcgtgaaatacgtcctattcctcacattcatcttcgtgctcctgctctggatagtaggcgggcgggcgcacgcgcgaagacgaatgcgaaagggccttcgacccatggcttaccactcttggttgctctctcgctccgagcgcggaacatacgaccctgcctacgcgcaatacgtccacccacaagcccacgccgtatactaccgacccgtctacggccagaacccaggcggggcaaacgaatacggaatgcacaatatggcaccaccgccacctgtgtatgatgccacacggccgccgatgtacatggagaacgacggatctaaaatcgaccctgcgcaggctagaagagacatggatgcgggcatgaatggggctggacagagcatgaatggtggaagtgcgagtagagatgactatgcgccgcctactggacctccgcctccaaaggttgaggacgaggatgagttccgtaggaggtag

SEQ ID NO: 5272 - protein, 201 aa, Muscodor strobelii
  misc_feature: SGI Peptide ID NO. 561469
  misc_feature (30)..(189): NCBI GI: 154321323 Blast Desc: BC1G_01536 [Botryotinia fuckeliana B05.10] gi|150852074|gb|EDN27266.1| BC1G_01536 [Botryotinia fuckeliana B05.10]
  misc_feature (13)..(163): NCBI GI: 46108052 Blast Desc: FG00908.1 [Gibberella zeae PH-1]
  misc_feature (30)..(189): NCBI GI: 156054310 Blast Desc: SS1G_06003 [Sclerotinia sclerotiorum 1980] gi|154703783|gb|EDO03522.1| SS1G_06003 [Sclerotinia sclerotiorum 1980]
  misc_feature (29)..(189): NCBI GI: 256734710 Blast Desc: NECHADRAFT_102387 [Nectria haematococca mpVI 77-13-4]
  misc_feature (29)..(157): NCBI GI: 116180552 Blast Desc: [Chaetomium globosum CBS 148.51] gi|88185201|gb|EAQ92669.1| [Chaetomium globosum CBS 148.51]
  misc_feature (25)..(143): NCBI GI: 171687713 Blast Desc: protein product [Podospora anserina] gi|170943818|emb|CAP69470.1| protein product [Podospora anserina]
  misc_feature (58)..(156): NCBI GI: 261355169 Blast Desc: conserved [Verticillium albo-atrum VaMs.102]
  misc_feature (38)..(160): NCBI GI: 169603385 Blast Desc: SNOG_04702 [Phaeosphaeria nodorum SN15] gi|160706383|gb|EAT88462.2| SNOG_04702 [Phaeosphaeria nodorum SN15]
  misc_feature (34)..(169): NCBI GI: 189203307 Blast Desc: [Pyrenophora tritici-repentis Pt-1C-BFP] gi|187985088|gb|EDU50576.1| [Pyrenophora tritici-repentis Pt-1C-BFP]
  misc_feature (15)..(155): NCBI GI: 39943058 Blast Desc: [Magnaporthe grisea 70-15] gi|145009815|gb|EDJ94471.1| [Magnaporthe grisea 70-15]
MEFASRISGHMVRDLASGALSRRQIEKRDDGVYFWYTKEGYIVKYVLFLTFIFVLLLWIVGGRAHARRRMRKGLRPMAYHSWLLSRSERGTYDPAYAQYVHPQAHAVYYRPVYGQNPGGANEYGMHNMAPPPPVYDATRPPMYMENDGSKIDPAQARRDMDAGMNGAGQSMNGGSASRDDYAPPTGPPPPKVEDEDEFRRR

SEQ ID NO: 5273 - DNA, 4780 bp, Muscodor strobelii
  misc_feature: SGI EST ID NO. CUFF.13834.1
  misc_feature: Variant of the nucleotide sequence at SEQ ID NO 5271
aaactttgtggcgaaatgatgtttcagaaccggattgaccacctcgctttttcttgaatgtgtttttccgaaaacttggcatccttcaattcctctaatcgtgaaaactctgctgaatgtgacctctcattaaattcacacacgactaattgtttccttgattgttcttgcacacctcagtgaggcgattttggctagtcgcattgcgcgtctagtccaggacctcggtattggggttgcgattaaggtgtggcgtctggtgttagcacctccaccaagtacctagttggttcgttgcttggtcgacttccagctccaacttgaactccgacccgacttacgatctaccacattgtagaactcacctcaacgacctcctctacctatctccaatcgactgcataccctacttcactcacttccaaatccagcctgattttcgaatgtctgttagtcaatacggcggacattcccgttagagcccagcccgttgacttggcaagccaagaacctggaagtcgccaccacagctacctacgtgcctaacaccgatctacctacaactcatctcatttacgacgacatcaaacattccaaacaacctcgcgtccatcggaggagcagaaaccacgatggaatttgcaagccgcattagcgggcacatggtccgagacctagcatcaggcgctctctcccgacgacagatcgagaaacgagatgacggcgtttacttctggtacaccaaggaaggctacatcgtgaaatacgtcctattcctcacattcatcttcgtgctcctgctctggatagtaggcgggcgggcgcacgcgcgaagacgaatgcgaaagggccttcgacccatggcttaccactcttggttgctctctcgctccgagcgcggaacatacgaccctgcctacgcgcaatacgtccacccacaagcccacgccgtatactaccgacccgtctacggccagaacccaggcggggcaaacgaatacggaatgcacaatatggcaccaccgccacctgtgtatgatgccacacggccgccgatgtacatggagaacgacggatctaaaatcgaccctgcgcaggctagaagagacatggatgcgggcatgaatggggctggacagagcatgaatggtggaagtgcgagtagagatgactatgcgccgcctactggacctccgcctccaaaggttgaggacgaggatgagttccgtaggaggtaggtcatgaagtggaggatttgagaaataaagaacacgcgacaatgggtcgatgtaatatgactggctttggaggtattggaatagagcaactgctgtcgatcagcaaccgcaagctctgagagtcgacgccatcgcatcccatcctgatgctatatacaccgaagcgagacagcgagagtacgagataaacaacgtgtttgtaatagagtggactgcgggacagaagcgctttcgatacctacctactatatagctaatgatgagagcctggattgtgtacctatttataattatctcgcaaagtgctgataggtactggaagtggtgcatcctagagaggagacaaatatgaacatggatatcaatacaagggccactacattgtggtaatcttggtgaactgctttgaatacgcataaaagtgctgtgttaggaacacttacacacgagcaatgaatgctacagatgacaccattcaaagctttatcatacacccatgcattttctttctttcataacactacaacatatgtacagcttcccctctctctcttcctcaatactccatgctcaacactaatgcccaacaccgcccgcaccccactgcgcgaaattcgggtcttgcggcggcggtagacctcctcgtgggtgctgctgttgtgcaccatactgttgctgaacaccctgcgtgcgtcgttctctctcttgctgttctctatgtgcctgttgtctctgggctctataccacatcaagaacatgatgccacccaccagagacaatatcatcagactctcaaatatgccgtccaggtcatcgtcaaactcatcgcccatcggctcgccgtcgctgccggtaatcgtgtcatcatagtagtcttcgtacacctcgtcgtacggcgcattttcgtcgcgcaggaagtttgctagccattctgtgaaggaccattctttcttttgtgctggatgggtgttagcatttatagtcgtgaacaatgagggtggggtttagggatgactgggaacctacagggttcgtcgtggattgagttgatttttccacgcgtgaatgtgttccaagcacttcgtgctcgcaacttgtagaggctcaaggttacgggtaggtatgcctcgtcgttggtctctttggcttggtcgtaatagcgcttggcaaggtgaaagtcctgcgtcaagccgataccattctcatgcatccagcctaaattgtacagagcttgggcactttggtaatactctgacgcgcccgcgtagcactgagctgccttctcaaaagcagcctctgttccaatgccggcgagataatagtcgcccatcttgactaaggagtcgatattcgactgtattgcagatcgagtccagtagatcaatgctagagcagagttctgaaggagttttggcttagccgcatgacgctttagccagcttggaatggtgaagactgagtgtgtcggatcaagtaggaaggcaacgttattctgcgccttctcgtagccttgctctgcagccataacatagtcaagaaaggcaagctcttgatcgccatcttcatatgcctggttggcctccgtccaggaagagacaagaggttcggagcgctcagcgacactcttatagtacgccattgcgacggcacacgtcttgtcacgcccgactccatggtggatcatctctgcgaggtagtactgagcctctaagttttgccaccgaacagcggcctcgaagtatgaattggcgactttgaggtcatcgggctggccctggtctaggtgtagagcacccaatgcgacgtgagcgaggtggaagtcctgatccgctgcagctttgaataactcgaatgctttggggacatttttcggaacaccataggcgtggagattcatgagccccagtccccattgtgactgtgcgtctccatgcttgataccccgttcaaaccagcccttggcaagcttgaagtcctgcttcccgccttcgcctcgcaaatacatccgcccaatgtagccagcagctttgctcgcaatcttctcgagttggggtttcgccgcatccaccgtacggccatccttagtacgccaatacttgctcgtaacagcatagaagtacctcctagccagctccacgtttcggtcgagaccccgctgtccctcgtagtatagtcttcccaggttaaaggatgccttaaaatctcccttttgagacatgaggtcgagatactcaataacatcgtcgatcgaggcgtaggcatcggagttggggctcgctttgagcgcgttgattccggagctaacgaaactggctccctctccatatacacctccaacttcatcagagagtcggtatgcttcgggaatgactgtcattccgccaggcggccccgatcggaaccacaccatggccttatccgccactctcttgtagtatttgcatgcgatctcgcagttcttcggaactccgatgccgttcacgtgtcgggctgcaacagtcatttctgatcgggtgtggccctggtcagcggcaaaggtatgatagagaagcgcttttgcctggtcccgctctaccgcatcccccagacctgtggcatacatgagaccgaccatgtactgtgcagagctgtttccatattctgatgccagtctataataatgatcgaacgctgttttgaagtttcttggatgcgagtagttgccgtagaagttgaactggccgagtaagtaaatggcatcggtgttgttctggtccgctgcctgctgtaatagcttgactccatcgagtaacgggccagtgatgacgggcgcgatgtgttcttgagtgggtgcagagcttgcgcgtatgctcgggagagctttcagtgcgtatgaggcaatggtggtgaagagccctgtctgcttctttgtccgtcgatgggtcggtatcctgatcttgcgtaactctacaaacgcctcgttcaccagctcccagcctgtaaccagaagtcagcctcaaatcttaaatattttctttgcctgtcgcgacagtccgtgcctcaccattctgatacggattccaggcatgacgttggctggggccaaggtctgtctcggcggcatgttcggaataggcagaattggaattcggactgtcagatgctagaactttctggtcggcagcaagaatgggcgccgcaagttgcgacagcactatatgaggcagcaggtgttagctttgggctttgggtcggttgcgactgttcatagtggcagaggaacgtacacagggcggacacaagcgaatgccgcatgttggtttgatctgctaagagcaagatgatgataactgtagagatatcatggtccgcaaaggagtagtgaggagatcgcctttggaggtgagtgtaccgctgcgaactgaatttgtgaaatgaatcaaaagcggcaaccgtgaccgtgacactatgatggacctttaagctgaaaggttcagcgacgtaccgatagacaggtgttacttgtaaagctgtccagatcggcgggaaagcgacgtcagct

SEQ ID NO: 5274 - DNA, 2241 bp, Muscodor strobelii
  misc_feature: SGI cDNA ID NO. 561470
  misc_feature: Encodes the peptide sequence at SEQ ID NO 5275
atggacacgttccgttactgtccattggaggacgaatcagcgtctatccgagtcctaacactcttgcctggttcgtctggcaccgcaatacgtatcactatcaatcatgagttattgactaccgcccctgtatctaggccggctgctacaaaactgaagcgtatccggaggagattaccaccgaattggaatgcctacgaaactatggatgatcgtgtggtatactggaaccataaagaatatttatctacctggcacaatcctgaccttaacagtaatgatacttccgtcctagactctaaattacagggcgagccctgcaatactagttacgatgccttatcatactcatggggatcgagccagaaaacacaattggcactggtagaaaatggacaagcaactcaagtcctcccaattaccgctaatgtcgaattggcattgcaacatcttcggtaccaagatcgagagcgacacctctgggtggatgctatttgtatcaaccaagacgacgataacgagcaaagtcgacaggtacaacgcatggggcaaatttattcttctgcaaacatggtcattctatggctcggcccaggcttcaaaggaagtgatatcgcatatactgttttaaatcagattggcaagcaagatctctggacgagagattttgttcgggtaaggtcacccgatgcagacagctcaactcaataccgtgatcaaattgcctcttgcgaggagacagaaacacaaaattcactgaggacactcttttccagagactatttccaacgcctttgggtcatacaagaagcacattctggaaatccgaacacaatcattcaatttgggcacagtgaaatgcactgggctgttttccaatccgcttgtttgactctcgatgctgagctatcagcggatctacggttctatatcttatactctacaaacatttccgttacaaatatttgcggatacttccacgatcagccaactacggatattatgaagtattttgctgcacgcgagtgtaccgacgagagggatcgagtttatgggttgctcaatttgcttcctgagggcgttcgtaaacatatccaggtggattatgcgcacgctgacacgttggaagcttataagagcttgttcttagcgagccttgaaaacgaaagtaggttaccgcaactcgagtgtggaggcagacgcgcaacatcttgtgacactgattcttcaacgtggccaacttggattccacggtggaaatttcctcttcgtgacacattactcgatcgaggcttctctgctgctagcctttctgcagcgcaggccaaatacaatcgcccaaatagtctcgacatcgcctgcatcaagatcgcagccatatctcacacaagctcgcctctggcagcagcttcagatatcatcgagatagtggagcagcttgagggactagatcatatagaattgcataacacgagatattcgaattacgataatagattagatgcttatctccggacatacactttaaaccggtttcaagaccgaattccagatgttcggcactgcgttgtataccaagagtttcacgccgagatccttcaatcagtagttacacccgaaaactcagataaattgagccagaaaacaccatctacaaacgtaagcgtagaatctaatctgctacctgtgtgccatcagcgcacttgcggcagtatgtcgaaatacctatcgagaatttccaccaagacaaaaggaggcagattgttgagactggcaaacgggcatgtgggcttatccgtgacggattgtgaaccaggcgatgtagtgtatgtggtgctaggtagtgacatccctatggttctacgacagtctgagattgaggcgcactttgaagtcgttggtccctgctatgtacacggcctcatggacggcgaggcgcttcttggtaatttgcaaccaccatggagtgttgagataggccgagaagatagcgcacagttccgaccgctattcgtgagtacagataccgattttaagacctttgaagatcctcgcttggctgccgtttctctacctgaagaatgggaaccggttccattcacatggactagacatgatcccatacactgcaggaaattccgaaataaaaagaccgggaaactgatcaattctgacccgagactctcgccagaggctttgattgaacggggtattgctgtggagacgataacgcttatatga

SEQ ID NO: 5275 - protein, 746 aa, Muscodor strobelii
  misc_feature: SGI Peptide ID NO. 561470
  misc_feature (111)..(270): Pfam Id: PF06985 Pfam Desc: Heterokaryon incompatibility protein (HET)
  misc_feature (59)..(88): Pfam Id: PF00397 Pfam Desc: WW domain
  misc_feature (111)..(204): Pfam Id: PF06985 Pfam Desc: Heterokaryon incompatibility protein (HET)
  misc_feature (1)..(746): NCBI GI: 256719970 Blast Desc: NECHADRAFT_98482 [Nectria haematococca mpVI 77-13-4]
  misc_feature (1)..(729): NCBI GI: 46139411 Blast Desc: FG11220.1 [Gibberella zeae PH-1]
  misc_feature (1)..(746): NCBI GI: 154311024 Blast Desc: BC1G_06630 [Botryotinia fuckeliana B05.10] gi|150851034|gb|EDN26227.1| BC1G_06630 [Botryotinia fuckeliana B05.10]
  misc_feature (1)..(746): NCBI GI: 256727220 Blast Desc: NECHADRAFT_32743 [Nectria haematococca mpVI 77-13-4]
  misc_feature (1)..(746): NCBI GI: 169603560 Blast Desc: SNOG_04789 [Phaeosphaeria nodorum SN15] gi|111066060|gb|EAT87180.1| SNOG_04789 [Phaeosphaeria nodorum SN15]
  misc_feature (1)..(746): NCBI GI: 115492481 Blast Desc: [Aspergillus terreus NIH2624] gi|114197728|gb|EAU39428.1| [Aspergillus terreus NIH2624]
  misc_feature (165)..(746): NCBI GI: 145609067 Blast Desc: MGG_09107 [Magnaporthe grisea 70-15] gi|145016510|gb|EDK00940.1| MGG_09107 [Magnaporthe grisea 70-15]
  misc_feature (4)..(746): NCBI GI: 39974569 Blast Desc: MGG_00569 [Magnaporthe grisea 70-15] gi|145018530|gb|EDK02809.1| MGG_00569 [Magnaporthe grisea 70-15]
  misc_feature (111)..(651): NCBI GI: 256730222 Blast Desc: NECHADRAFT_82497 [Nectria haematococca mpVI 77-13-4]
  misc_feature (1)..(460): NCBI GI: 261357884 Blast Desc: conserved [Verticillium albo-atrum VaMs.102]
MDTFRYCPLEDESASIRVLTLLPGSSGTAIRITINHELLTTAPVSRPAATKLKRIRRRLPPNWNAYETMDDRVVYWNHKEYLSTWHNPDLNSNDTSVLDSKLQGEPCNTSYDALSYSWGSSQKTQLALVENGQATQVLPITANVELALQHLRYQDRERHLWVDAICINQDDDNEQSRQVQRMGQIYSSANMVILWLGPGFKGSDIAYTVLNQIGKQDLWTRDFVRVRSPDADSSTQYRDQIASCEETETQNSLRTLFSRDYFQRLWVIQEAHSGNPNTIIQFGHSEMHWAVFQSACLTLDAELSADLRFYILYSTNISVTNICGYFHDQPTTDIMKYFAARECTDERDRVYGLLNLLPEGVRKHIQVDYAHADTLEAYKSLFLASLENESRLPQLECGGRRATSCDTDSSTWPTWIPRWKFPLRDTLLDRGFSAASLSAAQAKYNRPNSLDIACIKIAAISHTSSPLAAASDIIEIVEQLEGLDHIELHNTRYSNYDNRLDAYLRTYTLNRFQDRIPDVRHCVVYQEFHAEILQSVVTPENSDKLSQKTPSTNVSVESNLLPVCHQRTCGSMSKYLSRISTKTKGGRLLRLANGHVGLSVTDCEPGDVVYVVLGSDIPMVLRQSEIEAHFEVVGPCYVHGLMDGEALLGNLQPPWSVEIGREDSAQFRPLFVSTDTDFKTFEDPRLAAVSLPEEWEPVPFTWTRHDPIHCRKFRNKKTGKLINSDPRLSPEALIERGIAVETITLI

SEQ ID NO: 5276 - DNA, 141 bp, Muscodor strobelii
  misc_feature: SGI EST ID NO. CUFF.13379.0
  misc_feature: Variant of the nucleotide sequence at SEQ ID NO 5274
ccaagacaaaaggaggcagattgttgagactggcaaacgggcatgtgggcttatccgtgacggattgtgaaccaggcgatgtagtgtatgtggtgctaggtagtgacatccctatggttctacgacagtctgagattgagg

SEQ ID NO: 5277 - DNA, 507 bp, Muscodor strobelii
  misc_feature: SGI cDNA ID NO. 561471
  misc_feature: Encodes the peptide sequence at SEQ ID NO 5278
atgcaatctaagattttcttcctcgctagcctggtcttggtcggcaatgtcgctgctcttcccgtccgcaccaccgaggcagtgatgactaggaacgaggccggcaccgctttggattacatctacgatgatcagaccaagcgcaacgaagccggaaccgccctagactacatctacgacgacaaaaccaagaggaatgaggcgggtaccgcactggactatatctacggtcgtgaggacaacaccaagcggaacaaagccggcactgcccttaattacatttacgatgacaacgccaagcgcaatgaggctgggactgccctagactacatctacgacggcgaggagaagaccaagaggaatgaagccggcacggcgctcgactacatctatgatggccagaccactaagcgcaatgaagccggtacggccttggattatatctacgacgacaagtctaagaggaacgaggctggtacggctctcgactacatctacgacggctga

SEQ ID NO: 5278 - protein, 168 aa, Muscodor strobelii
  misc_feature: SGI Peptide ID NO. 561471
  misc_feature (38)..(168): NCBI GI: 224091335 Blast Desc: : microtubule-associated protein 1B isoform 2 [Taeniopygia guttata]
  misc_feature (30)..(167): NCBI GI: 224091335 Blast Desc: : microtubule-associated protein 1B isoform 2 [Taeniopygia guttata]
  misc_feature (26)..(168): NCBI GI: 224091339 Blast Desc: : microtubule-associated protein 1B isoform 1 [Taeniopygia guttata]
  misc_feature (38)..(167): NCBI GI: 224091339 Blast Desc: : microtubule-associated protein 1B isoform 1 [Taeniopygia guttata]
  misc_feature (43)..(167): NCBI GI: 224091335 Blast Desc: : microtubule-associated protein 1B isoform 2 [Taeniopygia guttata]
  misc_feature (26)..(167): NCBI GI: 118103949 Blast Desc: : microtubule-associated protein 1B [Gallus gallus]
  misc_feature (26)..(167): NCBI GI: 224091339 Blast Desc: : microtubule-associated protein 1B isoform 1 [Taeniopygia guttata]
MQSKIFFLASLVLVGNVAALPVRTTEAVMTRNEAGTALDYIYDDQTKRNEAGTALDYIYDDKTKRNEAGTALDYIYGREDNTKRNKAGTALNYIYDDNAKRNEAGTALDYIYDGEEKTKRNEAGTALDYIYDGQTTKRNEAGTALDYIYDDKSKRNEAGTALDYIYDG

SEQ ID NO: 5279 - DNA, 855 bp, Muscodor strobelii
  misc_feature: SGI EST ID NO. CUFF.13388.0
  misc_feature: Variant of the nucleotide sequence at SEQ ID NO 5277
aaacgacacacctccaggcacttcccgactgacgataagaatgcgagctcggatctcccacatctaaatatctaaaagtattccttgaaatcgtacccaccacataaacatcatgcaatctaagattttcttcctcgctagcctggtcttggtcggcaatgtcgctgctcttcccgtccgcaccaccgaggcagtgatgactaggaacgaggccggcaccgctttggattacatctacgatgatcagaccaagcgcaacgaagccggaaccgccctagactacatctacgacgacaaaaccaagaggaatgaggcgggtaccgcactggactatatctacggtcgtgaggacaacaccaagcggaacaaagccggcactgcccttaattacatttacgatgacaacgccaagcgcaatgaggctgggactgccctagactacatctacgacggcgaggagaagaccaagaggaatgaagccggcacggcgctcgactacatctatgatggccagaccactaagcgcaatgaagccggtacggccttggattatatctacgacgacaagtctaagaggaacgaggctggtacggctctcgactacatctacgacggctgagccccaactgtgttagttctgtgcctgtccgagttctccagttgtttaacttcctggagaacttggacacgggtgactaggtgctgcttgaagagactcggaagcgcaaaggcagttgttatggatgaccagaaatagtgaagggcccgcattgtccaaagccttcgattgagaaatgacgtacgcaagagttaggtagaagatgcctcctgtccgtaaattggatgagatccaga

SEQ ID NO: 5280 - DNA, 741 bp, Muscodor strobelii
  misc_feature: SGI cDNA ID NO. 561472
  misc_feature: Encodes the peptide sequence at SEQ ID NO 5281
atgtcttcagacacaagagagaaagaggctcacgaaaagctcctaggcccgacctcacgcggcacctcgtttgactatgaagatggtactcatggtccagggtcgcggagatggccttggggtgtggttgcttggtgtacactcgctgtagcatgggcaatgcttcttcccatcgccctctctaacaagagtcagcagcgtgaggagctgttcgatgatcccgcacacgctccaatgaaatacgaaagccagacgtttgcaggcttggtcgacccaggcgattttcgccctcacgatgacccttttgcgcctggcaccgaggattactggaacacactgctcgacgtgggcatcatcaagctctaccccgaggaggcagagcgcttgccaacccagactggccaggtattcggagaagagccattcttcgccggaaatttggaagtgttccatcagcttcattgtctgaaccgcatacggcgcgagtactacttcccagaagaaaacgagtataatgcaacggcaacaagtcgccgaggacacatcaagcattgtttcggatacttagagcagacactgaagtgtcacgctgatgtaggcgtgatgagcgtagagtacaaccctgatacgcgggggtatagaccatcttggaacattgtcaagacctgtcgcaatttcggtctcatccaggactgggctagaaagcgcaagatcaaaaaagggaatttcgcagagacgtag

SEQ ID NO: 5281 - protein, 246 aa, Muscodor strobelii
  misc_feature: SGI Peptide ID NO. 561472
  misc_feature (69)..(238): NCBI GI: 242809279 Blast Desc: conserved [Talaromyces stipitatus ATCC 10500] gi|218715961|gb|EED15383.1| conserved [Talaromyces stipitatus ATCC 10500]
  misc_feature (112)..(238): NCBI GI: 116192827 Blast Desc: CHGG_06131 [Chaetomium globosum CBS 148.51] gi|88182044|gb|EAQ89512.1| CHGG_06131 [Chaetomium globosum CBS 148.51]
  misc_feature (74)..(238): NCBI GI: 170092667 Blast Desc: [Laccaria bicolor S238N-H82] gi|164647414|gb|EDR11658.1| [Laccaria bicolor S238N-H82]
  misc_feature (74)..(243): NCBI GI: 189196290 Blast Desc: conserved [Pyrenophora tritici-repentis Pt-1C-BFP] gi|187980362|gb|EDU46988.1| conserved [Pyrenophora tritici-repentis Pt-1C-BFP]
  misc_feature (74)..(240): NCBI GI: 67902778 Blast Desc: AN8376.2 [Aspergillus nidulans FGSC A4] gi|40747740|gb|EAA66896.1| AN8376.2 [Aspergillus nidulans FGSC A4] gi|259484308|tpe|CBF80416.1| TPA: [Aspergillus nidulans FGSC
  misc_feature (106)..(236): NCBI GI: 169778359 Blast Desc: [Aspergillus oryzae RIB40] gi|83772382|dbj|BAE62512.1| protein product [Aspergillus oryzae]
  misc_feature (40)..(239): NCBI GI: 115401080 Blast Desc: [Aspergillus terreus NIH2624] gi|114190069|gb|EAU31769.1| [Aspergillus terreus NIH2624]
  misc_feature (106)..(246): NCBI GI: 145236547 Blast Desc: An06g00940 [Aspergillus niger] gi|134075377|emb|CAK45000.1| protein product [Aspergillus niger]
  misc_feature (102)..(242): NCBI GI: 256726448 Blast Desc: NECHADRAFT_60615 [Nectria haematococca mpVI 77-13-4]
  misc_feature (3)..(243): NCBI GI: 46140017 Blast Desc: FG11523.1 [Gibberella zeae PH-1]
MSSDTREKEAHEKLLGPTSRGTSFDYEDGTHGPGSRRWPWGVVAWCTLAVAWAMLLPIALSNKSQQREELFDDPAHAPMKYESQTFAGLVDPGDFRPHDDPFAPGTEDYWNTLLDVGIIKLYPEEAERLPTQTGQVFGEEPFFAGNLEVFHQLHCLNRIRREYYFPEENEYNATATSRRGHIKHCFGYLEQTLKCHADVGVMSVEYNPDTRGYRPSWNIVKTCRNFGLIQDWARKRKIKKGNFAET

SEQ ID NO: 5282 - DNA, 697 bp, Muscodor strobelii
  misc_feature: SGI EST ID NO. CUFF.13394.0
  misc_feature: Variant of the nucleotide sequence at SEQ ID NO 5280
gtcgccgaggacacatcaagcattgtttcggatacttagagcagacactgaagtgtcacgctgatgtaggcgtgatgagcgtagagtacaaccctgatacgcgggggtatagaccatcttggaacattgtcaagacctgtcgcaatttcggtctcatccaggactgggctagaaagcgcaagatcaaaaaagggaatttcgcagagacgtagtcagtttgcttcagcttttgcttcggatagcgtttcaagggtggacattgctagctacggcgacgcttgtcaatgtttagcaaataaaatcatgtctcttctgaacacctcgtatagttagcctacgttccgtacagcataaccttcgagcttttttaccaaagcatctaaagggttaactttgagaatgaagcctcatcgagacctgaatgcttgtcatgcgggcgtgactgatctcggatctctggcgccttatccctactatcttgtacttctgaggttgcgcctttctcagcatacagcgccgagagcttatagggagcacgagcaagctgtctttcaccctcattcaacgcccccgctatatcgaccaatcgctccagataccgccgtcgaacggtactgttccagatacagttttgccctcatctatcatatcgtcagatctaatcgtgttggattaacagactcagcttacatgtata

SEQ ID NO: 5283 - DNA, 1602 bp, Muscodor strobelii
  misc_feature: SGI cDNA ID NO. 561473
  misc_feature: Elevated expression when VOC is produced
  misc_feature: Encodes the peptide sequence at SEQ ID NO 5284
atgggcaccgtctcagccgccacgaacgtgccaaagatcactacgctccgaaaagagcttggatacggtgatccgagttcgcctagatatgatgctttcattgacgatatgagagtgtttagaaaaaagttccatactcgtactggcttacctggggttagtttctttgactggaagtcaacgcaacaccaaacggggctcactgagatggtcaatgcttacttggaagattacggggctggtgctctattctggcctgatagcccagcgacagaagacgatggcaagcttaagtaccccagggacaaactcaagataaaaaatctcatgacacagcttttctataggtcaaatgaacaacagcatcgcaaccaaaagtataagcataaggatagggccggtctgagcagtaatacacttagtggaaggggccacactccagagaatccgatagacttggattctgcggacgatgaacccgtcattaggtttaaaccattcaacgaaatcatagacccgactcttggcaagatagatcccgccctcatgactgattctcgtaatgagatgggtcgagacggcgttaagcgagctcggtcgcctgtcgatggcggggatgattatgatgtcccaccaagcccaacatcagacaatacgaaggcaaataagacggcgaagaagcctataaagcgcgtgggcccaggcacaagtaaagcagctggtaaacgaaagaaacaaaaatcccaaccagatcttcccgatgcggaagcagagttcggcgtgaaacggaaatctcctcgaacgaaacgaacgctgcaaatggatggctatgctacaggcgaagactatattgccgtcatgcccgtctcagagcctcctttagatcgagcaaaagccatgacagtggctccaaagcaacatcgagtatctgcgtccagaaatggtggagttataagcttccgcgtcgcgccccagcccagccctgagttacaagatacgcactcctcaagaaatacgccggattcaattcgggataatctttctgaaagtgttcgatctacacacatgagcagagacccatcaccagcaataagaggcccaactccagacacacatcgaggcacggttgcctttacgtcaatgccaccccctcgaataattccgagtaaggaggaactgcaattaaacgcagctcagcagccccctgcgctagcaccaatacccataccctccaagaagccaataatcaattttatatatcgtgtcgtgacccgtgtctcacaacgaagatggtatcccaagaaaaaattggaagagatgacgtttgcagagttcacccgcgaagtagctccaagcgataatgcgaatagtctaatcttcaggattaaagtgaataagttcagcatagaagaagaaattggccgaggcaaggagtctgattttagagaactcaagggaacaatcagggagaggataaagcaggagttaggaagcaacgggccaacagacgatccactaatgtgcgtgatggaggttgagcctgtaatgatcgaagaacaagtttcgcgcaatgtcgttgaagatgtcgatttcagtttctga

SEQ ID NO: 5284 - protein, 533 aa, Muscodor strobelii
  misc_feature: SGI Peptide ID NO. 561473
  misc_feature (8)..(155): NCBI GI: 256735428 Blast Desc: NECHADRAFT_75259 [Nectria haematococca mpVI 77-13-4]
  misc_feature (7)..(286): NCBI GI: 46107994 Blast Desc: FG00879.1 [Gibberella zeae PH-1]
  misc_feature (10)..(143): NCBI GI: 256729549 Blast Desc: [Nectria haematococca mpVI 77-13-4]
  misc_feature (9)..(157): NCBI GI: 256734723 Blast Desc: [Nectria haematococca mpVI 77-13-4]
  misc_feature (9)..(104): NCBI GI: 46114542 Blast Desc: FG03113.1 [Gibberella zeae PH-1]
  misc_feature (10)..(128): NCBI GI: 256734721 Blast Desc: [Nectria haematococca mpVI 77-13-4]
  misc_feature (33)..(103): NCBI GI: 46117448 Blast Desc: FG04566.1 [Gibberella zeae PH-1]
  misc_feature: Useful for introducing or modulating the production of volatile compounds
MGTVSAATNVPKITTLRKELGYGDPSSPRYDAFIDDMRVFRKKFHTRTGLPGVSFFDWKSTQHQTGLTEMVNAYLEDYGAGALFWPDSPATEDDGKLKYPRDKLKIKNLMTQLFYRSNEQQHRNQKYKHKDRAGLSSNTLSGRGHTPENPIDLDSADDEPVIRFKPFNEIIDPTLGKIDPALMTDSRNEMGRDGVKRARSPVDGGDDYDVPPSPTSDNTKANKTAKKPIKRVGPGTSKAAGKRKKQKSQPDLPDAEAEFGVKRKSPRTKRTLQMDGYATGEDYIAVMPVSEPPLDRAKAMTVAPKQHRVSASRNGGVISFRVAPQPSPELQDTHSSRNTPDSIRDNLSESVRSTHMSRDPSPAIRGPTPDTHRGTVAFTSMPPPRIIPSKEELQLNAAQQPPALAPIPIPSKKPIINFIYRVVTRVSQRRWYPKKKLEEMTFAEFTREVAPSDNANSLIFRIKVNKFSIEEEIGRGKESDFRELKGTIRERIKQELGSNGPTDDPLMCVMEVEPVMIEEQVSRNVVEDVDFSF

SEQ ID NO: 5285 - DNA, 2028 bp, Muscodor strobelii
  misc_feature: SGI EST ID NO. CUFF.13427.1
  misc_feature: Variant of the nucleotide sequence at SEQ ID NO 5283
tcttggccttcattttcgctcttagccttcatttttggcctacactttgcgctcacacttttgtctagaaagttttccacttttcatctcctatggtctggcagcgttgctatttctgcgttgtcacatgtggtcagttgctcccggcctgggactccgcgagaaaggttttcttcgcaaaggtctaccagcgggcaacttaggcagcaagttcgagttggacaaccggctcaaccaagtgactccagcaagcgacctacataggcgcgtttgccgctgcatctaatatttcgtgctcgatcgacttctcgccctttatctctccttctccactcattcctctcaaacactctttgccaccccgtttctcttctaggatgggcaccgtctcagccgccacgaacgtgccaaagatcactacgctccgaaaagagcttggatacggtgatccgagttcgcctagatatgatgctttcattgacgatatgagagtgtttagaaaaaagttccatactcgtactggcttacctggggttagtttctttgactggaagtcaacgcaacaccaaacggggctcactgagatggtcaatgcttacttggaagattacggggctggtgctctattctggcctgatagcccagcgacagaagacgatggcaagcttaagtaccccagggacaaactcaagataaaaaatctcatgacacagcttttctataggtcaaatgaacaacagcatcgcaaccaaaagtataagcataaggatagggccggtctgagcagtaatacacttagtggaaggggccacactccagagaatccgatagacttggattctgcggacgatgaacccgtcattaggtttaaaccattcaacgaaatcatagacccgactcttggcaagatagatcccgccctcatgactgattctcgtaatgagatgggtcgagacggcgttaagcgagctcggtcgcctgtcgatggcggggatgattatgatgtcccaccaagcccaacatcagacaatacgaaggcaaataagacggcgaagaagcctataaagcgcgtgggcccaggcacaagtaaagcagctggtaaacgaaagaaacaaaaatcccaaccagatcttcccgatgcggaagcagagttcggcgtgaaacggaaatctcctcgaacgaaacgaacgctgcaaatggatggctatgctacaggcgaagactatattgccgtcatgcccgtctcagagcctcctttagatcgagcaaaagccatgacagtggctccaaagcaacatcgagtatctgcgtccagaaatggtggagttataagcttccgcgtcgcgccccagcccagccctgagttacaagatacgcactcctcaagaaatacgccggattcaattcgggataatctttctgaaagtgttcgatctacacacatgagcagagacccatcaccagcaataagaggcccaactccagacacacatcgaggcacggttgcctttacgtcaatgccaccccctcgaataattccgagtaaggaggaactgcaattaaacgcagctcagcagccccctgcgctagcaccaatacccataccctccaagaagccaataatcaattttatatatcgtgtcgtgacccgtgtctcacaacgaagatggtatcccaagaaaaaattggaagagatgacgtttgcagagttcacccgcgaagtagctccaagcgataatgcgaatagtctaatcttcaggattaaagtgaataagttcagcatagaagaagaaattggccgaggcaaggagtctgattttagagaactcaagggaacaatcagggagaggataaagcaggagttaggaagcaacgggccaacagacgatccactaatgtgcgtgatggaggttgagcctgtaatgatcgaagaacaagtttcgcgcaatgtcgttgaagatgtcgatttcagtttctgagtatagaattcaatacagatgttcaattgaaggtcatgcgaccctgtcc

SEQ ID NO: 5286 - DNA, 624 bp, Muscodor strobelii
  misc_feature: SGI cDNA ID NO. 561474
  misc_feature: Elevated expression when VOC is produced
  misc_feature: Encodes the peptide sequence at SEQ ID NO 5287
atggatctaacgacgacagatggtgaaaccgtcaccgcgagtgtttggaatattttggctaacagaattttctgcgtcgtcgtcatcggtctgataatcctcgttgttattctctgcgttgcacctagtttctctgcatctcacagacgtattgcattagaagagctgcaagatgcttctgttcaagattccgtcggctctatctctcgagaactcaggcaagatgccgaatcagaaaccaacacagagacgaacgcacatcaaggcacatcagacgaaccggctagtcaagacagcaacacaaggagacgcaatagcagatacggtctacggcctcggagatctgccatgaccgcgcaagccagaagccctcagcccaagcccaaagctccgaagaacattgacaccacgattactaaagccaatctgtttgtgcagaaaaatcctaaagttcggagtatgttcatcttcgtgttcctctacgctcttcccagccagactacgatgctaaatcgcattgtcttacagaatgcaaaattcaacccgaacattttgaatacgagacatgatccgggaagcccagagcggtctatcgtcgaagatgttgaacatgctcgactctga

SEQ ID NO: 5287 - protein, 207 aa, Muscodor strobelii
  misc_feature: SGI Peptide ID NO. 561474
  misc_feature: Useful for introducing or modulating the production of volatile compounds
MDLTTTDGETVTASVWNILANRIFCVVVIGLIILVVILCVAPSFSASHRRIALEELQDASVQDSVGSISRELRQDAESETNTETNAHQGTSDEPASQDSNTRRRNSRYGLRPRRSAMTAQARSPQPKPKAPKNIDTTITKANLFVQKNPKVRSMFIFVFLYALPSQTTMLNRIVLQNAKFNPNILNTRHDPGSPERSIVEDVEHARL

SEQ ID NO: 5288 - DNA, 1278 bp, Muscodor strobelii
  misc_feature: SGI EST ID NO. CUFF.13409.0
  misc_feature: Variant of the nucleotide sequence at SEQ ID NO 5286
gaggtcggaccgcactgcatcgagcagagtgtcttttagctcttagtcgtagaaattagattatacaacatacgctgttgctagccctatttttagggcggtaactgtatcggcgacggataaaaaacgacatagacctttcttgagggttgacagccatctagaccaagttgtgaagtattcccacaagcgtaaagttgtggaattatcttttgtattgcccttcttacttctatttgtttgatttccagtcctatgtgtttttcccatctgaggttcccagaccctacgctaaaacttactacgcgaaaattaaactcgtttgaaagcacaatggcaccacacagtctctccttacgaacaatcatggatctaacgacgacagatggtgaaaccgtcaccgcgagtgtttggaatattttggctaacagaattttctgcgtcgtcgtcatcggtctgataatcctcgttgttattctctgcgttgcacctagtttctctgcatctcacagacgtattgcattagaagagctgcaagatgcttctgttcaagattccgtcggctctatctctcgagaactcaggcaagatgccgaatcagaaaccaacacagagacgaacgcacatcaaggcacatcagacgaaccggctagtcaagacagcaacacaaggagacgcaatagcagatacggtctacggcctcggagatctgccatgaccgcgcaagccagaagccctcagcccaagcccaaagctccgaagaacattgacaccacgattactaaagccaatctgtttgtgcagaaaaatcctaaagttcggaaatgcaaaattcaacccgaacattttgaatacgagacatgatccgggaagcccagagcggtctatcgtcgaagatgttgaacatgctcgactctgacatagtttagcgcgtcttcctcgacggcgattcattcaaaacgtgttttctgtatcccctaatcttcggctttctgcctcagtctcggtttacttccatatagctgctgaaccacttagaaatactatatttcgaaattatggcttcatcgtgtgcgactattcaaatacatcatcaactcgaagaaccattttgacgactgcgcttctcaatcaatgcgatatttctctgctatgaatataccgcagaatcatgtatatcacgacttcccaatgtaccccatttgttgttttctgtatctcggtatacatttcgccttgttagttaccatacttgttatgttatagacttgtattttt

SEQ ID NO: 5289 - DNA, 807 bp, Muscodor strobelii
  misc_feature: SGI cDNA ID NO. 561475
  misc_feature: Reduced expression when VOC is produced
  misc_feature: Encodes the peptide sequence at SEQ ID NO 5290
atggataccatccagctcgggccaaccagcccactgtcgccggccaatggccgaaccttcaaccctcatcagcttcacatgcagcattccacgtcattgcaacagaaagatcgttatgccgccgctccaatgcgcaaaacacgtaagaggaaagccgagtcgcaggacaacgaacgactgtccaaaagattgagtctgcttaacttagagaaaaatggacagaagctatacgttcctgtcgagactgcaattccagagtcgtcggcgccaccatcaaatacggccgatgccatcaaagatgatgagatgcgcctcgacgacaccaagcacaaagtctacatctacgatatagacgccgaactctcttcgacagatggagataatagcgaaagcgagtcttcgcttcctggctcgcctacctcaggcaaaggccgcctcgtctttctgccagacattgagaaacatctgcgccgcactcggatacccgcagctgtgtttgccaattctgatggtgaattggcgggtcacaacatcaacgacatgcaaatggtactatataaggacagcgagccttcctctctaagcgtcgcaccggaacatgactctgtgcgcaaggccattctcgaagctcgggcgcgggcgagagaaaaacagaaagagagcacagtcagtagttccagcaacgaggccgccgccaaaacagacgtaaagacgagaatacccagcatccccaaccacgtaacaattgcgacgccatggcgcgaaagtccaatggacgacgaggacgacgcgatggacattgattga

SEQ ID NO: 5290 - protein, 268 aa, Muscodor strobelii
  misc_feature: SGI Peptide ID NO. 561475
  misc_feature (48)..(220): NCBI GI: 154321325 Blast Desc: BC1G_01537 [Botryotinia fuckeliana B05.10] gi|150852075|gb|EDN27267.1| BC1G_01537 [Botryotinia fuckeliana B05.10]
  misc_feature (53)..(219): NCBI GI: 256735412 Blast Desc: NECHADRAFT_75232 [Nectria haematococca mpVI 77-13-4]
  misc_feature (46)..(220): NCBI GI: 156054308 Blast Desc: SS1G_06002 [Sclerotinia sclerotiorum 1980] gi|154703782|gb|EDO03521.1| SS1G_06002 [Sclerotinia sclerotiorum 1980]
  misc_feature (24)..(219): NCBI GI: 116180550 Blast Desc: CHGG_00903 [Chaetomium globosum CBS 148.51] gi|88185200|gb|EAQ92668.1| CHGG_00903 [Chaetomium globosum CBS 148.51]
  misc_feature (45)..(219): NCBI GI: 171687711 Blast Desc: protein product [Podospora anserina] gi|170943817|emb|CAP69469.1| protein product [Podospora anserina]
  misc_feature (36)..(217): NCBI GI: 85119715 Blast Desc: NCU02567 [Neurospora crassa OR74A] gi|28927510|gb|EAA36462.1| conserved [Neurospora crassa OR74A] gi|38567139|emb|CAE76434.1| [Neurospora crassa]
  misc_feature (52)..(202): NCBI GI: 46108050 Blast Desc: FG00907.1 [Gibberella zeae PH-1]
  misc_feature (4)..(268): NCBI GI: 189203305 Blast Desc: conserved [Pyrenophora tritici-repentis Pt-1C-BFP] gi|187985087|gb|EDU50575.1| conserved [Pyrenophora tritici-repentis Pt-1C-BFP]
  misc_feature (76)..(209): NCBI GI: 39943056 Blast Desc: MGG_03608 [Magnaporthe grisea 70-15] gi|145009816|gb|EDJ94472.1| MGG_03608 [Magnaporthe grisea 70-15]
  misc_feature (49)..(268): NCBI GI: 169603387 Blast Desc: SNOG_04703 [Phaeosphaeria nodorum SN15] gi|160706384|gb|EAT88463.2| SNOG_04703 [Phaeosphaeria nodorum SN15]
  misc_feature: Useful for introducing or modulating the production of volatile compounds
MDTIQLGPTSPLSPANGRTFNPHQLHMQHSTSLQQKDRYAAAPMRKTRKRKAESQDNERLSKRLSLLNLEKNGQKLYVPVETAIPESSAPPSNTADAIKDDEMRLDDTKHKVYIYDIDAELSSTDGDNSESESSLPGSPTSGKGRLVFLPDIEKHLRRTRIPAAVFANSDGELAGHNINDMQMVLYKDSEPSSLSVAPEHDSVRKAILEARARAREKQKESTVSSSSNEAAAKTDVKTRIPSIPNHVTIATPWRESPMDDEDDAMDID

SEQ ID NO: 5291 - DNA, 1980 bp, Muscodor strobelii
  misc_feature: SGI EST ID NO. CUFF.13644.1
  misc_feature: Variant of the nucleotide sequence at SEQ ID NO 5289
gtaccaatagtgtgtcctttctcttcgaagaaacggaagaaggtgtcgcgcacggcgagcccagtccatttgggctgttccgccatggtggccagagttcgtgatgcgctcctcacgtgcggcaggcagagggacggcggggcgactcgagatggagagatggaggagatctgtgacttggaatcgtttcgacgggtggttgcgatcgaattgtctcgactcgacagcggatgcgagagacgcgttgaggctggtgcgaaggcagaggcgtagtcgaagaaggttgtgttcgtctttttctctgtcaatgcgggacagtcatgaggaaggaggggctccgacgcggtagcagtcccaattgctgtcgcagtggtggggtacggataatagtggtaatggtgcagctgtctctgcaggaaccctgggaatcctccccgagacctgtagaaacttctatggggcgccgaccgtgggtgactcaggccgcctataaacggcctccctccccatcggaactgcattcgccccttctctcaattgcaaacgttgatttgcctcgacttgactcgcgctctccaccaccacctcgttcccagctgtgaatgtcaattgccaatcgtgtctcctgtaccagatactcatcacaccatctcagtcgcacagcattcttcccggctcccttaatcaaagtgcagttgcagtgacggactacttgggcagtcacctcgaaagagtcatagttcactccgatagtcgcagctggcgtcgcgtggttcgtcacatcgattgtcgcaagggatcagtgtgaattttttgagattggaaagacaggtttcgcggcatcacgcgcatagggacagtaaatgggaaacccccaggggttcgaacagttacgctagcatggataccatccagctcgggccaaccagcccactgtcgccggccaatggccgaaccttcaaccctcatcagcttcacatgcagcattccacgtcattgcaacagaaagatcgttatgccgccgctccaatgcgcaaaacacgtaagaggaaagccgagtcgcaggacaacgaacgactgtccaaaagattgagtctgcttaacttagagaaaaatggacagaagctatacgttcctgtcgagactgcaattccagagtcgtcggcgccaccatcaaatacggccgatgccatcaaagatgatgagatgcgcctcgacgacaccaagcacaaagtctacatctacgatatagacgccgaactctcttcgacagatggagataatagcgaaagcgagtcttcgcttcctggctcgcctacctcaggcaaaggccgcctcgtctttctgccagacattgagaaacatctgcgccgcactcggatacccgcagctgtgtttgccaattctgatggtgaattggcgggtcacaacatcaacgacatgcaaatggtactatataaggacagcgagccttcctctctaagcgtcgcaccggaacatgactctgtgcgcaaggccattctcgaagctcgggcgcgggcgagagaaaaacagaaagagagcacagtcagtagttccagcaacgaggccgccgccaaaacagacgtaaagacgagaatacccagcatccccaaccacgtaacaattgcgacgccatggcgcgaaagtccaatggacgacgaggacgacgcgatggacattgattgaaggggacgcgatagacttggagtacacatggctcatgtataatcaaacatgattttcccctgattatgtaccattggcatggcgttttggaaagcgaggaaggagtgggtatacgagcatcacagcattgtacaggcaatcttcaggcgctcgaggagtacattggttaattcaatcccatttcgactgatggccaatcgatatggagtgattcagtatctccagatctcccgactgtggtcgatcatgttattgtgatgtcttcggtaggtg

SEQ ID NO: 5292 - DNA, 2862 bp, Muscodor strobelii
  misc_feature: SGI cDNA ID NO. 561476
  misc_feature: Reduced expression when VOC is produced
  misc_feature: Encodes the peptide sequence at SEQ ID NO 5293
atggcggaacagcccaaatggactgggctcgccgtgcgcgacaccttcttccgtttcttcgaagagaaaggacacactattgttccctccggctctgtcgttcctcacaatgacccgaccctgcttttcacgaatgccgggatgaaccaattcaaatcgatttttctcaatacgattgcacaatctgatgaaatgtcgaagcttaagagggcatgtgacacccaaaagtgtatccgagctggtggcaagcacaatgatttggatgatggtgttggcaaagacagctaccaccacacgttcttcgaaatgcttggtaattggtcgtttgtaagtgatggcgattacttcaagaacgaagctattgagtggtcttgggaacttttaaccacggtttatggccttgatccaaaaaggctatacgtgacctacttcgagggtgacgttaagctcaaccttgagcccgatctggaggccaaagagctgtggaagcgagtcggtgtgcccgaagatcacatcttgcccggaaatatgaaggacaacttctgggagatgggcgaccagggtccttgtggcccctgtagtgagatacactacgacaaggttggaggtagaaacgcggcccaccttgtcaaccaagatgaccctctggtagtcgaggtatggaacaacgttttcatgcaattcgatcgtcaaaaggacggttcgctcaagtcactacctgctaaacacatcgataccggcatgggttttgaacgactggtgtcagcgcttcaggacaaggtttccaactacgctacggacattttcacccctctcttcaacaggatccaagaagttaccggcgccagaccttataccgacaagtacggaaaagacgacgtcgacggtattgatactgcctatcgtgtcgttgctgatcacatccgcctgttgaccttcgccatatccgatggtgctgtaccaaacaacgagggaagaggctatgtcgtgcgccgtgtgctccgaagaggtgctcggtatgcgagaaaatatttcaatgctgagatcggctctttcttttctcagatcttacctgcgctcgtagaacagatgggtgcgcagttcccggaaatagtcaagaaacagcaggacgtcaaagaattgcttgacgaggaagaggttgcttttgctagtacattggaccgtggagagaaacaattcgaaaaatacgcagccatcgcttccaacggatccggaaagttatctggtgcagatgtttggaggctgtatgacacctttggcgaggatctcacaagacttatggcggaggaaagaggcttatcaatggacgagaaagagatcgccgacgcccgggagaaggcccgcgaagctagcaaggctgtcaaggagaaagtccagacttttgccaagctcaacgttcatcaacttgctgaacttaaagaccagcttcaagtgcccgtagctgatgatgagccgaagttcttgaagggagataccactggcaaggtgcagttgatatacaccggaaccgaattcattaagtccacgaaagacttgcctgaaaacacaccattcggtcttctgctagacaggacgtcgttctacgctgaatccggtggtcaggtcgctgacaccggaagaatagtcatcgatgatgttgccgaattcgaggttcaggacgttcagcaatttggcggctacatcttacacaacgggtacctgaagtacggcgaactgaaggccggggacagcgtcatttgcgagtatgatgagctcagacgccagtcgacacggagcaatcataccggtactcatgtgctcggcaacgagatcaaccaaaagggatctttggtcgaccaggacaagcttagatttgatttttcgcacaaaaccggagttactctcccagagctcacaaaaattgaaaatttgtcgaatttatacataaaacaaaactgcaagatatactcgaaggaagtcgagttagacctggctaagaagattaacggcgtccgtgcggtcttcggcgagacttatcccaatcctgtccgcgttgtgtctgttggtatcgacgtggacatgctgctcgagacaccggaaaacccggagtgggccaaggtgtccgtagaattctgtggcggaacacatgtcgaacagacgggtctcattaaggaccttgtcattgtggaggagtcagggatcgccaaaggaattcgtcgtattgttgcgtttacgggcgaggaggcccaccgcgtccagcgcgaggctaccgagtttgcgaaacgtcttacgattctcgaggacatgcctttcagcccggggaaggaggcggaaatgaagcaggctgctgtcgacttgaatacgctcgtcatctcatcacttaccaaggaagagctaaagacgaggttcgcaaagatcactaaatccgtcgtcgatgagcagaagaagcgccagaaggcagagaccaagaccgcgcttgatgctgtgactgggtacttcgcaaaggaggagaacaaggatgctaagtactttgtgggacaattacccatctctgcgaatgctaaggctgtcgcggatgtcatgaatcactataagagcaaagacaagggcaagaccgtttacctgttcggtggcagcaagactgagggtgctgttgtgcatggtgtttatgtcggcaccgagcttgcatcccagggcgtcactgctgagaaatgggcggcggctgtcacagaggttgtcggaggtaaatctggcggcaaggaacccacgaggcagggccagggtgtaaatgcagataagatcgaggaggctgttgcgattgccgagaaatggcttgctgagaaactcaagatctcggaataa

SEQ ID NO: 5293 - protein, 953 aa, Muscodor strobelii
  misc_feature: SGI Peptide ID NO. 561476
  misc_feature (11)..(593): Pfam Id: PF01411 Pfam Desc: tRNA synthetases class II (A)
  misc_feature (683)..(742): Pfam Id: PF07973 Pfam Desc: Threonyl and Alanyl tRNA synthetase second additional domain
  misc_feature (870)..(943): Pfam Id: PF02272 Pfam Desc: DHHA1 domain
  misc_feature (1)..(951): NCBI GI: 46108048 Blast Desc: FG00906.1 [Gibberella zeae PH-1]
  misc_feature (1)..(950): NCBI GI: 164427876 Blast Desc: alanyl-tRNA synthetase [Neurospora crassa OR74A] gi|38567140|emb|CAE76435.1| alanine--tRNA ligase, cytosolic [Neurospora crassa] gi|157071919|gb|EAA36461.2| alanyl-tRNA
  misc_feature (1)..(950): NCBI GI: 145616046 Blast Desc: MGG_03607 [Magnaporthe grisea 70-15] gi|145009817|gb|EDJ94473.1| MGG_03607 [Magnaporthe grisea 70-15]
  misc_feature (1)..(951): NCBI GI: 256734711 Blast Desc: [Nectria haematococca mpVI 77-13-4]
  misc_feature (6)..(951): NCBI GI: 154321327 Blast Desc: BC1G_01538 [Botryotinia fuckeliana B05.10] gi|150852076|gb|EDN27268.1| BC1G_01538 [Botryotinia fuckeliana B05.10]
  misc_feature (6)..(951): NCBI GI: 156054306 Blast Desc: SS1G_06001 [Sclerotinia sclerotiorum 1980] gi|154703781|gb|EDO03520.1| SS1G_06001 [Sclerotinia sclerotiorum 1980]
  misc_feature (48)..(950): NCBI GI: 171687707 Blast Desc: protein product [Podospora anserina] gi|170943815|emb|CAP69467.1| protein product [Podospora anserina]
  misc_feature (3)..(951): NCBI GI: 239608271 Blast Desc: alanyl-tRNA synthetase [Ajellomyces dermatitidis ER-3]
  misc_feature (3)..(951): NCBI GI: 261203393 Blast Desc: alanyl-tRNA synthetase [Ajellomyces dermatitidis SLH14081] gi|239586695|gb|EEQ69338.1| alanyl-tRNA synthetase [Ajellomyces dermatitidis SLH14081]
  misc_feature (1)..(947): NCBI GI: 259486703 Blast Desc: TPA: alanyl-tRNA synthetase, (AFU_orthologue; AFUA_8G03880) [Aspergillus nidulans FGSC A4]
  misc_feature (1)..(951): SWISSPROT Homolog: EC 6.1.1.7 Alanine--tRNA ligase
  misc_feature: Useful for introducing or modulating the production of volatile compounds
MAEQPKWTGLAVRDTFFRFFEEKGHTIVPSGSVVPHNDPTLLFTNAGMNQFKSIFLNTIAQSDEMSKLKRACDTQKCIRAGGKHNDLDDGVGKDSYHHTFFEMLGNWSFVSDGDYFKNEAIEWSWELLTTVYGLDPKRLYVTYFEGDVKLNLEPDLEAKELWKRVGVPEDHILPGNMKDNFWEMGDQGPCGPCSEIHYDKVGGRNAAHLVNQDDPLVVEVWNNVFMQFDRQKDGSLKSLPAKHIDTGMGFERLVSALQDKVSNYATDIFTPLFNRIQEVTGARPYTDKYGKDDVDGIDTAYRVVADHIRLLTFAISDGAVPNNEGRGYVVRRVLRRGARYARKYFNAEIGSFFSQILPALVEQMGAQFPEIVKKQQDVKELLDEEEVAFASTLDRGEKQFEKYAAIASNGSGKLSGADVWRLYDTFGEDLTRLMAEERGLSMDEKEIADAREKAREASKAVKEKVQTFAKLNVHQLAELKDQLQVPVADDEPKFLKGDTTGKVQLIYTGTEFIKSTKDLPENTPFGLLLDRTSFYAESGGQVADTGRIVIDDVAEFEVQDVQQFGGYILHNGYLKYGELKAGDSVICEYDELRRQSTRSNHTGTHVLGNEINQKGSLVDQDKLRFDFSHKTGVTLPELTKIENLSNLYIKQNCKIYSKEVELDLAKKINGVRAVFGETYPNPVRVVSVGIDVDMLLETPENPEWAKVSVEFCGGTHVEQTGLIKDLVIVEESGIAKGIRRIVAFTGEEAHRVQREATEFAKRLTILEDMPFSPGKEAEMKQAAVDLNTLVISSLTKEELKTRFAKITKSVVDEQKKRQKAETKTALDAVTGYFAKEENKDAKYFVGQLPISANAKAVADVMNHYKSKDKGKTVYLFGGSKTEGAVVHGVYVGTELASQGVTAEKWAAAVTEVVGGKSGGKEPTRQGQGVNADKIEEAVAIAEKWLAEKLKISE

SEQ ID NO: 5294 - DNA, 1588 bp, Muscodor strobelii
  misc_feature: SGI EST ID NO. CUFF.13607.0
  misc_feature: Variant of the nucleotide sequence at SEQ ID NO 5292
cgattacttcaagaacgaagctattgagtggtcttgggaacttttaaccacggtttatggccttgatccaaaaaggctatacgtgacctacttcgagggtgacgttaagctcaaccttgagcccgatctggaggccaaagagctgtggaagcgagtcggtgtgcccgaagatcacatcttgcccggaaatatgaaggacaacttctgggagatgggcgaccagggtccttgtggcccctgtagtgagatacactacgacaaggttggaggtagaaacgcggcccaccttgtcaaccaagatgaccctctggtagtcgaggtatggaacaacgttttcatgcaattcgatcgtcaaaaggacggttcgctcaagtcactacctgctaaacacatcgataccggcatgggttttgaacgactggtgtcagcgcttcaggacaaggtttccaactacgctacggacattttcacccctctcttcaacaggatccaagaagttaccggcgccagaccttataccgacaagtacggaaaagacgacgtcgacggtattgatactgcctatcgtgtcgttgctgatcacatccgcctgttgaccttcgccatatccgatggtgctgtaccaaacaacgagggaagaggctatgtcgtgcgccgtgtgctccgaagaggtgctcggtatgcgagaaaatatttcaatgctgagatcggctctttcttttctcagatcttacctgcgctcgtagaacagatgggtgcgcagttcccggaaatagtcaagaaacagcaggacgtcaaagaattgcttgacgaggaagaggttgcttttgctagtacattggaccgtggagagaaacaattcgaaaaatacgcagccatcgcttccaacggatccggaaagttatctggtgcagatgtttggaggctgtatgacacctttggcgtaagtgatctgaactatcagatacgagaaaccagtcctttgtcttagaatcccgggccgcgcagcgaaattaccatgaaaaataactaacgcgacaccactagttcccagaggatctcacaagacttatggcggaggaaagaggcttatcaatggacgagaaagagatcgccgacgcccgggagaaggcccgcgaagctagcaaggctgtcaaggagaaagtccagacttttgccaagctcaacgttcatcaacttgctgaacttaaagaccagcttcaagtgcccgtagctgatgatgagccgaagttcttgaagggagataccactggcaaggtgcagttgatatacaccggaaccgaattcattaagtccacgaaagacttgcctgaaaacacaccattcggtcttctgctagacaggacgtcgttctacgctgaatccggtggtcaggtcgctgacaccggaagaatagtcatcgatgatgttgccgaattcgaggttcaggacgttcagcaatttggcggctacatcttacacaacgggtacctgaagtacggcgaactgaaggccggggacagcgtcatttgcgagtatgatgagctcagacgccagtcgacacggagcaatcataccggtactcatg

SEQ ID NO: 5295 - DNA, 3249 bp, Muscodor strobelii
  misc_feature: SGI cDNA ID NO. 561477
  misc_feature: Encodes the peptide sequence at SEQ ID NO 5296
atgcctccatcagcaccccggagtcgtgctaatatccgaattgcaattatttgcgcccttcgattggagtttgaagcggtctacggtgttttagacacccgctgggatgaagaggggcgcgacaacgggagagcagcgaacgacatcaattcctacaccgtcggtacagttgaagaccataatgtggtcgtcgtcctcttgcccgccatgggctcaatccactcgtcgagcgcggctgcccacgtgagccactcctttccagatataagtctcgccttagtggttggtgtttgcggaggtgtgcctcgtgggccgtcgcatgctcgcgacatctttctcggagacataattatcagttctcaggttatcccatacgacttcggacgccaatacccacatgggttcaagcgcaggaatgagggtgtccctaggtccagtctcgaacttcgtggcttcatgaaccgattacaaaccgaaccctatcgccgcaagttcgaaaatgaggtccgcgagagattacaacagagacaaactgaaggtgctagtatctcataccctggtgcagatcatgacaaactgtgcgatgcatcctatatccataaacatagagatcccggagcatgcgaagtatgtgacgccaaaccggatgaagcgtgcgatggttcaagccatgaaacatgttctagtttgggttgcacccgcgccagtcgcactacgctgagcaatggtcccactttcgctgatcgtcaagagacctgccatatccccaatactcactttggagctattggatgtggcaatgcagtcatcaagtccggttcacatcgtgaccagattgctcaccaagacaaaattcttggctatgaaatggaagtcgctggtgtttatgagcagtttccagcagtcgtcctgaaaggagtctctgactacgccgatagccacaaaaacaaagaatggcaaccttatgctgcatttgttgctgcacttggagccaaggcattcctcaagcagtggccagtatcggatgagcctattattgccaacggtaatccattactgtcttctgtcagaatggaacaacccagactcacagaggcccttgcatacgacaaaatgaatgcaagatccgagcagatccgatcccaatacatccctgcgaagtctttggactgggtctggaaaacaacgttcaagcgctggctgaaagagacatccaagaatcacaccagtttctggataactggcaaaccaggatccggtaaatcaagcctcatgaggcatatcatcgacagcaacaagacaagaaaaatacttcggcgagctcacatggatttccggattttcgaattcttcttcgacttccgagcaggagaatctctcgccaatagccggaagggactgatgaagatgtttatctctcaactatgtgactatagcaacaccatacgaaagaagcccgaaaccaagcatttgcagaacccgattaatgagatgagcgaaaatggactaatgcatctcttttatacttgtttggaagatattcccggtcgaaagtacgcctttatagatggccttgatgaattcttcggggaagacacgcacctcgtggacttccttgagacccttcaagagcaatcgcggatttctatgtgcttagcaagtcggcctgagtttgtctttcggcggcgctttagagacttgtcccaatttgcgatgcaggactacaatggtccgagcattcgagcatatatcagctgggccattcgttctgcacgcgatcgtcttgtcaatcaaaaactgctggaagatcctgacttcattgacgatttgactcagaaagcgcaaggtgttatcatctgggctcgatttgcaatcgatggtcttttacagcacggtctaactgatttgtccaaaggggatcttacggcttttatcaacgaactaccagatacactcgaaaatatgtacgatcgtacatttgcaaaaatgccggagaacaaacgcttcgaggctgccttgctattattcttcattcatggatctggtgaaggggaccttgacttagaagtgttatacggaatttggcatttcttcttcgtggatatcagagggctgcgcctgaatgaagagatgctcgtccagacttcgtccgtcaactcctttacgacacgtttacagtatttggccggctccttcgttgagttcaaacaggcgagaaacatgctgcccgacgagatccggaccgattatgcaggtgctacaatttccaaaatctacgcggaagttattaaccgggcaaccaaaaattctggtgttaaacacaccgaagttgtgaaaagagtcgacgccctttgggacgaaacagagcacctcttgcatgctgcccgacgacaggactacgagatcacggaagccactagtggctggagagatgcattccagtcgcagcttcttgaattactccccatgttggggcatcactacaatgatttgttcgatcctcctctagactctacgccagaacttccactacacaaccagcagcggcacatatgcgttgcgattagactacaattgaggaattactttcgacttgcctggaatcatctcatcgcacacgaaataattttatggccgctaggagatttagtgacattcattaacctatgcatcgagtctctactctggttccgtgggatgagaaaggatagtgatggagagaatgcagttgaggtactaagatccatctatccgctgctggcgcgctgttcagagttcccgtccagtctttataagattgcgctcagttatcgatcgcgtagtgacttgatcagcaaagtcggtacggcatccgaagaagcgtatctcctgctctataaaatgtgtgacacggggcgcttattgccgttaaaaacggtactcgaaaaggaccactgctgtaatcgtcaacatctcttggtggactggatgtgttgtctcgattacatcgaaaattactgggatgcctataagcttattggtgtgaatttcgagaccgcgattctggattgggatctcggacatcccgagctccctaatatcgacaatcccatcttctgggcagtgagtcctgatggtcagatcgatattgacatgttcaaaaacggcaacgagatctatggcagcctagcagagtggaaacagagtcccaaaggaactgagtttgttgctaggcgggccagaatgggctacgagcaaccttcaggatag

SEQ ID NO: 5296 - protein, 1082 aa, Muscodor strobelii
  misc_feature: SGI Peptide ID NO. 561477
  misc_feature (6)..(338): NCBI GI: 145237250 Blast Desc: An07g01850 [Aspergillus niger] gi|134075739|emb|CAK48087.1| protein product [Aspergillus niger]
  misc_feature (3)..(345): NCBI GI: 242761123 Blast Desc: TSTA_062200 [Talaromyces stipitatus ATCC 10500] gi|218723315|gb|EED22732.1| TSTA_062200 [Talaromyces stipitatus ATCC 10500]
  misc_feature (6)..(385): NCBI GI: 169771161 Blast Desc: [Aspergillus oryzae RIB40] gi|83767909|dbj|BAE58048.1| protein product [Aspergillus oryzae]
  misc_feature (6)..(361): NCBI GI: 238486314 Blast Desc: Pfs, NB-ARC and TPR domain protein [Aspergillus flavus NRRL3357] gi|220699274|gb|EED55613.1| Pfs, NB-ARC and TPR domain protein [Aspergillus flavus NRRL3357]
  misc_feature (6)..(338): NCBI GI: 242811548 Blast Desc: kinesin, [Talaromyces stipitatus ATCC 10500] gi|218714111|gb|EED13534.1| kinesin, [Talaromyces stipitatus ATCC 10500]
  misc_feature (3)..(338): NCBI GI: 115388125 Blast Desc: [Aspergillus terreus NIH2624] gi|114195652|gb|EAU37352.1| [Aspergillus terreus NIH2624]
  misc_feature (2)..(602): NCBI GI: 145602422 Blast Desc: MGG_04914 [Magnaporthe grisea 70-15] gi|145010850|gb|EDJ95506.1| MGG_04914 [Magnaporthe grisea 70-15]
  misc_feature (6)..(338): NCBI GI: 75858936 Blast Desc: AN9426.2 [Aspergillus nidulans FGSC A4] gi|40747678|gb|EAA66834.1| AN9426.2 [Aspergillus nidulans FGSC A4] gi|259486647|tpe|CBF84668.1| TPA: conserved [Aspergillus FGSC
  misc_feature (4)..(656): NCBI GI: 145236174 Blast Desc: protein product [Aspergillus niger] gi|134075186|emb|CAK96499.1| protein product [Aspergillus niger]
  misc_feature (6)..(340): NCBI GI: 212530030 Blast Desc: conserved [Penicillium marneffei ATCC 18224] gi|210074570|gb|EEA28657.1| conserved [Penicillium marneffei ATCC 18224]
MPPSAPRSRANIRIAIICALRLEFEAVYGVLDTRWDEEGRDNGRAANDINSYTVGTVEDHNVVVVLLPAMGSIHSSSAAAHVSHSFPDISLALVVGVCGGVPRGPSHARDIFLGDIIISSQVIPYDFGRQYPHGFKRRNEGVPRSSLELRGFMNRLQTEPYRRKFENEVRERLQQRQTEGASISYPGADHDKLCDASYIHKHRDPGACEVCDAKPDEACDGSSHETCSSLGCTRASRTTLSNGPTFADRQETCHIPNTHFGAIGCGNAVIKSGSHRDQIAHQDKILGYEMEVAGVYEQFPAVVLKGVSDYADSHKNKEWQPYAAFVAALGAKAFLKQWPVSDEPIIANGNPLLSSVRMEQPRLTEALAYDKMNARSEQIRSQYIPAKSLDWVWKTTFKRWLKETSKNHTSFWITGKPGSGKSSLMRHIIDSNKTRKILRRAHMDFRIFEFFFDFRAGESLANSRKGLMKMFISQLCDYSNTIRKKPETKHLQNPINEMSENGLMHLFYTCLEDIPGRKYAFIDGLDEFFGEDTHLVDFLETLQEQSRISMCLASRPEFVFRRRFRDLSQFAMQDYNGPSIRAYISWAIRSARDRLVNQKLLEDPDFIDDLTQKAQGVIIWARFAIDGLLQHGLTDLSKGDLTAFINELPDTLENMYDRTFAKMPENKRFEAALLLFFIHGSGEGDLDLEVLYGIWHFFFVDIRGLRLNEEMLVQTSSVNSFTTRLQYLAGSFVEFKQARNMLPDEIRTDYAGATISKIYAEVINRATKNSGVKHTEVVKRVDALWDETEHLLHAARRQDYEITEATSGWRDAFQSQLLELLPMLGHHYNDLFDPPLDSTPELPLHNQQRHICVAIRLQLRNYFRLAWNHLIAHEIILWPLGDLVTFINLCIESLLWFRGMRKDSDGENAVEVLRSIYPLLARCSEFPSSLYKIALSYRSRSDLISKVGTASEEAYLLLYKMCDTGRLLPLKTVLEKDHCCNRQHLLVDWMCCLDYIENYWDAYKLIGVNFETAILDWDLGHPELPNIDNPIFWAVSPDGQIDIDMFKNGNEIYGSLAEWKQSPKGTEFVARRARMGYEQPSG

SEQ ID NO: 5297 - DNA, 636 bp, Muscodor strobelii
  misc_feature: SGI cDNA ID NO. 561478
  misc_feature: Elevated expression when VOC is produced
  misc_feature: Encodes the peptide sequence at SEQ ID NO 5298
atgtctttaacaggcgatctccttgggaatgccaatctcgctcgcgtctacgccgcatcgacccctcgagaatcacagcaagcttacgacgagtgggcatcgagttatgacgccgacatggttgagcaaggctatgttgctccagctttctgtgcgagggccatccaaacgcacgggagcgttgatggcgccattcttgatgccggttgtggcaccggcgctgttggtctggagctttccaagcttggcgccaaaactgtcgacggtattgatttcagcgatggtatgcttgctgtcgctagacaagcgaacgtataccgcaagctaagtacaaccgatctgtccagggtagttgatatcgaggacgagatatatgatgctgtgatttgcgtgggcacgttgacgcagggacatgttgggccgaatccagcgctgagcgagttcgtaagggtcgtcaaaagtggaggaatcatcgttgcgacagtgctagagactatctgggacaaagatgggtacgaagctgaggtcgagagacttgtcaaagagagcaaagtctctcttgtctcaaaagaggtccagcggtatcgcaagcatgcaggcgttggtggtcgcgtgctcattctaaggcgactatga

SEQ ID NO: 5298 - protein, 211 aa, Muscodor strobelii
  misc_feature: SGI Peptide ID NO. 561478
  misc_feature (66)..(160): Pfam Id: PF08241 Pfam Desc: Methyltransferase domain
  misc_feature (66)..(158): Pfam Id: PF08242 Pfam Desc: Methyltransferase domain
  misc_feature (13)..(210): NCBI GI: 169620485 Blast Desc: SNOG_13441 [Phaeosphaeria nodorum SN15] gi|160704039|gb|EAT79325.2| SNOG_13441 [Phaeosphaeria nodorum SN15]
  misc_feature (13)..(211): NCBI GI: 189198367 Blast Desc: conserved [Pyrenophora tritici-repentis Pt-1C-BFP] gi|187981469|gb|EDU48095.1| conserved [Pyrenophora tritici-repentis Pt-1C-BFP]
  misc_feature (1)..(210): NCBI GI: 115402761 Blast Desc: conserved [Aspergillus terreus NIH2624] gi|114189303|gb|EAU31003.1| conserved [Aspergillus terreus NIH2624]
  misc_feature (13)..(209): NCBI GI: 256733530 Blast Desc: [Nectria haematococca mpVI 77-13-4]
  misc_feature (13)..(209): NCBI GI: 46128493 Blast Desc: FG08624.1 [Gibberella zeae PH-1]
  misc_feature (11)..(211): NCBI GI: 261353965 Blast Desc: Methyltransferase domain-containing protein [Verticillium albo-atrum VaMs.102]
  misc_feature (11)..(209): NCBI GI: 256723793 Blast Desc: NECHADRAFT_37208 [Nectria haematococca mpVI 77-13-4]
  misc_feature (10)..(210): NCBI GI: 67527142 Blast Desc: AN3996.2 [Aspergillus nidulans FGSC A4] gi|40740277|gb|EAA59467.1| AN3996.2 [Aspergillus nidulans FGSC A4] gi|259481422|tpe|CBF74924.1| TPA: conserved [Aspergillus FGSC
  misc_feature (13)..(211): NCBI GI: 255939796 Blast Desc: Pc16g02980 [Penicillium chrysogenum Wisconsin 54-1255] gi|211585290|emb|CAP92968.1| Pc16g02980 [Penicillium chrysogenum Wisconsin 54-1255]
  misc_feature (24)..(194): NCBI GI: 46111901 Blast Desc: FG02832.1 [Gibberella zeae PH-1]
  misc_feature: Useful for introducing or modulating the production of volatile compounds
MSLTGDLLGNANLARVYAASTPRESQQAYDEWASSYDADMVEQGYVAPAFCARAIQTHGSVDGAILDAGCGTGAVGLELSKLGAKTVDGIDFSDGMLAVARQANVYRKLSTTDLSRVVDIEDEIYDAVICVGTLTQGHVGPNPALSEFVRVVKSGGIIVATVLETIWDKDGYEAEVERLVKESKVSLVSKEVQRYRKHAGVGGRVLILRRL

SEQ ID NO: 5299 - DNA, 2218 bp, Muscodor strobelii
  misc_feature: SGI EST ID NO. CUFF.13460.0
  misc_feature: Variant of the nucleotide sequence at SEQ ID NO 5297
ccgaaaagtacgaagataaggcatcacttatcgccagcttttagtgcctatcatcgcgtccactgtagactgatttgaccagcatttggaacgtgtttcctgatcactgatgatgccactgataggtcatgtgtctagggcagctgctacatctaacccctcttcagtcgaagcaccccaatagattcccagcattggcaccgctcgatgttgaatcgtcttgtcaacgcgtcgacaatggcttcgcagtactgaagtgcggacaacgacgcgacaggacggaggcagtcttgacagtctagggtcttggtgacgggggagtagaacagaggtatctggcgcgataccccgcgctagacccgatttatggagagtctccaggtgagcatgcatcacgtcggacagcatcgctcgataccttctctttacaaacaccagattcggttgtaagatttgaaggagttatatgcccgcgcatttcagatatccattatgtctttaacaggcgatctccttgggaatgccaatctcgctcgcgtctacgccgcatcgacccctcgagaatcacagcaagcttacgacgagtgggcatcgagttatgacgccgacatggttgagcaaggctatgttgctccagctttctgtgcgagggccatccaaacgcacgggagcgttgatggcgccattcttgatgccggttgtggcaccggcgctgttggtctggagctttccaagcttggcgccaaaactgtcgacggtattgatttcagcgatggtatgcttgctgtcgctagacaagcgaacgtataccgcaagctaagtacaaccgatctgtccagggtagttgatatcgaggacgagatatatgatgctgtgatttgcgtgggcacgttgacgcagggacatgttgggccgaatccagcgctgagcgagttcgtaagggtcgtcaaaagtggaggaatcatcgttgcgacagtgctagagactatctgggacaaagatgggtacgaagctgaggtcgagagacttgtcaaagagagcaaagtctctcttgtctcaaaagaggtccagcggtatcgcaagcatgcaggcgttggtggtcgcgtgctcattctaaggcgactatgagcggacactggcagtattggggcacagaagaggaagggcgcaaactacttgcgccgatctgggacctcaatccgatactacaaaatattaactgtcgtatcgtcgaacgaactccttcaggtccaaggtttcggcgccgatgcagatctgtgtacgctgggcaagaatcttgttagctaccggcaaatgtgaaacggctttccgtgcctttactcgaacgaacatacaatgcttttgccgaattcttcgctagatatcccggcgggtgtaatagtccagcattattcgaaacactccccaacacagcagtgaaggcagtgcctgtcgaattaacttcgtatccctggcgggacgctattgggcatcacctgttctaattcatattcgacaagagtggcactgggacagcggccgctgcaaaagctcttggtcaacaaatccgcgttgattctagtgcgacctcgagctatggcagcttggcggtgtataagagctatgcaagcggagacgagacccccgaggaaaacctccagcggcaaatttctcccacgtctcgcagcactgaaaaaacagtgggatccctcgaacgacttcaagtaccaaacttcactcccaacgcactacacaaggtcgttgggtactggtagttgaagcgatgtatacgaagaatttcggatcttgcgctttctcttctactgcgcactattctctgctcgcttgaaaatgagatgtctcagcatattgatgtgattatgaagacttcaatccctttgagccgatttcaagcacaatagtcaaaggcagtctttgcctctaaacattcaaaaggacgtcgcgaaactgctgttattatgtcacagtccaaaataaatgatttgatagatcctcagacacaaataaggctgttgatgcatgggatagtgcctgtcttttgctcaggtggcatgtatggcaaactcgtctcctgctttcccagcatgtgcgttgtcaacataaacaaatcaagggacgaaagagaatcccaaacacttagtctcccctcgatatccacacatatgcagtgctcttcttgagcactatatcatccgga

SEQ ID NO: 5300 - DNA, 1614 bp, Muscodor strobelii
  misc_feature: SGI cDNA ID NO. 561479
  misc_feature: Encodes the peptide sequence at SEQ ID NO 5301
atgggcgcttcgcaggagcagacaattaccatgtatccgggcgccgttaattggtccttcttcctgagcagtgagtattgcagctcatctcccagtccttgctacgcgtcgagtacagggctattcgacagtgatgaagcaagcggcttcagcgatgtacaataccgtcctggtccagactttacaggcggcgttctggatattcaaggacctgagactgatatgtcttatgccgatagtctgacattcgacgatctttcgtgggctggctttcaagtcgagaatcttgccatgacactcattgattccgctaccatcagttatcccaatggaaacagctatccattgttcgcagggtgcctgtctctaggtggccctttcaacgtgaatcagaccttcttccccccatcgccaccaatcaataccagtctcataccaggatatctttactcacatcaaaggataccgtcaaattcatttgggatgcacatcggagcagcgagtcctcgattacaggggtctttgcacttcggaggatatgacaagaaccgtgtagtcggcgatgtgttggcactaccagccatggataatcagagccccgtcactctaattgacatttcaatacgggtcgtcgcgggaagctctccctttagttttgagggtgcagtgaaagatggacttctcgcggagggaaacgacacgctcaaaagtggcattgtcgtacgtaccgtgccgtgtgcgccctacatcagtctgccaaagagcacatgcgactcgatcgcgagttatcttcccgtcatctttgatgaaggattcgggctgtatctctgggacacagcttctccagactacgcaaaaatcatcacgtcagcgtcagccctccagttcacattcctaagtgctaccaatagtcgatcatacaacttctcgattccgttcctacatttgaacctgactttggacgatcctctcgtggatactcccaccccttatttcccatgcaacgtggcatttaaggagtatggcctcggaagggcgttcttccaggatgtttttatcggcatgaactggaatgcaaccgctgctggccccggcggcacactttttctcgcgcaggcccccgggcctagaatcccggcttcgccggatattgtcgcaatcgaagttgatgcgcagactattgaatctggtaataatgactgggctgagagctggaagggtgtatggaccgagctcgaaccggatgataataatgatgcaggagacagtcccaataataaggacgatactacgtcatcccatcaaggcactaaaattggtattggagttggagtgggcgtcggagggtttcttatacttctggcagttggtgtttttctttttaggcgtaggaggaaacgtcagggacaaggtcatagccctgagcattcagtacggccaggacagaagtgggaagaacacacagttcatggcgccaacgctacggatcaaatgcatagaccgcagacgcccagatatccttccgatccttccgaaatggagcagccagtggctgtacacgaagcctatgtgcgctctactgatacatgggaactaccagcagaacataggtaa

SEQ ID NO: 5301 - protein, 537 aa, Muscodor strobelii
  misc_feature: SGI Peptide ID NO. 561479
  misc_feature (9)..(467): NCBI GI: 256729031 Blast Desc: NECHADRAFT_40333 [Nectria haematococca mpVI 77-13-4]
  misc_feature (6)..(469): NCBI GI: 261355446 Blast Desc: conserved [Verticillium albo-atrum VaMs.102]
  misc_feature (5)..(533): NCBI GI: 46138885 Blast Desc: FG10957.1 [Gibberella zeae PH-1]
  misc_feature (4)..(409): NCBI GI: 145245229 Blast Desc: An11g09240 [Aspergillus niger] gi|134079578|emb|CAK97054.1| protein product [Aspergillus niger]
  misc_feature (4)..(491): NCBI GI: 212529684 Blast Desc: conserved [Penicillium marneffei ATCC 18224] gi|210074397|gb|EEA28484.1| conserved [Penicillium marneffei ATCC 18224]
  misc_feature (4)..(418): NCBI GI: 115433018 Blast Desc: [Aspergillus terreus NIH2624] gi|114189498|gb|EAU31198.1| [Aspergillus terreus NIH2624]
  misc_feature (140)..(498): NCBI GI: 145245433 Blast Desc: An11g10270 [Aspergillus niger] gi|134079684|emb|CAK97110.1| protein product [Aspergillus niger]
  misc_feature (90)..(485): NCBI GI: 159125200 Blast Desc: AFUB_066520 [Aspergillus fumigatus A1163]
  misc_feature (4)..(412): NCBI GI: 169771583 Blast Desc: [Aspergillus oryzae RIB40] gi|238485834|ref|XP_002374155.1| aspartic-type endopeptidase, [Aspergillus flavus NRRL3357] gi|83768120|dbj|BAE58259.1| protein
  misc_feature (5)..(490): NCBI GI: 119183576 Blast Desc: CIMG_06704 [Coccidioides immitis RS]
MGASQEQTITMYPGAVNWSFFLSSEYCSSSPSPCYASSTGLFDSDEASGFSDVQYRPGPDFTGGVLDIQGPETDMSYADSLTFDDLSWAGFQVENLAMTLIDSATISYPNGNSYPLFAGCLSLGGPFNVNQTFFPPSPPINTSLIPGYLYSHQRIPSNSFGMHIGAASPRLQGSLHFGGYDKNRVVGDVLALPAMDNQSPVTLIDISIRVVAGSSPFSFEGAVKDGLLAEGNDTLKSGIVVRTVPCAPYISLPKSTCDSIASYLPVIFDEGFGLYLWDTASPDYAKIITSASALQFTFLSATNSRSYNFSIPFLHLNLTLDDPLVDTPTPYFPCNVAFKEYGLGRAFFQDVFIGMNWNATAAGPGGTLFLAQAPGPRIPASPDIVAIEVDAQTIESGNNDWAESWKGVWTELEPDDNNDAGDSPNNKDDTTSSHQGTKIGIGVGVGVGGFLILLAVGVFLFRRRRKRQGQGHSPEHSVRPGQKWEEHTVHGANATDQMHRPQTPRYPSDPSEMEQPVAVHEAYVRSTDTWELPAEHR

SEQ ID NO: 5302 - DNA, 500 bp, Muscodor strobelii
  misc_feature: SGI EST ID NO. CUFF.13465.0
  misc_feature: Variant of the nucleotide sequence at SEQ ID NO 5300
gtcggcgatgtgttggcactaccagccatggataatcagagccccgtcactctaattgacatttcaatacgggtcgtcgcgggaagctctccctttagttttgagggtgcagtgaaagatggacttctcgcggagggaaacgacacgctcaaaagtggcattgtcgtacgtaccgtgccgtgtgcgccctacatcagtctgccaaagagcacatgcgactcgatcgcgagttatcttcccgtcatctttgatgaaggattcgggctgtatctctgggacacagcttctccagactacgcaaaaatcatcacgtcagcgtcagccctccagttcacattcctaagtgctaccaatagtcgatcatacaacttctcgattccgttcctacatttgaacctgactttggacgatcctctcgtggatactcccaccccttatttcccatgcaacgtggcatttaaggagtatggcctcggaagggcgttcttccaggatgtttt

SEQ ID NO: 5303 - DNA, 978 bp, Muscodor strobelii
  misc_feature: SGI cDNA ID NO. 561480
  misc_feature: Elevated expression when VOC is produced
  misc_feature: Encodes the peptide sequence at SEQ ID NO 5304
atgagcctaactgggatccgcgaggcgagccatgcccactcatggtacgagggtaacccgagagtcctatctaagcagctcgaagactttctgaagaacgtcgacgattcgatcaatgagagcgctctgccgatccctggtgccaaagtggtcatcgcaccacatgctggctacacttactcgggtccctgtgccgcctgggcctataagtgccttgatctcagcaaggcaaagagagtattcattctgggaccatctcatacctactacctgcgaggatgtgcgatcactaaatttgccgaatatgagacacccttcggcaatctaaccgtcgatgaggatgtagtccaggtactgcgcgcgactggcaagttccaacccataccgactaagagcgatatcaacgagcactcgctagaaatgcacctcccttatctctataagcgcctcacccagacatttgcatccgagcaggagtaccccaccatcgtccccatcctgataggaagcaacaacggagcagaggagaaggcaatcggccagattctcgcaccttacgtcattgacccggacaatgcattcatcattagctcagacttctgccactggggttcaagattcgactatgtcaagtatacgccggagaacaaggttgaaaacatccgggacctcgagagacgggagaaacctaaggaccctccgatccacgagagtatcaagatgcttgaccacctcgccattgacgccatcgccagtggtaaccacgactccttcgtcaacaacctcgcccggaccaacaacacggtttgtggtcgacatcccatcggcgtcaccatggctgctctcgaagtccttgcaggccaggataccggtagcgagaagtacaggttcaagtttgtgcagtatgacaggagtagtttggtgatggactatcatgattccagcgtgagttatgcatctgcgtatgccattgtataa

SEQ ID NO: 5304 - protein, 325 aa, Muscodor strobelii
  misc_feature: SGI Peptide ID NO. 561480
  misc_feature (8)..(322): Pfam Id: PF01875 Pfam Desc: Memo-like protein
  misc_feature (3)..(325): NCBI GI: 145607219 Blast Desc: MGG_04091 [Magnaporthe grisea 70-15] gi|145014817|gb|EDJ99385.1| MGG_04091 [Magnaporthe grisea 70-15]
  misc_feature (3)..(325): NCBI GI: 256734680 Blast Desc: NECHADRAFT_98907 [Nectria haematococca mpVI 77-13-4]
  misc_feature (7)..(325): NCBI GI: 171680871 Blast Desc: protein product [Podospora anserina] gi|27764330|emb|CAD60610.1| protein product [Podospora anserina] gi|170940063|emb|CAP65290.1| protein product [Podospora anserina]
  misc_feature (7)..(308): NCBI GI: 46108134 Blast Desc: FG00949.1 [Gibberella zeae PH-1]
  misc_feature (3)..(315): NCBI GI: 154289990 Blast Desc: BC1G_15807 [Botryotinia fuckeliana B05.10] gi|150848502|gb|EDN23695.1| BC1G_15807 [Botryotinia fuckeliana B05.10]
  misc_feature (7)..(325): NCBI GI: 85092720 Blast Desc: NCU11386 [Neurospora crassa OR74A] gi|28920949|gb|EAA30278.1| conserved [Neurospora crassa OR74A]
  misc_feature (1)..(325): NCBI GI: 261358655 Blast Desc: MEMO1 [Verticillium albo-atrum VaMs.102]
  misc_feature (3)..(315): NCBI GI: 156035813 Blast Desc: SS1G_13111 [Sclerotinia sclerotiorum 1980] gi|154698515|gb|EDN98253.1| SS1G_13111 [Sclerotinia sclerotiorum 1980]
  misc_feature (55)..(325): NCBI GI: 116200592 Blast Desc: CHGG_10841 [Chaetomium globosum CBS 148.51] gi|88175555|gb|EAQ83023.1| CHGG_10841 [Chaetomium globosum CBS 148.51]
  misc_feature (7)..(325): NCBI GI: 189201744 Blast Desc: PTRG_06875 [Pyrenophora tritici-repentis Pt-1C-BFP] gi|187984307|gb|EDU49795.1| PTRG_06875 [Pyrenophora tritici-repentis Pt-1C-BFP]
  misc_feature: Useful for introducing or modulating the production of volatile compounds
MSLTGIREASHAHSWYEGNPRVLSKQLEDFLKNVDDSINESALPIPGAKVVIAPHAGYTYSGPCAAWAYKCLDLSKAKRVFILGPSHTYYLRGCAITKFAEYETPFGNLTVDEDVVQVLRATGKFQPIPTKSDINEHSLEMHLPYLYKRLTQTFASEQEYPTIVPILIGSNNGAEEKAIGQILAPYVIDPDNAFIISSDFCHWGSRFDYVKYTPENKVENIRDLERREKPKDPPIHESIKMLDHLAIDAIASGNHDSFVNNLARTNNTVCGRHPIGVTMAALEVLAGQDTGSEKYRFKFVQYDRSSLVMDYHDSSVSYASAYAIV

SEQ ID NO: 5305 - DNA, 1505 bp, Muscodor strobelii
  misc_feature: SGI EST ID NO. CUFF.13477.0
  misc_feature: Variant of the nucleotide sequence at SEQ ID NO 5303
gggcagactattgacattcacgttgaatgagtgacattctcggccttctttgatgagcatttgacagcacaagacaaaggaacgccgcctgaaactgcgctgggtggcgttttctttctcgacaaggatcgaaaggatcttatacccaagatagtcgaccagtaatcgcaattattgcctctgcaatctgatcgcctcacgcgcaaccacaatgagcctaactgggatccgcgaggcgagccatgcccactcatggtacgagggtaacccgagagtcctatctaagcagctcgaagactttctgaagaacgtcgacgattcgatcaatgagagcgctctgccgatccctggtgccaaagtggtcatcgcaccacatgctggctacacttactcgggtccctgtgccgcctgggcctataagtgccttgatctcagcaaggcaaagagagtattcattctgggaccatctcatacctactacctgcgaggatgtgcgatcactaaatttgccgaatatgagacacccttcggcaatctaaccgtcgatgaggatgtagtccaggtactgcgcgcgactggcaagttccaacccataccgactaagagcgatatcaacgagcactcgctagaaatgcacctcccttatctctataagcgcctcacccagacatttgcatccgagcaggagtaccccaccatcgtccccatcctgataggaagcaacaacggagcagaggagaaggcaatcggccagattctcgcaccttacgtcattgacccggacaatgcattcatcattagctcagacttctgccactggggttcaagattcgactatgtcaagtatacgccggagaacaaggttgaaaacatccgggacctcgagagacgggagaaacctaaggaccctccgatccacgagagtatcaagatgcttgaccacctcgccattgacgccatcgccagtggtaaccacgactccttcgtcaacaacctcgcccggaccaacaacacggtttgtggtcgacatcccatcggcgtcaccatggctgctctcgaagtccttgcaggccaggataccggtagcgagaagtacaggttcaagtttgtgcagtatgacaggagtagtttggtgatggactatcatgattccagcgtgagttatgcatctgcgtatgccattgtataagggagacttcgggtatgggggcgtagtgggtgatagatagatgggtgtgtgctcgggcgcgaattcgcattgatataacagctgaagcagcagcacctggcataggtttgcttttatatgataatgaaagtcaattggtctcttagatgtgcccattctaaccattattccacctcgctcacaccttattgttctataagttacgtctcactagcaagacaagacaccagcaaagcaaaagggaaaggggtctagagatcaattgaatggccaagcgatcgttgcagattcatgcctaacagcacaagacttgtta

SEQ ID NO: 5306 - DNA, 1074 bp, Muscodor strobelii
  misc_feature: SGI cDNA ID NO. 561481
  misc_feature: Encodes the peptide sequence at SEQ ID NO 5307
atgcattttcaagattacgtcttactcgcagtcagcgcctcactggcacatgcaagagcagcagcaccagcccaaccactgatcacaccagccgcgaagcttgaagacagagactggagatcacagctctcctctgcactggcagcagcaagttcagcacaagaagcagcaagctccatagctgcagaatacgggaacgacaaacgggattggagagacgatctgtcttcggctttagcgcatgccagctctctcgctaacgaatatggcccagttggctcatcgtatgcttctgagtatgcacccgagaacaacaagcgggattggagggatgatttgtcatctgctttggctcaagccagctcgttagcagaggagtatggtgctgtggccgcatcgtacgtttctgaatacgccccccagaataagcgagactggaaagatgacctctcgtcggctcttgctcttgctagctcgctcgcagacgaatatggctcggtagctgcttcatatgcttcggagtatgcccctcagaacaagcgagactggaaagacgatctatcgtccgctctagctgaggcaagttccctcgcggatgagtacggctcagtggcctcatcatatgcctcagagtacagaccgcgccaccagagagattggcacagcgacgtctcagcagctgagagtcttgcaagctcatgggaaggcgccggatcttctatcgctcaatcatatgacagctacgcttcgtcgcttgcgagttcttacgcaagttacggatcgagcattgcagatgatgctgtctcgtctgcaaacgcggcggtgtcgagcgctcagagcgtcgcgaagactgctacaggggctggcgctgcggaggcaagcagtgcggttgacagcgcgatgagtgtcgcgagtagtgtttctgctgcacatgctgcgcagacctcaagcgctaagtctgactcgaataatgatactaatgggactgtggcaggcactgacgcttcgtcagcgggattgtggtcatttgctgcggtcgcgttctctgtgtttgccggcgctatgcttttgtga

SEQ ID NO: 5307 - protein, 357 aa, Muscodor strobelii
  misc_feature: SGI Peptide ID NO. 561481
MHFQDYVLLAVSASLAHARAAAPAQPLITPAAKLEDRDWRSQLSSALAAASSAQEAASSIAAEYGNDKRDWRDDLSSALAHASSLANEYGPVGSSYASEYAPENNKRDWRDDLSSALAQASSLAEEYGAVAASYVSEYAPQNKRDWKDDLSSALALASSLADEYGSVAASYASEYAPQNKRDWKDDLSSALAEASSLADEYGSVASSYASEYRPRHQRDWHSDVSAAESLASSWEGAGSSIAQSYDSYASSLASSYASYGSSIADDAVSSANAAVSSAQSVAKTATGAGAAEASSAVDSAMSVASSVSAAHAAQTSSAKSDSNNDTNGTVAGTDASSAGLWSFAAVAFSVFAGAMLL

SEQ ID NO: 5308 - DNA, 1276 bp, Muscodor strobelii
  misc_feature: SGI EST ID NO. CUFF.13480.0
  misc_feature: Variant of the nucleotide sequence at SEQ ID NO 5306
tcactcaggaacaacagtatagaccgtgctgaacatgaaattgatacataaaaatcttatttctcagaatcaacacaggagattctcattgatcacgctacgacaatatcaattcaccatcatagataccttacagaagacagcaggctctggcatcgtcacgacacttacgattggatgaactcatacccgacatacggaactagatctcgttcattgcgaatcactaacaccaatctcataacacactcacaatgcattttcaagattacgtcttactcgcagtcagcgcctcactggcacatgcaagagcagcagcaccagcccaaccactgatcacaccagccgcgaagcttgaagacagagactggagatcacagctctcctctgcactggcagcagcaagttcagcacaagaagcagcaagctccatagctgcagaatacgggaacgacaaacgggattggagagacgatctgtcttcggctttagcgcatgccagctctctcgctaacgaatatggcccagttggctcatcgtatgcttctgagtatgcacccgagaacaacaagcgggattggagggatgatttgtcatctgctttggctcaagccagctcgttagcagaggagtatggtgctgtggccgcatcgtacgtttctgaatacgccccccagaataagcgagactggaaagatgacctctcgtcggctcttgctcttgctagctcgctcgcagacgaatatggctcggtagctgcttcatatgcttcggagtatgcccctcagaacaagcgagactggaaagacgatctatcgtccgctctagctgaggcaagttccctcgcggatgagtacggctcagtggcctcatcatatgcctcagagtacagaccgcgccaccagagagattggcacagcgacgtctcagcagctgagagtcttgcaagctcatgggaaggcgccggatcttctatcgctcaatcatatgacagctacgcttcgtcgcttgcgagttcttacgcaagttacggatcgagcattgcagatgatgctgtctcgtctgcaaacgcggcggtgtcgagcgctcagagcgtcgcgaagactgctacaggggctggcgctgcggaggcaagcagtgcggttgacagcgcgatgagtgtcgcgagtagtgtttctgctgcacatgctgcgcagacctcaagcgctaagtctgactcgaataatgatactaatgggactgtggcaggcactgacgcttcgtcagcgggattgtg

SEQ ID NO: 5309 - DNA, 1527 bp, Muscodor strobelii
  misc_feature: SGI cDNA ID NO. 561482
  misc_feature: Encodes the peptide sequence at SEQ ID NO 5310
atgagtccctacctgaggaatttgctcttgctgctcgcagcatttgtttcctatctggtcgtcaagtcaaaactcaaaaagcgacgcaacaatgccaaagcagcttctctggggtgcctgccacctccagtattgcgcagcactaatctcatcggtaactccatcttgagagagtcgatgaaagctacgaaagaagatcgaggtccgcaatatgtagctgagaagatgaatagtatttcacctgattgtcacacactatcagtccctattctcgattatgaacttgtgattacgcgagatcctgaaaatgccagggttctgtttacgagtccagatttcgatatcagtcatacgcgccagttgagctggatgcccctccttggcaagggcattttcaccagccgtggtgacatttggaaacacagtcgcacattattgcgcccacagtttgcacgagagatgatcagtgatccgactctcgaagaacatcatcttgaagatctatggaagcatctttcagtcgatgccgaaactaaatggtccaagactgttgatcttctgccgctgttcttcaaatttaccttagacactgccaccgagtttatcttcggccagtctacgtattcgctgcgccaagccaagaacgagaaagagattgatcgtcacttcaacgaggccaaggtctggattgataagcgtggcgctcttgcgaagttctactggcttatgaacaataaggtctttaaggaacattgcaaaatcattcacgatttcgtcgacgcgatcgtatctgaccgtctatcgcgctcatctgaaaaagtcaatacggatcctgagagagacactcggttcagtcttctcaatgagctggccaatgatacgcaagacccaagagaactgcgaaacgagactctccatgtcctactcgctggccgtgacactacgggctgtcttttgggatgggtagtctatttcttggcgcgacacccggatgtctaccaaaaactccgagacactatactcgaaagattcgggaacaatcgacccgactttcgttcacttacccaggtcaactatatgcaatgggtcatcaacgaggtcctcagaatcgtcacggttatccccatgaacgagcgcattgctctgcgcgacaccacacttcccgtcggcggtgggccagatggaaaatcaaagatctttgtgcctgagggcacacaagtcttaattccgctatatgccatgcaacatagagaagatctttggggtaaagacgttgagcaattccgccctgaaagatgggagactcatcgccccggttgggaattcattcccttcggagctggtgcacgaaaatgcttaggccagcaattcggccgccaagaagtcagctatgtcatttcacgcttctgccagaagtatgaccgtatcgaaaacatggaacaaggagacaacagaatactactgcatcatgccattgaaaatcgctccgggtccggtgttcaagttcgcctacacgaggtgaaataa

SEQ ID NO: 5310 - protein, 508 aa, Muscodor strobelii
  misc_feature: SGI Peptide ID NO. 561482
  misc_feature (42)..(502): Pfam Id: PF00067 Pfam Desc: Cytochrome P450
  misc_feature (183)..(474): Pfam Id: PF00067 Pfam Desc: Cytochrome P450
  misc_feature (4)..(507): NCBI GI: 242778985 Blast Desc: cytochrome P450, [Talaromyces stipitatus ATCC 10500] gi|218722969|gb|EED22387.1| cytochrome P450, [Talaromyces stipitatus ATCC 10500]
  misc_feature (6)..(507): NCBI GI: 212533853 Blast Desc: N-alkane-inducible cytochrome P450, [Penicillium marneffei ATCC 18224] gi|210072447|gb|EEA26536.1| N-alkane-inducible cytochrome P450, [Penicillium marneffei ATCC
  misc_feature (16)..(507): NCBI GI: 171688034 Blast Desc: protein product [Podospora anserina] gi|170943979|emb|CAP70089.1| protein product [Podospora anserina]
  misc_feature (59)..(481): NCBI GI: 154296077 Blast Desc: BC1G_12768 [Botryotinia fuckeliana B05.10] gi|150843729|gb|EDN18922.1| BC1G_12768 [Botryotinia fuckeliana B05.10]
  misc_feature (4)..(458): NCBI GI: 156032429 Blast Desc: SS1G_13912 [Sclerotinia sclerotiorum 1980] gi|154699314|gb|EDN99052.1| SS1G_13912 [Sclerotinia sclerotiorum 1980]
  misc_feature (27)..(506): NCBI GI: 116197088 Blast Desc: CHGG_05142 [Chaetomium globosum CBS 148.51] gi|88181055|gb|EAQ88523.1| CHGG_05142 [Chaetomium globosum CBS 148.51]
  misc_feature (8)..(508): NCBI GI: 156054264 Blast Desc: SS1G_05980 [Sclerotinia sclerotiorum 1980] gi|154703760|gb|EDO03499.1| SS1G_05980 [Sclerotinia sclerotiorum 1980]
  misc_feature (14)..(508): NCBI GI: 189200681 Blast Desc: cytochrome P450 52A12 [Pyrenophora tritici-repentis Pt-1C-BFP] gi|187983776|gb|EDU49264.1| cytochrome P450 52A12 [Pyrenophora tritici-repentis Pt-1C-BFP]
  misc_feature (5)..(508): NCBI GI: 255950120 Blast Desc: Pc22g19240 [Penicillium chrysogenum Wisconsin 54-1255] gi|211592844|emb|CAP99212.1| Pc22g19240 [Penicillium chrysogenum Wisconsin 54-1255]
  misc_feature (8)..(477): NCBI GI: 212537573 Blast Desc: cytochrome P450 family protein, [Penicillium marneffei ATCC 18224] gi|210068684|gb|EEA22775.1| cytochrome P450 family protein, [Penicillium marneffei ATCC 18224]
  misc_feature (95)..(473): SWISSPROT Homolog: EC 1.14.14.1 Unspecific monooxygenase
MSPYLRNLLLLLAAFVSYLVVKSKLKKRRNNAKAASLGCLPPPVLRSTNLIGNSILRESMKATKEDRGPQYVAEKMNSISPDCHTLSVPILDYELVITRDPENARVLFTSPDFDISHTRQLSWMPLLGKGIFTSRGDIWKHSRTLLRPQFAREMISDPTLEEHHLEDLWKHLSVDAETKWSKTVDLLPLFFKFTLDTATEFIFGQSTYSLRQAKNEKEIDRHFNEAKVWIDKRGALAKFYWLMNNKVFKEHCKIIHDFVDAIVSDRLSRSSEKVNTDPERDTRFSLLNELANDTQDPRELRNETLHVLLAGRDTTGCLLGWVVYFLARHPDVYQKLRDTILERFGNNRPDFRSLTQVNYMQWVINEVLRIVTVIPMNERIALRDTTLPVGGGPDGKSKIFVPEGTQVLIPLYAMQHREDLWGKDVEQFRPERWETHRPGWEFIPFGAGARKCLGQQFGRQEVSYVISRFCQKYDRIENMEQGDNRILLHHAIENRSGSGVQVRLHEVK

SEQ ID NO: 5311 - DNA, 2243 bp, Muscodor strobelii
  misc_feature: SGI EST ID NO. CUFF.13487.0
  misc_feature: Variant of the nucleotide sequence at SEQ ID NO 5309
ctgggatgtcgagtctctcagtacccatgttcatatccatggctttggtgataacggatctgagcggaaacgcggttcccggtgatcgcgccttagtcccggcgccatggctcttagtaccgttttgggcagaagtatcgtatacttgctgatgagcccccacatcgaagtaccgctacatcgtcctactgtcacaaaaaaaactccaaacgttttacggagtttccctgtcattcgtagtgtgacagcgattgtccgaatttggatcgaatattttccgccatcgatgatgtttgtggtggagaatgaagcttgggagaaaacaaccaacagggattgtagcccctcagtctggtcttacgtgtgaatggtgtgatgattattgtgtccgtcggcattggacggtattgtttttcatgtcttatcacaccgtggacactacgtcaacaggcattcgaagacttggtgatctcttacagccacttcgttggttgatcatcagttttgaagatgagtccctacctgaggaatttgctcttgctgctcgcagcatttgtttcctatctggtcgtcaagtcaaaactcaaaaagcgacgcaacaatgccaaagcagcttctctggggtgcctgccacctccagtattgcgcagcactaatctcatcggtaactccatcttgagagagtcgatgaaagctacgaaagaagatcgaggtccgcaatatgtagctgagaagatgaatagtatttcacctgattgtcacacactatcagtccctattctcgattatgaacttgtgattacgcgagatcctgaaaatgccagggttctgtttacgagtccagatttcgatatcagtcatacgcgccagttgagctggatgcccctccttggcaagggcattttcaccagccgtggtgacatttggaaacacagtcgcacattattgcgcccacagtttgcacgagagatgatcagtgatccgactctcgaagaacatcatcttgaagatctatggaagcatctttcagtcgatgccgaaactaaatggtccaagactgttgatcttctgccgctgttcttcaaatttaccttagacactgccaccgagtttatcttcggccagtctacgtattcgctgcgccaagccaagaacgagaaagagattgatcgtcacttcaacgaggccaaggtctggattgataagcgtggcgctcttgcgaagttctactggcttatgaacaataaggtctttaaggaacattgcaaaatcattcacgatttcgtcgacgcgatcgtatctgaccgtctatcgcgctcatctgaaaaagtcaatacggatcctgagagagacactcggttcagtcttctcaatgagctggccaatgatacgcaagacccaagagaactgcgaaacgagactctccatgtcctactcgctggccgtgacactacgggctgtcttttgggatgggtagtctatttcttggcgcgacacccggatgtctaccaaaaactccgagacactatactcgaaagattcgggaacaatcgacccgactttcgttcacttacccaggtcaactatatgcaatgggtcatcaacgaggtcctcagaatcgtcacggttatccccatgaacgagcgcattgctctgcgcgacaccacacttcccgtcggcggtgggccagatggaaaatcaaagatctttgtgcctgagggcacacaagtcttaattccgctatatgccatgcaacatagagaagatctttggggtaaagacgttgagcaattccgccctgaaagatgggagactcatcgccccggttgggaattcattcccttcggagctggtgcacgaaaatgcttaggccagcaattcggccgccaagaagtcagctatgtcatttcacgcttctgccagaagtatgaccgtatcgaaaacatggaacaaggagacaacagaatactactgcatcatgccattgaaaatcgctccgggtccggtgttcaagttcgcctacacgaggtgaaataatcataaagattatctgctggcaaactgtcatgtctcaattaaatgggctctcgcaaaatatctcagggtacatcaccatgacactccctgcgttactgcagaagccatccacttgtatatagtaatgaactgcgcttgatttcagatattttcgactgttttcttgatccatcaacgtgacgatcaaatataatttaatataatta

SEQ ID NO: 5312 - DNA, 447 bp, Muscodor strobelii
  misc_feature: SGI cDNA ID NO. 561483
  misc_feature: Encodes the peptide sequence at SEQ ID NO 5313
atggcccttcgccaacctcgtcgaatggatatccaccacctccaggtgctgtttccgtgcctccaggcgcaaattactcaccttcggccagcggggctccatatcctccgcctggctctcatcagccttatccacttccaccggttcatggccactcacaagatcccagagctggctatcctgcagatccacgagcacaaggatactatgcacaaactggatcattcaacggaggatttgactatggttatcggcaagatcggggcccacctggctcatatccgccggaatatgctagaggcggcccaggagctggtgcagtcatgcaaacaactgcgccccggcagagaacctcgatcgcctgtaaatattgtagaagaagaaagattcgctgcagtggttacgcgaattctccgggagggaaatgtaccaattgcatcaaaatga

SEQ ID NO: 5313 - protein, 148 aa, Muscodor strobelii
  misc_feature: SGI Peptide ID NO. 561483
MALRQPRRMDIHHLQVLFPCLQAQITHLRPAGLHILRLALISLIHFHRFMATHKIPELAILQIHEHKDTMHKLDHSTEDLTMVIGKIGAHLAHIRRNMLEAAQELVQSCKQLRPGREPRSPVNIVEEERFAAVVTRILREGNVPIASK

SEQ ID NO: 5314 - DNA, 2881 bp, Muscodor strobelii
  misc_feature: SGI EST ID NO. CUFF.13563.0
  misc_feature: Variant of the nucleotide sequence at SEQ ID NO 5312
gccctcgccggcccagaagacctacctaatccagggcttccggccactcaagcatcagcggtaagccccgctaccactgctccccacccgactcgccaagtttctgcaaccatcatctctcttgctcgtgccgttctcaccctcttaccatctcgaggaccgactgggctttgactggggactggtaggctggcttgaattgactgggactgggactgggactgggatgaggactagaggcttgcccagagacccagactggagacgctcgacttattgacttggccgccattacattactgcgtaccctaaaataaggattgcaggaagcattcttattgagccatcttcctggtcctcgtttctctcctcccaggtcttattaatcttcccactcccacccttccctctcttcactcacccccaccagcattcgtcttgatttccttcctccagcatatcctagaataatctgttttcccttctctcgcatcctcattctaaaataccctctcagccgccgccactcctttggtgctcaaacgcctcttccatctctcaaccgtaacatcgcgtatccgagaccgcagctcagctaaccaggcataagcttccaccccaccaccttaccagccgctcttgccagatcgcgaggtctaggacagattgcacagaagggattgacattatttgtgaggcctttgagactctactcccatgctgtgccgttcctgagatcatcgtcatgtgtatcggctgctgcaggcgatcttcacatttaatcgattttcccgcccaactctaaaattgcgacaacttgtttctcccaggttttaatacgttagtgtgattcaaatctcaggcaacgtggttggtcgtccataggacttcaacctgtcgcctcttgtacgtccatagacgtagcatggcaggagacccatcaagtgggagagctcctcacgatcagtacggcgactcacaatatccgccccttccaggagaggaagacgaccgcccaagagccattccacagcctccccgatcacaaatggcgtctagcgcagtgaccttgccatcgattcaagatcggcctgacatgtataacccacagggtccgcgatcttgggacccgcgaggttcgggctatggcccttcgccaacctcgtcgaatggatatccaccacctccaggtgctgtttccgtgcctccaggcgcaaattactcaccttcggccagcggggctccatatcctccgcctggctctcatcagccttatccacttccaccggttcatggccactcacaagatcccagagctggctatcctgcagatccacgagcacaaggatactatgcacaaactggatcattcaacggaggatttgactatggttatcggcaagatcggggcccacctggctcatatccgccggaatatgctagaggcggcccaggagctggtgcagtcatgcaaacaactgcgccccggcagagaacctcgatcgcctgtaaatattgtagaagaagaaagattcgctgcagtggttacgcgaattctccgggagggaaatgtaccaattgcatcaaaatgaatcaggaatgcgtcttccaacccgtttcaaactcgacgtctacggcttttgtccctgtttccgcattgccaggtggcgtgcccccaggaacacaactcttcggtgcatatggtcaacctttggctggagctggacctgcacctggacctttagcctaccctccagggcaagcctaccaagcgtctacgccgcaatttgagcaacagcatccatctcccaccggttcgaacagttcgtattgggaggatagacaagacggtagcaggagacggcaaagaatgtcagatgatgagcatggagttcgtctaccaccacctaacacgtttccagaagaggggtttcggcgccgatcgccgtcaagtagcagtcctaaccatctgcaaccattccagccaacacaagctcagccggggcctcatgggttcgacaataggacccctcccccacgaggaagcccgtctggtcctccagcaagcaatgcttcgggaagctcagtcatgaatctggaaaatatcatgagctccacatcgtcagggaatgatatcgactcaagcatgctgggccgcttgaatcgtcgcgcgaaataagttgttttcgaaggatactaccgcaacagtgggttagttggctgggccggctgaccatgtcgaagcacgacactcaagtacaaacccgaaccgtaatacgagcaatatacgcagcgctatcacgtctcaaaagagtatgcttgtgttctgcgttgatggatacagcgagacagaacaccactgaatatctcgggcgcgagtacaaattctagatcgctgctgtctttgcggctgtgatggaatggtaatgggctggatgaaaaaaaaagcatcgattaaagactatatgacgacttgctatttcgtggaaaatctaagattcgatttctctaattttctcctggttgagaagtctggagataggaggggaaaaaagattggctcgcctcacggcaacagaatatccgaacgaccattgctttaccatgtttcgattaaactaacatttacgcttcacggctcacacgaaggcgttttcttttcatattcaatgcaagaactatgaagtcaagcatggcgcgagcgacgggaaggtctggctgaatgcctcgtggctcattgagtggtggatggatggacgaaagtacgtgctgctcagaatgtacttttcgaactctgagcgcgagctgcgaattaatacctgaattgagtttatacaaaattgaccgtaaccacgatgagaaataattatcctgttcccat

SEQ ID NO: 5315 - DNA, 891 bp, Muscodor strobelii
  misc_feature: SGI cDNA ID NO. 561484
  misc_feature: Encodes the peptide sequence at SEQ ID NO 5316
atggccgaagacgccgcaagcatcaacagagacatcttcgacgacgaagcggcagagtacgacaacaaacacaggaaacttactgaccggatcacgagagagttgcagttgcgcctggaactcatcggcgtgccgtggattctcgatgatagcgacgaagagatcgagacagacagcaaagaaaccacgcgagaagttcggctcttagactatgcgtgtgggactggtgctatgtcgagggcactcgcccaatacacaacccaatgtgttggtatagacatttcgggggaaatggtcgcactatacaacaagagagctgaaaatcagggactcacacctgtagaaatgcacgctattgtcggtaatctcggatctgctagctcaagcgaagctctttcgtccgccgatctcttcgattttgatattgctgtcgtggggggagggtttcatcactttggcgacccagagctgattgcaaaaaaattggtggaacgtctcaaacctggaggcgttctcctgatctgggatttcctaccccacgggccccttcgaggacatcatcatcacacacaccaagaccataatcataaacacccacatgaacatgagcataagattgaccacggagaacacgacaaaaaatcagacgggaataatatcgggcattctgtcatacatcatggttttagcccggatcgcatgcgcgagatcttcaatgccgctggcgctggcacagatttcaatcttcacgctattggaggagggttcgtcactggccatacgcaacaaagtctcgaggatcgagcagatgacattaatccagaggtcgatggtgccgatagaggtcgaagggatgtattttttgcgtggggaagcaaagctatcgcctaa

SEQ ID NO: 5316 - protein, 296 aa, Muscodor strobelii
  misc_feature: SGI Peptide ID NO. 561484
  misc_feature (69)..(174): Pfam Id: PF08241 Pfam Desc: Methyltransferase domain
  misc_feature (69)..(172): Pfam Id: PF08242 Pfam Desc: Methyltransferase domain
  misc_feature (17)..(256): NCBI GI: 116193811 Blast Desc: CHGG_06623 [Chaetomium globosum CBS 148.51] gi|88182536|gb|EAQ90004.1| CHGG_06623 [Chaetomium globosum CBS 148.51]
  misc_feature (4)..(293): NCBI GI: 156055648 Blast Desc: SS1G_05176 [Sclerotinia sclerotiorum 1980] gi|154702960|gb|EDO02699.1| SS1G_05176 [Sclerotinia sclerotiorum 1980]
  misc_feature (30)..(293): NCBI GI: 164429554 Blast Desc: NCU01922 [Neurospora crassa OR74A] gi|157073526|gb|EAA36317.2| [Neurospora crassa OR74A]
  misc_feature (4)..(247): NCBI GI: 46130638 Blast Desc: FG08923.1 [Gibberella zeae PH-1]
  misc_feature (4)..(244): NCBI GI: 256734259 Blast Desc: NECHADRAFT_92153 [Nectria haematococca mpVI 77-13-4]
  misc_feature (4)..(252): NCBI GI: 145609812 Blast Desc: MGG_02966 [Magnaporthe grisea 70-15] gi|145017201|gb|EDK01564.1| MGG_02966 [Magnaporthe grisea 70-15]
  misc_feature (4)..(252): NCBI GI: 149210541 Blast Desc: MGCH7_ch7g745 [Magnaporthe grisea 70-15] gi|86196700|gb|EAQ71338.1| MGCH7_ch7g745 [Magnaporthe grisea 70-15]
  misc_feature (17)..(294): NCBI GI: 261353424 Blast Desc: conserved [Verticillium albo-atrum VaMs.102]
  misc_feature (1)..(248): NCBI GI: 145241055 Blast Desc: An08g10700 [Aspergillus niger] gi|134077703|emb|CAK45743.1| protein product [Aspergillus niger]
  misc_feature (9)..(248): NCBI GI: 76057860 Blast Desc: SAM-dependent methyltransferase [Aspergillus niger]
MAEDAASINRDIFDDEAAEYDNKHRKLTDRITRELQLRLELIGVPWILDDSDEEIETDSKETTREVRLLDYACGTGAMSRALAQYTTQCVGIDISGEMVALYNKRAENQGLTPVEMHAIVGNLGSASSSEALSSADLFDFDIAVVGGGFHHFGDPELIAKKLVERLKPGGVLLIWDFLPHGPLRGHHHHTHQDHNHKHPHEHEHKIDHGEHDKKSDGNNIGHSVIHHGFSPDRMREIFNAAGAGTDFNLHAIGGGFVTGHTQQSLEDRADDINPEVDGADRGRRDVFFAWGSKAIA

SEQ ID NO: 5317 - DNA, 1274 bp, Muscodor strobelii
  misc_feature: SGI EST ID NO. CUFF.13547.0
  misc_feature: Variant of the nucleotide sequence at SEQ ID NO 5315
cgacaagtcgccgtgcttagaggaacgaatatcaagaatgaatcaatgacaataagaaaactacagtgcatctgtgtcgtatcatctgagaacttctcacaatagcgtattcggctactgaagcatcatcaaccctcccaaccacctccaccacgcagccttgacgaaagtcgaacaaacccagatttatctagcataagtctgagagagacatagagattacgacgacggaaaattaagcacctgaaagccatagacttggagtcattttcaatccgagtttgcagcaaaatggccgaagacgccgcaagcatcaacagagacatcttcgacgacgaagcggcagagtacgacaacaaacacaggaaacttactgaccggatcacgagagagttgcagttgcgcctggaactcatcggcgtgccgtggattctcgatgatagcgacgaagagatcgagacagacagcaaagaaaccacgcgagaagttcggctcttagactatgcgtgtgggactggtgctatgtcgagggcactcgcccaatacacaacccaatgtgttggtatagacatttcgggggaaatggtcgcactatacaacaagagagctgaaaatcagggactcacacctgtagaaatgcacgctattgtcggtaatctcggatctgctagctcaagcgaagctctttcgtccgccgatctcttcgattttgatattgctgtcgtggggggagggtttcatcactttggcgacccagagctgattgcaaaaaaattggtggaacgtctcaaacctggaggcgttctcctgatctgggatttcctaccccacgggccccttcgaggacatcatcatcacacacaccaagaccataatcataaacacccacatgaacatgagcataagattgaccacggagaacacgacaaaaaatcagacgggaataatatcgggcattctgtcatacatcatggttttagcccggatcgcatgcgcgagatcttcaatgccgctggcgctggcacagatttcaatcttcacgctattggaggagggttcgtcactggccatacgcaacaaagtctcgaggatcgagcagatgacattaatccagaggtcgatggtgccgatagaggtcgaagggatgtattttttgcgtggggaagcaaagctatcgcctaaagattatctgtcagataacagtcataaatatcatgtttgatagcagacatcccatcatatcatcctcgctccacataatgactaaagcctac

SEQ ID NO: 5318 - DNA, 1332 bp, Muscodor strobelii
  misc_feature: SGI cDNA ID NO. 561485
  misc_feature: Encodes the peptide sequence at SEQ ID NO 5319
atgcgtgggctcttcagccttgctacagctacttgggtggcggcccttgtttctcaagtcgctggctcgacgatcgtccacccgggtggtgttgatgacattatcattaccgaagacaacatcctcaacagcactaccacgtatgactttccgggatctgacgatacatctaaatcattcaagatcaacgctgctcaaacggcaagcaatcctctgcctctatctcttgtcaacaactacaaagctggaataaatgtgtacatcacggggcaggaccagtctggccgaccctgtttcgttggtacaaatggtcaatacatatatcctcaggccgataacactggagtaccattgctgatcactgccgctgtcgagattcccttgggtggcgtcggatcaactaccaacttccagattcctagcagtctgatatctgctcgaatctatttcgctgctggacatctcaaattctatacggtgaaagacggaaacggtgtttccgctattgttcagcccgccgcggtgaaccctcaggatccttccgccggagttcagtggggcttcgtcgagttcaactacgatagtaacactctgtacggcaatatcagcttcgttgactttgtgggcctgcctcttggcatgggcttgactgtcggtggaagtcagcaaattgtccaaggactgacggctggcgctgtcaataacatctgcaatggacttaacagtcagcacaacgcagacggaaaacaatgggatcaactttgccagtcctctggaggccaagcccttcgagttctatcccctaacctgttcatctctgctgatggaagcagattttctggttattacgatcaatatgtcaaccaagtctggtctcaatatacaagccaggacttgatcatcgacactcagactggttctggcaaggtcgcctgccgggcctccggaaaccagatgacctgcgctggcgataatagggcctaccctaagcctacctcggccgatatcttcggttgtaactctggacctttcgctatcattgacagcgataatggcgttcaccgagctgttgtaccacgactttgcgctgcatttgagcgctctacgctgttgctggctggcggaaacgttcagccatcgctccctgcctcatcttactacaccgtcaacccaaccaaccattattcgcgtcttgtacatcaatatgagaccaatgcgattggatatgctttctcgtatgatgatgtcaacccatctggccagaacgctgctggtgagcttgctggagtcaatccgacaaacctcaaattcaccgtcggtggatggtcctaa

SEQ ID NO: 5319 - protein, 443 aa, Muscodor strobelii
  misc_feature: SGI Peptide ID NO. 561485
  misc_feature (1)..(443): NCBI GI: 212526330 Blast Desc: conserved [Penicillium marneffei ATCC 18224] gi|210072720|gb|EEA26807.1| conserved [Penicillium marneffei ATCC 18224]
  misc_feature (1)..(441): NCBI GI: 242780568 Blast Desc: conserved [Talaromyces stipitatus ATCC 10500] gi|218719770|gb|EED19189.1| conserved [Talaromyces stipitatus ATCC 10500]
  misc_feature (1)..(443): NCBI GI: 242774018 Blast Desc: glucan endo-1,3-beta-glucosidase precursor, [Talaromyces stipitatus ATCC 10500] gi|218721977|gb|EED21395.1| glucan endo-1,3-beta-glucosidase precursor, [Talaromyces ATCC
  misc_feature (22)..(440): NCBI GI: 256726304 Blast Desc: NECHADRAFT_94692 [Nectria haematococca mpVI 77-13-4]
  misc_feature (26)..(441): NCBI GI: 46111053 Blast Desc: FG02408.1 [Gibberella zeae PH-1]
  misc_feature (1)..(443): NCBI GI: 212531815 Blast Desc: glucan endo-1,3-beta-glucosidase precursor, [Penicillium marneffei ATCC 18224] gi|210071428|gb|EEA25517.1| glucan endo-1,3-beta-glucosidase precursor, [Penicillium ATCC
  misc_feature (11)..(441): NCBI GI: 261361626 Blast Desc: glucanase B [Verticillium albo-atrum VaMs.102]
  misc_feature (1)..(441): NCBI GI: 255931147 Blast Desc: Pc12g02400 [Penicillium chrysogenum Wisconsin 54-1255] gi|211581749|emb|CAP79867.1| Pc12g02400 [Penicillium chrysogenum Wisconsin 54-1255]
  misc_feature (72)..(441): NCBI GI: 242761177 Blast Desc: conserved [Talaromyces stipitatus ATCC 10500] gi|218723326|gb|EED22743.1| conserved [Talaromyces stipitatus ATCC 10500]
  misc_feature (65)..(441): NCBI GI: 169600283 Blast Desc: SNOG_02972 [Phaeosphaeria nodorum SN15] gi|111068583|gb|EAT89703.1| SNOG_02972 [Phaeosphaeria nodorum SN15]
  misc_feature (130)..(416): SWISSPROT Homolog: EC 3.2.1.39 Glucan endo-1,3-beta-D-glucosidase
MRGLFSLATATWVAALVSQVAGSTIVHPGGVDDIIITEDNILNSTTTYDFPGSDDTSKSFKINAAQTASNPLPLSLVNNYKAGINVYITGQDQSGRPCFVGTNGQYIYPQADNTGVPLLITAAVEIPLGGVGSTTNFQIPSSLISARIYFAAGHLKFYTVKDGNGVSAIVQPAAVNPQDPSAGVQWGFVEFNYDSNTLYGNISFVDFVGLPLGMGLTVGGSQQIVQGLTAGAVNNICNGLNSQHNADGKQWDQLCQSSGGQALRVLSPNLFISADGSRFSGYYDQYVNQVWSQYTSQDLIIDTQTGSGKVACRASGNQMTCAGDNRAYPKPTSADIFGCNSGPFAIIDSDNGVHRAVVPRLCAAFERSTLLLAGGNVQPSLPASSYYTVNPTNHYSRLVHQYETNAIGYAFSYDDVNPSGQNAAGELAGVNPTNLKFTVGGWS

SEQ ID NO: 5320 - DNA, 1603 bp, Muscodor strobelii
  misc_feature: SGI EST ID NO. CUFF.13550.0
  misc_feature: Variant of the nucleotide sequence at SEQ ID NO 5318
tgagacatgaatcaagacatcccaacctcatcccttccttcaacagacgaaagtcacttcaaccttgcaattccgcattgcagatccgtcaggtcttgaccaagtgacatcatgcgtgggctcttcagccttgctacagctacttgggtggcggcccttgtttctcaagtcgctggctcgacgatcgtccacccgggtggtgttgatgacattatcattaccgaagacaacatcctcaacagcactaccacgtatgactttccgggatctgacgatacatctaaatcattcaagatcaacgctgctcaaacggcaagcaatcctctgcctctatctcttgtcaacaactacaaagctggaataaatgtgtacatcacggggcaggaccagtctggccgaccctgtttcgttggtacaaatggtcaatacatatatcctcaggccgataacactggagtaccattgctgatcactgccgctgtcgagattcccttgggtggcgtcggatcaactaccaacttccagattcctagcagtctgatatctgctcgaatctatttcgctgctggacatctcaaattctatacggtgaaagacggaaacggtgtttccgctattgttcagcccgccgcggtgaaccctcaggatccttccgccggagttcagtggggcttcgtcgagttcaactacgatagtaacactctgtacggcaatatcagcttcgttgactttgtgggcctgcctcttggcatgggcttgactgtcggtggaagtcagcaaattgtccaaggactgacggctggcgctgtcaataacatctgcaatggacttaacagtcagcacaacgcagacggaaaacaatgggatcaactttgccagtcctctggaggccaagcccttcgagttctatcccctaacctgttcatctctgctgatggaagcagattttctggttattacgatcaatatgtcaaccaagtctggtctcaatatacaagccaggacttgatcatcgacactcagactggttctggcaaggtcgcctgccgggcctccggaaaccagatgacctgcgctggcgataatagggcctaccctaagcctacctcggccgatatcttcggttgtaactctggacctttcgctatcattgacagcgataatggcgttcaccgagctgttgtaccacgactttgcgctgcatttgagcgctctacgctgttgctggctggcggaaacgttcagccatcgctccctgcctcatcttactacaccgtcaacccaaccaaccattattcgcgtcttgtacatcaatatgagaccaatgcgattggatatgctttctcgtatgatgatgtcaacccatctggccagaacgctgctggtgagcttgctggagtcaatccgacaaacctcaaattcaccgtcggtggatggtcctaaataacatgatttttccgaatgagtcatgtccgattcggggtaaaccatctagtctatgtacgccgagtacactatcagggatatgaaagaggaaaattcttgtatatacttgacacttttggtggccatcgtgtcccatttgaatataattgaaattgag

SEQ ID NO: 5321 - DNA, 2193 bp, Muscodor strobelii
  misc_feature: SGI cDNA ID NO. 561486
  misc_feature: Encodes the peptide sequence at SEQ ID NO 5322
atgcggtttggacagaacttccacagctataccgtccctgaatgggacggttttaatatccaatacgacaaattcaaagacttgatcaagcgcttccccgtaaccaatggcgaaacaatcgaattgagcatgaccgatgcactctcgaaattagagttgttcgagaaaagtctctatctttcgttagaacagcgctacgacatggtttttaaatatcattttgatataaaatttgacaatgtctggccaactttcaatccagatgacagatgctatattcagctggttatctctacactcgagagtgatctacataaagccttttggttcacgcgcgttaactaccatgccgtggatcgcatattttctaagattagcagtcatgcttcccattgtggcgtcgatatcaatgctctttcatcccgatggcgggccgtcaaacattctggcgacatgttcaggaacaagatcaggctgctgatgaattttgcgaccagtgacggtcgctgggggactgatacgtctgtagcctctgttctattacaggtcagccagacccagctggtatatagttccgaccacgcccttattgaggccattgcaaatgactcgcctgagatgcttacagcctatctgagtagtcacgaagatgcactaccgactctttaccagcgtcttttcaagaggctcgcattagggcataagtggctatgcttgaaggctctcttatcgacgtttgccacgcatctagacaatcactgcttagcagttctcttcaactgcattagtatcccaacgcccgatgcttccgagcatcctacagtcgatgtactagcaggcagacgtgacaatgtatctcagattatcggccaattatttacaaatcatcaggagatcatggctcgagtcctacgccaagcagacatcacgggatcaataccactacactacgccctccagaatggcttcgacatttggggctcggctgaaagcattctagacgaagaggcacgtgaatacgtgtttctgggctctttgttagaacttgaccagcatgagctaacaccgctgcatcatggcgtcgttagtggacaaatctcggtcatcagcagcttcttcaacacgatacctgctaagcttatgcgtcaacactcgcatcggatcaaaacaattgtagggtccctgctaactatggcaattaagcttcagtatgatgtgctggtagagaagctggccaagctgatcgatcttgagtgtgtgatctcggggagcccatcgccatttcatttagctgcccaaaccggtcgacgcgattatataaaactcctcatctatattttcgcctctgatcgtcaggtgttgaacattgccgactgtcgtgggcgtactccactgatggacgcctgcgcacgcgctcatactccagtcgcggaagcgcttctcaccgctggagcagatcagtatgcagcagatcgttcaggatggactgcaagaagtatagcgatttaccgaggccatttggcgatggcaaacctcttctcgcagtcaaccaagccacactcggagatgcggcttaatttcaagcctacatcggagtcgaaaccccctttagctacttccattcagaccctggcgagcccaagacgcatgctagtagtctatcttggaagtatgcagctaacaaacagtcaggtgcctgttacattgatagacgtagatagtgataggtctgtcagacagcgtatcccagtgcttcattatctagagctctcagtgaacggatcggatgagcaatgccacaccatcgagattccgattctagaagacacttcaagcaaacctatcatcttcaacttagaggacgacagtcgaccacagcttagagccaaactacgcacgtataagctatcggatgaggtgacgccttctgtcgaggcggtaggagctatctttctagatactaccagattcctctatggcgaaaatcgcgaaagtttgatccgagagcagacaatggtgttgttgagcgttcatgcgcatgagcccattggtactgttctttttacaagcgtaatcgcacaatgcttcggtcatcttcaggagccaatgtctatgccaagtcttgatttgtacggaaatggtagcctaacactaattgggcaccgaggcaagtcgaatttgacagatgagtaa

SEQ ID NO: 5322 - protein, 730 aa, Muscodor strobelii
  misc_feature: SGI Peptide ID NO. 561486
  misc_feature (460)..(492): Pfam Id: PF00023 Pfam Desc: Ankyrin repeat
  misc_feature (1)..(722): NCBI GI: 119177747 Blast Desc: CIMG_07775 [Coccidioides immitis RS]
  misc_feature (1)..(730): NCBI GI: 240107577 Blast Desc: Glycerophosphoryl diester phosphodiesterase family protein [Coccidioides posadasii C735 delta SOWgp]
  misc_feature (1)..(723): NCBI GI: 169783952 Blast Desc: [Aspergillus oryzae RIB40] gi|83775182|dbj|BAE65305.1| protein product [Aspergillus oryzae]
  misc_feature (1)..(727): NCBI GI: 255940538 Blast Desc: Pc16g07040 [Penicillium chrysogenum Wisconsin 54-1255] gi|211585661|emb|CAP93374.1| Pc16g07040 [Penicillium chrysogenum Wisconsin 54-1255]
  misc_feature (1)..(723): NCBI GI: 145251011 Blast Desc: An15g04850 [Aspergillus niger] gi|134082546|emb|CAK42462.1| protein product [Aspergillus niger]
  misc_feature (1)..(730): NCBI GI: 238844075 Blast Desc: glycerophosphodiesterase GDE1 [Microsporum canis CBS 113480]
  misc_feature (88)..(723): NCBI GI: 238493779 Blast Desc: ankyrin repeat-containing protein, [Aspergillus flavus NRRL3357] gi|220696620|gb|EED52962.1| ankyrin repeat-containing protein, [Aspergillus flavus NRRL3357]
  misc_feature (1)..(726): NCBI GI: 258563000 Blast Desc: [Uncinocarpus reesii 1704] gi|237907752|gb|EEP82153.1| [Uncinocarpus reesii 1704]
  misc_feature (298)..(722): NCBI GI: 258576857 Blast Desc: [Uncinocarpus reesii 1704] gi|237902876|gb|EEP77277.1| [Uncinocarpus reesii 1704]
  misc_feature (1)..(723): NCBI GI: 255953879 Blast Desc: Pc21g06470 [Penicillium chrysogenum Wisconsin 54-1255] gi|211589403|emb|CAP95544.1| Pc21g06470 [Penicillium chrysogenum Wisconsin 54-1255]
MRFGQNFHSYTVPEWDGFNIQYDKFKDLIKRFPVTNGETIELSMTDALSKLELFEKSLYLSLEQRYDMVFKYHFDIKFDNVWPTFNPDDRCYIQLVISTLESDLHKAFWFTRVNYHAVDRIFSKISSHASHCGVDINALSSRWRAVKHSGDMFRNKIRLLMNFATSDGRWGTDTSVASVLLQVSQTQLVYSSDHALIEAIANDSPEMLTAYLSSHEDALPTLYQRLFKRLALGHKWLCLKALLSTFATHLDNHCLAVLFNCISIPTPDASEHPTVDVLAGRRDNVSQIIGQLFTNHQEIMARVLRQADITGSIPLHYALQNGFDIWGSAESILDEEAREYVFLGSLLELDQHELTPLHHGVVSGQISVISSFFNTIPAKLMRQHSHRIKTIVGSLLTMAIKLQYDVLVEKLAKLIDLECVISGSPSPFHLAAQTGRRDYIKLLIYIFASDRQVLNIADCRGRTPLMDACARAHTPVAEALLTAGADQYAADRSGWTARSIAIYRGHLAMANLFSQSTKPHSEMRLNFKPTSESKPPLATSIQTLASPRRMLVVYLGSMQLTNSQVPVTLIDVDSDRSVRQRIPVLHYLELSVNGSDEQCHTIEIPILEDTSSKPIIFNLEDDSRPQLRAKLRTYKLSDEVTPSVEAVGAIFLDTTRFLYGENRESLIREQTMVLLSVHAHEPIGTVLFTSVIAQCFGHLQEPMSMPSLDLYGNGSLTLIGHRGKSNLTDE

SEQ ID NO: 5323 - DNA, 577 bp, Muscodor strobelii
  misc_feature: SGI EST ID NO. CUFF.13564.0
  misc_feature: Variant of the nucleotide sequence at SEQ ID NO 5321
gcggaagcgcttctcaccgctggagcagatcagtatgcagcagatcgttcaggatggactgcaagaagtatagcgatttaccgaggccatttggcgatggcaaacctcttctcgcagtcaaccaagccacactcggagatgcggcttaatttcaagcctacatcggagtcgaaaccccctttagctacttccattcagaccctggcgagcccaagacgcatgctagtagtctatcttggaagtatgcagctaacaaacagtcaggtgcctgttacattgatagacgtagatagtgataggtctgtcagacagcgtatcccagtgcttcattatctagagctctcagtgaacggatcggatgagcaatgccacaccatcgagattccgattctagaagacacttcaagcaaacctatcatcttcaacttagaggacgacagtcgaccacagcttagagccaaactacgcacgtataagctatcggatgaggtgacgccttctgtcgaggcggtaggagctatctttctagatactaccagattcctctatggcgaaaatcgcgaaagtttgatccgag

SEQ ID NO: 5324 - DNA, 708 bp, Muscodor strobelii
  misc_feature: SGI cDNA ID NO. 561487
  misc_feature: Encodes the peptide sequence at SEQ ID NO 5325
atgattggtaaaggcaagagtatccgacgcacgcagtcattcagcacagaagctgatctcggtgcgctactcataagagaccgattgaaacacacaattgacttcaaagcgaaagctatgaagcctaatattcgtgggggtgtcattcaagggccacttattactctaccagagctcttccagaaattgccaccttctctaggctttaacatcgagatcaaatacccacgcccccacgaggctcgagaagctggtgttgcgcccgtcgccctcgagatcaacctttttgtagacacgattctagcacaggttcacaaatttgctggaaatcgcccaattattctctcgtcgttcacacctgagatatgcatactccttaaattaaagcagaaagcatatccgattctcttcatttcaaatgccggaaagcttcccgccaacgacctcgagagaagagttgcaagcgtgcaggcaggggtgcactttgcaaagacttggggtctggcaggtctttgcctggcatctgagccgctgatgctagcgccagagctcatcggtgtcgttaaaagagccggtttactgtgcgcttcatatggtggacagaacagcgtcccggaaaacgttcgaatacagagagacgcaggtctcgacatgatcatgatcgataaagtggcgctcatagcgaaggcattgaagcaatcaaaatga

SEQ ID NO: 5325 - protein, 235 aa, Muscodor strobelii
  misc_feature: SGI Peptide ID NO. 561487
  misc_feature (5)..(226): Pfam Id: PF03009 Pfam Desc: Glycerophosphoryl diester phosphodiesterase family
  misc_feature (43)..(226): Pfam Id: PF03009 Pfam Desc: Glycerophosphoryl diester phosphodiesterase family
  misc_feature (3)..(235): NCBI GI: 255940538 Blast Desc: Pc16g07040 [Penicillium chrysogenum Wisconsin 54-1255] gi|211585661|emb|CAP93374.1| Pc16g07040 [Penicillium chrysogenum Wisconsin 54-1255]
  misc_feature (26)..(232): NCBI GI: 238844075 Blast Desc: glycerophosphodiesterase GDE1 [Microsporum canis CBS 113480]
  misc_feature (10)..(235): NCBI GI: 240107577 Blast Desc: Glycerophosphoryl diester phosphodiesterase family protein [Coccidioides posadasii C735 delta SOWgp]
  misc_feature (10)..(232): NCBI GI: 238493779 Blast Desc: ankyrin repeat-containing protein, [Aspergillus flavus NRRL3357] gi|220696620|gb|EED52962.1| ankyrin repeat-containing protein, [Aspergillus flavus NRRL3357]
  misc_feature (9)..(210): NCBI GI: 145251011 Blast Desc: An15g04850 [Aspergillus niger] gi|134082546|emb|CAK42462.1| protein product [Aspergillus niger]
  misc_feature (28)..(235): NCBI GI: 119177747 Blast Desc: CIMG_07775 [Coccidioides immitis RS]
  misc_feature (9)..(216): NCBI GI: 258576857 Blast Desc: [Uncinocarpus reesii 1704] gi|237902876|gb|EEP77277.1| [Uncinocarpus reesii 1704]
  misc_feature (1)..(210): NCBI GI: 171679377 Blast Desc: protein product [Podospora anserina] gi|170939314|emb|CAP64542.1| protein product [Podospora anserina]
  misc_feature (18)..(231): NCBI GI: 145606038 Blast Desc: MGG_06704 [Magnaporthe grisea 70-15] gi|145013778|gb|EDJ98419.1| MGG_06704 [Magnaporthe grisea 70-15]
  misc_feature (9)..(235): NCBI GI: 261201790 Blast Desc: glycerophosphocholine phosphodiesterase Gde1 [Ajellomyces dermatitidis SLH14081] gi|239590206|gb|EEQ72787.1| glycerophosphocholine phosphodiesterase Gde1 [Ajellomyces
  misc_feature (27)..(233): SWISSPROT Homolog: EC 3.1.4.46 Glycerophosphodiester phosphodiesterase
MIGKGKSIRRTQSFSTEADLGALLIRDRLKHTIDFKAKAMKPNIRGGVIQGPLITLPELFQKLPPSLGFNIEIKYPRPHEAREAGVAPVALEINLFVDTILAQVHKFAGNRPIILSSFTPEICILLKLKQKAYPILFISNAGKLPANDLERRVASVQAGVHFAKTWGLAGLCLASEPLMLAPELIGVVKRAGLLCASYGGQNSVPENVRIQRDAGLDMIMIDKVALIAKALKQSK

SEQ ID NO: 5326 - DNA, 1617 bp, Muscodor strobelii
  misc_feature: SGI EST ID NO. CUFF.13568.0
  misc_feature: Variant of the nucleotide sequence at SEQ ID NO 5324
cgacggtcgatcagtataagtatgctagcagtatacagacgactcagggtagcccgctcgttccgcctcaaggacagaccatgattggtaaaggcaagagtatccgacgcacgcagtcattcagcacagaagctgatctcggtgcgctactcataagagaccgattgaaacacacaattgacttcaaagcgaaagctatgaagcctaatattcgtgggggtgtcattcaagggccacttattactctaccagagctcttccagaaattgccaccttctctaggctttaacatcgagatcaaatacccacgcccccacgaggctcgagaagctggtgttgcgcccgtcgccctcgagatcaacctttttgtagacacgattctagcacaggttcacaaatttgctggaaatcgcccaattattctctcgtcgttcacacctgagatatgcatactccttaaattaaagcagaaagcatatccgattctcttcatttcaaatgccggaaagcttcccgccaacgacctcgagagaagagttgcaagcgtgcaggcaggggtgcactttgcaaagacttggggtctggcaggtctttgcctggcatctgagccgctgatgctagcgccagagctcatcggtgtcgttaaaagagccggtttactgtgcgcttcatatggtggacagaacagcgtcccggaaaacgttcgaatacagagagacgcaggtctcgacatgatcatgatcgataaagtggcgctcatagcgaaggcattgaagcaatcaaaatgactctggcaaggaaagcgctgatgcgtcgtcgtatgtctatgtcattgtgataccagtgcaaagttgcatcataaaggacttctgggtcccgttcataatgcatgtagactacagcatagtatgactgtgtcaggcatctcggcggtctgttgctcggacactagtaaaccccatcgaacagtgatgtcgtggaactgtgtgctgaacaacactcctgttccatttatgtcgcgagacagtgttgcatttcgaccagcctgatatcgacactcgcaggattttagaatcagcataacaagacagtacgaatgtgatcgttaggtattaggagcagctgccggagttcatctagccccagtctcattcgtcgacgggcagcaagcgaacaatgacgtacaaaaaatgcgtgctggctcaatccacaagtatcgacaagaaatggggttcgatttgctgcgtgggtgatttcttggttctgggttcctgtcgaggactaattcccgtgcatggcttagatgcgcgatctgtccctgcagaggagtttctgagagtacctgtaagacaattggcctatttaacacatttgcattgtcatgaagttggtaccggactagtttttttttttttttttcctttcttttttttccctttttgtttttttgttgaacataagataggctctgttcggctcctactcggcaacgcgaagaatatatgcaacgccaattatgcaatagcattgtttgcccgaatgacgcatggtctgcaatacatctccatgctctattgacaccatatgtcttattcatcctcaggtggtgggatttcc

SEQ ID NO: 5327 - DNA, 1302 bp, Muscodor strobelii
  misc_feature: SGI cDNA ID NO. 561488
  misc_feature: Encodes the peptide sequence at SEQ ID NO 5328
atgccagaacggccattcagggtcttgattattggtgctggacctgttgggctgtatctggctcatgcgctgagctccgctcagattgactgtcttgtacttgagcaacgttcttcggtcgtcttcaactctggtgcgtcaattctcatttggcctcatggagcccgccttctcgatcaaatcggactgttcaccaggatccaagaatcctctacggtcatgaaaacgaaaaccaatttgctaaaaaacggccgcgtcatatcctcgtacccgatgttccaattgcttcaagagcaccattcctatcctgtcctggctttgtcccggcgagaactgtcatgtatcctgtacgaagaacttcccaaccgcgcacatcatgtcaaacccggctcctctgtgcaagatataaagatcgtagagggaggtgttgaggctcacatggccgatggcacctgtgagtggggatctatcatcatcggtgcggacggagttcacagcaagacgagagacatcctctatgcgatggccatgacgtctgggccaccgctacgtcctatggtcgcgggattttacggaatatatggcacagcaccctacaattttgcactggagagtgggactctatacgagacgagaggcagtggtattgctatccagatcattgtaggcccagagagactgtccttttgtttactcagacccttgcccaatccaacttctgagcgcgtacggtttactccatctgaaatggacgaatttgcccaaggcttcaatgcagtttgtatcgcccccggcctcaaattccaagacgtctgggcagtggccgagaaagactcagcgagactagttgctcaagaagagggtttaagtcagctctggtactcctctcatgtcgctttgttaggcgattcagttcacaagatgactagcctcaatggccttgggttcaactgtgggattaattctgccgctgttctggcaagcgagcttcaaagatcggtaacttcaaatccaaacccatcgtcccaggagcttgatagagcttttcaccgatacaagacattccgcctcagggaggccaccgctctccaccatcatggctacatcacgacgcggagggtagcatggatctcttggaccgactggttggtcgatcgcgtcataaccccgtggttcagcacggagaggatcatgaattacatctacccaatggtcaggagcggacagattctgtcatacgttccgtttaaaggacgagagggccggattccctggagaagggtgccagatgttcggctgtag

SEQ ID NO: 5328 - protein, 433 aa, Muscodor strobelii
  misc_feature: SGI Peptide ID NO. 561488
  misc_feature (5)..(367): Pfam Id: PF01494 Pfam Desc: FAD binding domain
  misc_feature (7)..(37): Pfam Id: PF01266 Pfam Desc: FAD dependent oxidoreductase
  misc_feature (5)..(39): Pfam Id: PF01494 Pfam Desc: FAD binding domain
  misc_feature (6)..(427): NCBI GI: 226885243 Blast Desc: dehydrogenase / monooxygenase [Sordaria macrospora]
  misc_feature (6)..(427): NCBI GI: 85119265 Blast Desc: NCU02925 [Neurospora crassa OR74A] gi|28927418|gb|EAA36371.1| [Neurospora crassa OR74A]
  misc_feature (6)..(412): NCBI GI: 145602534 Blast Desc: MGG_10908 [Magnaporthe grisea 70-15] gi|145010942|gb|EDJ95598.1| MGG_10908 [Magnaporthe grisea 70-15]
  misc_feature (5)..(425): NCBI GI: 145234591 Blast Desc: An03g00370 [Aspergillus niger] gi|134057615|emb|CAK38015.1| protein product [Aspergillus niger]
  misc_feature (25)..(431): NCBI GI: 145606566 Blast Desc: MGG_02256 [Magnaporthe grisea 70-15] gi|145014185|gb|EDJ98826.1| MGG_02256 [Magnaporthe grisea 70-15]
  misc_feature (1)..(426): NCBI GI: 256734858 Blast Desc: NECHADRAFT_75548 [Nectria haematococca mpVI 77-13-4]
  misc_feature (1)..(425): NCBI GI: 189197565 Blast Desc: FAD binding domain containing protein [Pyrenophora tritici-repentis Pt-1C-BFP] gi|187981068|gb|EDU47694.1| FAD binding domain containing protein [Pyrenophora tritici-repentis
  misc_feature (4)..(426): NCBI GI: 255953399 Blast Desc: Pc21g04040 [Penicillium chrysogenum Wisconsin 54-1255] gi|211589163|emb|CAP95301.1| Pc21g04040 [Penicillium chrysogenum Wisconsin 54-1255]
  misc_feature (1)..(425): NCBI GI: 116179230 Blast Desc: CHGG_00243 [Chaetomium globosum CBS 148.51] gi|88184540|gb|EAQ92008.1| CHGG_00243 [Chaetomium globosum CBS 148.51]
  misc_feature (3)..(433): NCBI GI: 240105427 Blast Desc: FAD dependent oxidoreductase domain containing protein [Coccidioides posadasii C735 delta SOWgp]
  misc_feature (8)..(348): SWISSPROT Homolog: EC 1.14.13.24 3-hydroxybenzoate 6-monooxygenase
MPERPFRVLIIGAGPVGLYLAHALSSAQIDCLVLEQRSSVVFNSGASILIWPHGARLLDQIGLFTRIQESSTVMKTKTNLLKNGRVISSYPMFQLLQEHHSYPVLALSRRELSCILYEELPNRAHHVKPGSSVQDIKIVEGGVEAHMADGTCEWGSIIIGADGVHSKTRDILYAMAMTSGPPLRPMVAGFYGIYGTAPYNFALESGTLYETRGSGIAIQIIVGPERLSFCLLRPLPNPTSERVRFTPSEMDEFAQGFNAVCIAPGLKFQDVWAVAEKDSARLVAQEEGLSQLWYSSHVALLGDSVHKMTSLNGLGFNCGINSAAVLASELQRSVTSNPNPSSQELDRAFHRYKTFRLREATALHHHGYITTRRVAWISWTDWLVDRVITPWFSTERIMNYIYPMVRSGQILSYVPFKGREGRIPWRRVPDVRL

SEQ ID NO: 5329 - DNA, 774 bp, Muscodor strobelii
  misc_feature: SGI cDNA ID NO. 561489
  misc_feature: Encodes the peptide sequence at SEQ ID NO 5330
atgcccctcattaccggcgaccatgagttggcccatgacccgacgcgacttggtactcatggatcctattcattgcgacgatgcagtgtagagcatgccaacctctgggtcgagttcagcattcccaagtcgatcgtcaacacccagcacatgcagcagtcccaatcaccccttgtcaatatctctcccgagattttgaccatcatgtatgacaacatgggtcccatggagctgctctgtatcgcactcacttgcaagaagcttctggcccaacgagccgagctcaacgagcacaacaagctcaagactctcaagatcccctctgtcaccctccatcacccgaccccggctagttccgaagagaactacgtttccagtgacaacggagaggctagtgacaatgaagaagtcagcgacgacgactacgatggcactgaggtcgttgattctgattccggtctcgagggaagtttcggttgcgagggttacgatatggagatgtctgagtatgacgaagagaaggaagagtctcgagtgcttgagtattccgaggccagcaaggacagtcaagacatggatgctgacagctgcggcgccgtcttcgagctcttgcaacttgttgcacctcgtctgtcttccctcttagacgtcaccaattcaggcaatgggtattcggccacgctgtgcactgtttgttggggatctgatgtttcagggaagcacaattgtacgggcggcgaatgttgcgatcagctgtctttgggccagagttga

SEQ ID NO: 5330 - protein, 257 aa, Muscodor strobelii
  misc_feature: SGI Peptide ID NO. 561489
MPLITGDHELAHDPTRLGTHGSYSLRRCSVEHANLWVEFSIPKSIVNTQHMQQSQSPLVNISPEILTIMYDNMGPMELLCIALTCKKLLAQRAELNEHNKLKTLKIPSVTLHHPTPASSEENYVSSDNGEASDNEEVSDDDYDGTEVVDSDSGLEGSFGCEGYDMEMSEYDEEKEESRVLEYSEASKDSQDMDADSCGAVFELLQLVAPRLSSLLDVTNSGNGYSATLCTVCWGSDVSGKHNCTGGECCDQLSLGQS

SEQ ID NO: 5331 - DNA, 1389 bp, Muscodor strobelii
  misc_feature: SGI cDNA ID NO. 561490
  misc_feature: Encodes the peptide sequence at SEQ ID NO 5332
atgctctatcgtgttcttcagagaaggtggcagtcatccactggaaagacaccaaatccgaacgagtcgaaaccagagtcgcaaccgccactgccgtccaagacccttgtccttagagcattacgccagggcctagcgttcagaccactattcaatcactaccgcggcaagaacttgcgtaatctcttccgtcagagtccggaggaacttgttctcgcctttgccattcttgcattttgcgcaggtgccatagtctatgtgatttattcctacttcacctacttccaatccaagcagttcactgttttcccacccgaaatcgccaaatccatgcgtcgcgcactatactacacaaactacggaccagatgccaaactggcccataaatactacactcttgctctagagcaatgcaaagaacacggcttggatccgttctctgatgaagtaatgggtattcggatccaagttgccgcctggctagaaaaaattgggaaatatgagaacgccatcgatgttttagagaaactccttaccgcttgcaaggaatgggtcgaggcgatggagaaaagcgcgaaggacgggctaattgacaatgaaggacgaccattaggctcattgaaggcggaagccgaggcgcggagaccacccgaagccgccggcgaagagctagtcttacccgagaacttgtgggctaaacgaagccgtgtcctcggtaaatccgtagggattagtgtgaaaattggcgaactctgtgccgatgaacacgtacttcagggcgatgcggcaggcgaacacctaatctgggccgttgaaacggtgctgaaagagatgcagcgccgtcaggtcgagggcgtgagggaagcggagggtgattggatgacgcaagaacagattggaggtgctcttgaagctctcgccaatcactatgaatcaaaatcgcagcattatcttgccgcgcccttatacttgcaggccaccacactgtcgccgcccaataactgccacactgctgtcttgatgaataatcttgccatctctcttgcgcaacaacctgttcaaacccctatccagggattgccagctccaggagcggaccaggcgccgactcgagccaccctactttccagcgcacgcgcgtgggctttacaagcattatcaactacagagaggatcatgggtgagaacaggaccgaggagtgtgacgaagcttgcgctgtagcaatgtgtaatcttgctgacatcgccacgatgaccggtgatacccaagaggcgaaacgacgcttcaacgaaagccttgctctgagcaagaaaattggtttcacgcctggagtcacgcaggctcaagagggcctcaaacgaatcgcatctacgcctacgaaggcttga

SEQ ID NO: 5332 - protein, 462 aa, Muscodor strobelii
  misc_feature: SGI Peptide ID NO. 561490
  misc_feature (20)..(455): NCBI GI: 46137287 Blast Desc: FG10159.1 [Gibberella zeae PH-1]
  misc_feature (6)..(457): NCBI GI: 261351813 Blast Desc: TPR domain-containing protein [Verticillium albo-atrum VaMs.102]
  misc_feature (4)..(458): NCBI GI: 85101539 Blast Desc: NCU04212 [Neurospora crassa OR74A] gi|21622358|emb|CAD36989.1| conserved [Neurospora crassa] gi|28922712|gb|EAA31936.1| [Neurospora crassa OR74A]
  misc_feature (21)..(461): NCBI GI: 145612673 Blast Desc: MGG_12397 [Magnaporthe grisea 70-15] gi|145019811|gb|EDK04039.1| MGG_12397 [Magnaporthe grisea 70-15]
  misc_feature (4)..(455): NCBI GI: 154310433 Blast Desc: BC1G_07137 [Botryotinia fuckeliana B05.10] gi|150851468|gb|EDN26661.1| BC1G_07137 [Botryotinia fuckeliana B05.10]
  misc_feature (58)..(439): NCBI GI: 171691949 Blast Desc: protein product [Podospora anserina] gi|170945923|emb|CAP72724.1| protein product [Podospora anserina]
  misc_feature (72)..(458): NCBI GI: 189191418 Blast Desc: conserved [Pyrenophora tritici-repentis Pt-1C-BFP] gi|187973654|gb|EDU41153.1| conserved [Pyrenophora tritici-repentis Pt-1C-BFP]
  misc_feature (125)..(458): NCBI GI: 156056070 Blast Desc: SS1G_05387 [Sclerotinia sclerotiorum 1980] gi|154703171|gb|EDO02910.1| SS1G_05387 [Sclerotinia sclerotiorum 1980]
  misc_feature (44)..(455): NCBI GI: 169622276 Blast Desc: SNOG_14357 [Phaeosphaeria nodorum SN15] gi|111057108|gb|EAT78228.1| SNOG_14357 [Phaeosphaeria nodorum SN15]
  misc_feature (47)..(455): NCBI GI: 258567466 Blast Desc: [Uncinocarpus reesii 1704] gi|237905923|gb|EEP80324.1| [Uncinocarpus reesii 1704]
MLYRVLQRRWQSSTGKTPNPNESKPESQPPLPSKTLVLRALRQGLAFRPLFNHYRGKNLRNLFRQSPEELVLAFAILAFCAGAIVYVIYSYFTYFQSKQFTVFPPEIAKSMRRALYYTNYGPDAKLAHKYYTLALEQCKEHGLDPFSDEVMGIRIQVAAWLEKIGKYENAIDVLEKLLTACKEWVEAMEKSAKDGLIDNEGRPLGSLKAEAEARRPPEAAGEELVLPENLWAKRSRVLGKSVGISVKIGELCADEHVLQGDAAGEHLIWAVETVLKEMQRRQVEGVREAEGDWMTQEQIGGALEALANHYESKSQHYLAAPLYLQATTLSPPNNCHTAVLMNNLAISLAQQPVQTPIQGLPAPGADQAPTRATLLSSARAWALQALSTTERIMGENRTEECDEACAVAMCNLADIATMTGDTQEAKRRFNESLALSKKIGFTPGVTQAQEGLKRIASTPTKA

SEQ ID NO: 5333 - DNA, 2276 bp, Muscodor strobelii
  misc_feature: SGI EST ID NO. CUFF.13684.1
  misc_feature: Variant of the nucleotide sequence at SEQ ID NO 5331
cagatgaacatgcgatgcatgaggcgagtcataatcttaatagagttcaagcgcactcaccatcggcctgggccaattcctctaatgtaatcggatcgtccttcggagggtcgagatcgacgggcactttgggtgcgaacttgccagacattgcgctagtgttcatgagattttgtgaaaatacaaggatggcaaaattgtcgcagactcagatccgtatgaaattaaagccgcggagggctgatcaatgaagctgctttaagatgaattcaaagtatcacaattcgtcatcggtgctgtggaagcacgatatgccacatggtggaggggcaacttgctaccaaactttggtgggggccgaggcttagtggctggaagggttcccaccagctggcatcatcttttggcatccgtcatcgacctcgtcatatcaaacttcgattgtcgcgtcgccgtcacgttgtcgcatccagcatttcaagctctatttccacctttttacatcaccgcacatttcaaaatctgtaacacgactgcgaaaatacacgtgaacatttccgcaatgtctgcatgtcgcagcggcatgcgacagccggtcattggcgggcttcaagctctatgtcccagaagccctgcagtattgaggtcaccgctgagctattcgataaggcaaagaaatcctaggtgcatagataaggatgttcgcatgctctatcgtgttcttcagagaaggtggcagtcatccactggaaagacaccaaatccgaacgagtcgaaaccagagtcgcaaccgccactgccgtccaagacccttgtccttagagcattacgccagggcctagcgttcagaccactattcaatcactaccgcggcaagaacttgcgtaatctcttccgtcagagtccggaggaacttgttctcgcctttgccattcttgcattttgcgcaggtgccatagtctatgtgatttattcctacttcacctacttccaatccaagcagttcactgttttcccacccgaaatcgccaaatccatgcgtcgcgcactatactacacaaactacggaccagatgccaaactggcccataaatactacactcttgctctagagcaatgcaaagaacacggcttggatccgttctctgatgaagtaatgggtattcggatccaagttgccgcctggctagaaaaaattgggaaatatgagaacgccatcgatgttttagagaaactccttaccgcttgcaaggaatgggtcgaggcgatggagaaaagcgcgaaggacgggctaattgacaatgaaggacgaccattaggctcattgaaggcggaagccgaggcgcggagaccacccgaagccgccggcgaagagctagtcttacccgagaacttgtgggctaaacgaagccgtgtcctcggtaaatccgtagggattagtgtgaaaattggcgaactctgtgccgatgaacacgtacttcagggcgatgcggcaggcgaacacctaatctgggccgttgaaacggtgctgaaagagatgcagcgccgtcaggtcgagggcgtgagggaagcggagggtgattggatgacgcaagaacagattggaggtgctcttgaagctctcgccaatcactatgaatcaaaatcgcagcattatcttgccgcgcccttatacttgcaggccaccacactgtcgccgcccaataactgccacactgctgtcttgatgaataatcttgccatctctcttgcgcaacaacctgttcaaacccctatccagggattgccagctccaggagcggaccaggcgccgactcgagccaccctactttccagcgcacgcgcgtgggctttacaagcattatcaactacagagaggatcatgggtgagaacaggaccgaggagtgtgacgaagcttgcgctgtagcaatgtgtaatcttgctgacatcgccacgatgaccggtgatacccaagaggcgaaacgacgcttcaacgaaagccttgctctgagcaagaaaattggtttcacgcctggagtcacgcaggctcaagagggcctcaaacgaatcgcatctacgcctacgaaggcttgatcgatgtttgtattaatacgagacacaagttcccatgcacgatctgtgcgacttgctcggaaatgagggcacaacttagtctattgtattaatatgtagaataaataactgatgcctccgacgaaataatttagagtcaagatcaatatatatctttcggagtcttgcaaccccctttccg

SEQ ID NO: 5334 - DNA, 366 bp, Muscodor strobelii
  misc_feature: SGI cDNA ID NO. 561491
  misc_feature: Encodes the peptide sequence at SEQ ID NO 5335
atgtctggcaagttcgcacccaaagtgcccgtcgatctcgaccctccgaaggacgatccgattacattagaggaattggcccaggccgatggtcttccagggaacaaagcatatgtcgccattaagggcaaggtatacgatgtcacaggtaaagatatgtatcagcagggcggctcatatcacgtattcgccggtaaagacgcttcccgagctcttgccaagacatctacaaagcccgaagacgtgaaacccgagtggcacgatttgggcgacaaggagaagggcgtgctgaatgactggatcacattcttttcaaaacgctacaatattgttggtgtagtccagggtgctacgaatatggagtag

SEQ ID NO: 5335 - protein, 121 aa, Muscodor strobelii
  misc_feature: SGI Peptide ID NO. 561491
  misc_feature (20)..(115): Pfam Id: PF00173 Pfam Desc: Cytochrome b5-like Heme/Steroid binding domain
  misc_feature (1)..(121): NCBI GI: 85101543 Blast Desc: NCU04213 [Neurospora crassa OR74A] gi|21622359|emb|CAD36990.1| conserved [Neurospora crassa] gi|28922713|gb|EAA31937.1| [Neurospora crassa OR74A]
  misc_feature (1)..(121): NCBI GI: 261351814 Blast Desc: progesterone binding protein [Verticillium albo-atrum VaMs.102]
  misc_feature (1)..(121): NCBI GI: 46137289 Blast Desc: FG10160.1 [Gibberella zeae PH-1]
  misc_feature (1)..(121): NCBI GI: 156056068 Blast Desc: conserved [Sclerotinia sclerotiorum 1980] gi|154703170|gb|EDO02909.1| conserved [Sclerotinia sclerotiorum 1980]
  misc_feature (1)..(121): NCBI GI: 171691947 Blast Desc: protein product [Podospora anserina] gi|170945922|emb|CAP72723.1| protein product [Podospora anserina]
  misc_feature (1)..(121): NCBI GI: 145612671 Blast Desc: MGG_12396 [Magnaporthe grisea 70-15] gi|145019810|gb|EDK04038.1| MGG_12396 [Magnaporthe grisea 70-15]
  misc_feature (1)..(119): NCBI GI: 115398369 Blast Desc: conserved [Aspergillus terreus NIH2624] gi|114192967|gb|EAU34667.1| conserved [Aspergillus terreus NIH2624]
  misc_feature (1)..(119): NCBI GI: 261193244 Blast Desc: progesterone binding protein [Ajellomyces dermatitidis SLH14081] gi|239589163|gb|EEQ71806.1| progesterone binding protein [Ajellomyces dermatitidis SLH14081]
  misc_feature (4)..(119): NCBI GI: 121706510 Blast Desc: progesterone binding protein, [Aspergillus clavatus NRRL 1] gi|119399665|gb|EAW10091.1| progesterone binding protein, [Aspergillus clavatus NRRL 1]
  misc_feature (2)..(119): NCBI GI: 67528246 Blast Desc: AN4329.2 [Aspergillus nidulans FGSC A4] gi|40741300|gb|EAA60490.1| AN4329.2 [Aspergillus nidulans FGSC A4] gi|259482864|tpe|CBF77749.1| TPA: progesterone binding FGSC
MSGKFAPKVPVDLDPPKDDPITLEELAQADGLPGNKAYVAIKGKVYDVTGKDMYQQGGSYHVFAGKDASRALAKTSTKPEDVKPEWHDLGDKEKGVLNDWITFFSKRYNIVGVVQGATNME

SEQ ID NO: 5336 - DNA, 1468 bp, Muscodor strobelii
  misc_feature: SGI EST ID NO. CUFF.13683.2
  misc_feature: Variant of the nucleotide sequence at SEQ ID NO 5334
aaaagatcgttcagcatacatggcaaaggcgagaacaagttcctccggactctgacggaagagattacgcaagttcttgccgcggtagtgattgaatagtggtctgaacgctaggccctggcgtaatgctctaaggacaagggtcttggacggcagtggcggttgcgactctggtttcgactcgttcggatttggtgtctttccagtggatgactgccaccttctctgaagaacacgatagagcatgcgaacatccttatctatgcacctaggatttctttgccttatcgaatagctcagcggtgacctcaatactgcagggcttctgggacatagagcttgaagcccgccaatgaccggctgtcgcatgccgctgcgacatgcagacattgcggaaatgttcacgtgtattttcgcagtcgtgttacagattttgaaatgtgcggtgatgtaaaaaggtggaaatagagcttgaaatgctggatgcgacaacgtgacggcgacgcgacaatcgaagtttgatatgacgaggtcgatgacggatgccaaaagatgatgccagctggtgggaacccttccagccactaagcctcggcccccaccaaagtttggtagcaagttgcccctccaccatgtggcatatcgtgcttccacagcaccgatgacgaattgtgatactttgaattcatcttaaagcagcttcattgatcagccctccgcggctttaatttcatacggatctgagtctgcgacaattttgccatccttgtattttcacaaaatctcatgaacactagcgcaatgtctggcaagttcgcacccaaagtgcccgtcgatctcgaccctccgaaggacgatccgattacattagaggaattggcccaggccgatggtcttccagggaacaaagcatatgtcgccattaagggcaaggtatacgatgtcacaggtaaagatatgtatcagcagggcggctcatatcacgtattcgccggtaaagacgcttcccgagctcttgccaagacatctacaaagcccgaagacgtgaaacccgagtggcacgatttgggcgacaaggagaagggcgtgctgaatgactggatcacattcttttcaaaacgctacaatattgttggtgtagtccagggtgctacgaatatggagtagacaaatcaaggcaatttcaaataaattttcaacacaatccaatgaaccatgccattagcaatatcgtgaggtgaaggggaggatccggtcgtcatctacctgaaaggtcttctcatgcaacataagacagatctatcagatcatctaataggagtgagaatggaaacttagctcgatctggcgtgagtctacaatacccgtcaatcgctcttcattatcatcgggtagtcgtcttcgatgcacgtagtataggatacaatcaatgcaaaacctggagcgcagttgaatcattacattgtcc

SEQ ID NO: 5337 - DNA, 2346 bp, Muscodor strobelii
  misc_feature: SGI cDNA ID NO. 561492
  misc_feature: Encodes the peptide sequence at SEQ ID NO 5338
atgtcacacaaccactttgcattggacttgactggtcctggccaggatatgtcccattatgttccgcggccgcagtccattgaaatgccttccgagtacgaccaacagaccggtctaccttcggacggccatctgaatttctcgcctacttctcagacatccgataagaaccctatcgctcggttctacatgaataatgacggcccatggcatccgctcgttgatggcactgttcctcctaggccggaccaatttgatgccgaggcttcgggacggccaagtttaatcaactccgaactcgactctggctatggtagctatgcgcagcttcgtcatagtgtgacgaatgggtctgtttgtgatgagaccctggataccaactttgatgagcagagcatgatatattccgtgcaaggctcgtccttttctgtgccggatgcgtggcagcagcgtcaaaggcaaccggcattcgagactcctattcagtttgaccaaatgaaatgccctacctgtagcaagaacgtgcggactaaatccgagctcaagaagcacactcagcgacacacgaaaccattcaagtgcgatgttgaagattgccagcgtcacaccgaaggcttcagtactatcaacgacctggaccggcataaaaggagtgtacatcccaacgcgcaagtggttggcaaccgttatcgttgcactttgggtgcttgtaagactaaagtcaagatatggccaagagcggataacttcaaagctcatctcaaacgacttcaccagaaagatagtcctacagacgatgaactcaatggcttcctgtacaaatcttcatcgtctcctgacgaccaagagacgcagtccgtgtatagcgaatgtactaatactacatacggtccatcgaatacctggtcgcaatttgagtcatcccagaaaatgaattcgacctcgaatttaagtcagggacacaccgggccgagcatgtccttgtcgagtccacaccaggacgccaatgacatgtccgtctcaatgtctggggtcatgtcgcgccaagagtcatatccaaatgtcatcagtccagagtctcagaacaacgcgatgtcatcaatgccagcatcggcggtagaaaatagccaactacctaagaactcaaatatgtccgaaataggtgcagcgctgcaatcgaatactacgtcaaatcaggcacaattttatcagaacggcgtttccagttcttacacttcccagcctgtcacatcgagcgactcgaatcaatatcagaatgctaccaacgaatcagtacaggccgggttcgaagcaagtacaggatatgattcattgccaagtccaatgacaactgtaaactcttcacagcccaacgaaagccaagtttcgctgaacattgacgatcctgctgccgtcagggagctgctcttgaaattacaaaccaaaggcatgctcgcacagttctcattgaaagaggatattattggagcatcaaatccaccgccacctgcagaggtacggaaagacgacagtcgtatggacggccacgcctgtatgatctgcagtaaagtctttccacgaaggtgtgaactcaaaaaacacgaaaagcgacacaagaaaccatacggctgcactcaacccgattgcgacaaaagattcgggagtaagaatgactggaaacggcatgaaaacactcaacatttcatgctagaatcatggcgttgcgaagaaaaaaagagcaatttcgagaatgagctatgcgaacgggtctgctaccggaaagaaaatttcaagaatcaccttgaagtcgaacacgggattaccgatcaacacgccttggagcgaaagatggagaaatgtcgggttggtcggaattccgaggctcggttctggtgcggattttgtgagaagatcgtcgaaatcaaacacaagaatatgcaaccttgggtggagcgcttcaaccacattgacgaacactttaccggcaaaaatcggcgaccagcgcaagagattggcgaatggaagaatttcgattcgacgcaacccaagaagggctcacctcaagatgattctgacggtatcagcgatgttggtgttgtgaacttggaagcgcctgttgcgagaccaaaacaacaagaggccactttcaactcttccttctcggatccgggaaatcccaaatcaaaacgcaagcgggacgaaagtatcaatgctagtggagcgaggaaagttaaacaaacaaaccagggagctggtcgcagactctgttgtcattgcggagatatcataacgattgcacaagcccagtgcctttgtgaacacgtaccgtgcatgcattgtcgttga

SEQ ID NO: 5338 - protein, 781 aa, Muscodor strobelii
  misc_feature: SGI Peptide ID NO. 561492
  misc_feature (166)..(188): Pfam Id: PF00096 Pfam Desc: Zinc finger, C2H2 type
  misc_feature (67)..(678): NCBI GI: 256732156 Blast Desc: NECHADRAFT_41232 [Nectria haematococca mpVI 77-13-4]
  misc_feature (101)..(674): NCBI GI: 46137291 Blast Desc: FG10161.1 [Gibberella zeae PH-1]
  misc_feature (161)..(674): NCBI GI: 115490999 Blast Desc: [Aspergillus terreus NIH2624] gi|114196987|gb|EAU38687.1| [Aspergillus terreus NIH2624]
  misc_feature (64)..(674): NCBI GI: 119484146 Blast Desc: C2H2 type zinc finger domain protein [Neosartorya fischeri NRRL 181] gi|119410132|gb|EAW20079.1| C2H2 type zinc finger domain protein [Neosartorya fischeri NRRL 181]
  misc_feature (518)..(781): NCBI GI: 156056074 Blast Desc: SS1G_05389 [Sclerotinia sclerotiorum 1980] gi|154703173|gb|EDO02912.1| SS1G_05389 [Sclerotinia sclerotiorum 1980]
  misc_feature (518)..(781): NCBI GI: 154310439 Blast Desc: BC1G_07140 [Botryotinia fuckeliana B05.10] gi|150851471|gb|EDN26664.1| BC1G_07140 [Botryotinia fuckeliana B05.10]
  misc_feature (169)..(674): NCBI GI: 258575603 Blast Desc: [Uncinocarpus reesii 1704] gi|237902249|gb|EEP76650.1| [Uncinocarpus reesii 1704]
  misc_feature (460)..(780): NCBI GI: 116180050 Blast Desc: CHGG_00653 [Chaetomium globosum CBS 148.51] gi|88184950|gb|EAQ92418.1| CHGG_00653 [Chaetomium globosum CBS 148.51]
  misc_feature (453)..(675): NCBI GI: 164425328 Blast Desc: NCU04628 [Neurospora crassa OR74A] gi|157070883|gb|EAA28649.2| [Neurospora crassa OR74A]
  misc_feature (453)..(675): NCBI GI: 21622522 Blast Desc: [Neurospora crassa]
MSHNHFALDLTGPGQDMSHYVPRPQSIEMPSEYDQQTGLPSDGHLNFSPTSQTSDKNPIARFYMNNDGPWHPLVDGTVPPRPDQFDAEASGRPSLINSELDSGYGSYAQLRHSVTNGSVCDETLDTNFDEQSMIYSVQGSSFSVPDAWQQRQRQPAFETPIQFDQMKCPTCSKNVRTKSELKKHTQRHTKPFKCDVEDCQRHTEGFSTINDLDRHKRSVHPNAQVVGNRYRCTLGACKTKVKIWPRADNFKAHLKRLHQKDSPTDDELNGFLYKSSSSPDDQETQSVYSECTNTTYGPSNTWSQFESSQKMNSTSNLSQGHTGPSMSLSSPHQDANDMSVSMSGVMSRQESYPNVISPESQNNAMSSMPASAVENSQLPKNSNMSEIGAALQSNTTSNQAQFYQNGVSSSYTSQPVTSSDSNQYQNATNESVQAGFEASTGYDSLPSPMTTVNSSQPNESQVSLNIDDPAAVRELLLKLQTKGMLAQFSLKEDIIGASNPPPPAEVRKDDSRMDGHACMICSKVFPRRCELKKHEKRHKKPYGCTQPDCDKRFGSKNDWKRHENTQHFMLESWRCEEKKSNFENELCERVCYRKENFKNHLEVEHGITDQHALERKMEKCRVGRNSEARFWCGFCEKIVEIKHKNMQPWVERFNHIDEHFTGKNRRPAQEIGEWKNFDSTQPKKGSPQDDSDGISDVGVVNLEAPVARPKQQEATFNSSFSDPGNPKSKRKRDESINASGARKVKQTNQGAGRRLCCHCGDIITIAQAQCLCEHVPCMHCR

SEQ ID NO: 5339 - DNA, 4110 bp, Muscodor strobelii
  misc_feature: SGI EST ID NO. CUFF.13613.0
  misc_feature: Variant of the nucleotide sequence at SEQ ID NO 5337
gccagatgatgcaggttcttagtacgatcgttgaggttaggtgcaaacagcgatgcttggtagaacgggtggaatgacgatgtggctgtgctgtattacaggtatcattgacctatccggaatcccctgtagatctccaacagcggtcgtgcggtccgcctcacttttgccttgtggttgccttgttcttggcgtcgcgccaatagagccaacatagacctctgcttccccattcccgtgcgtccgcccaccgaacaatgccacaatcccatcctcttgacccctccgtcggcgtcagcacatccgtcatcgccttttccctcttctttgctttcataatttgcttatttgacttccagtagtcgacttcgacatttccgctccgctagctggatcgaagaaaacagttcttgggagctgtttgtcgcgtagcgccttgggctttttggttgcgaccggggcatctatcgagtccatacctggaggctccgctgcattcttggccggccgccattccatattcgtgggaggtaaccaggactccgactaccctctaccatttttggcgaccgagtgaattaaaccctgataacatcacatactttgctgcacgattctagtcgctttcattggattcacagcgtcactggatatattggccgcgacaaattttgcaggtgattgatacttacctatagctgtggacggaagtgtctcgggcttgaagattccctagctgtatggacgacctccctcatgatgacaacgattataatgcacggtgcagtaattcactaatattcgaactacttcgctatataatctgaagatcggatcatcgcgtgcgaaaagtgtacgagtgtgcctgttaccgaccatccgattgatcgctcgctttgggatagtgacacctctagttgacatcttgggcatcgcggagttctcgaattgtatttggaaaggtcgacatatcggtgtcgtcaacgacagtgcaagatgtcacacaaccactttgcattggacttgactggtcctggccaggatatgtcccattatgttccgcggccgcagtccattgaaatgccttccgagtacgaccaacagaccggtctaccttcggacggccatctgaatttctcgcctacttctcagacatccgataagaaccctatcgctcggttctacatgaataatgacggcccatggcatccgctcgttgatggcactgttcctcctaggccggaccaatttgatgccgaggcttcgggacggccaagtttaatcaactccgaactcgactctggctatggtagctatgcgcagcttcgtcatagtgtgacgaatgggtctgtttgtgatgagaccctggataccaactttgatgagcagagcatgatatattccgtgcaaggctcgtccttttctgtgccggatgcgtggcagcagcgtcaaaggcaaccggcattcgagactcctattcagtttgaccaaatgaaatgccctacctgtagcaagaacgtgcggactaaatccgagctcaagaagcacactcagcgacacacgaaaccattcaagtgcgatgttgaagattgccagcgtcacaccgaaggcttcagtactatcaacgacctggaccggcataaaaggagtgtacatcccaacgcgcaagtggttggcaaccgttatcgttgcactttgggtgcttgtaagactaaagtcaagatatggccaagagcggataacttcaaagctcatctcaaacgacttcaccagaaagatagtcctacagacgatgaactcaatggcttcctgtacaaatcttcatcgtctcctgacgaccaagagacgcagtccgtgtatagcgaatgtactaatactacatacggtccatcgaatacctggtcgcaatttgagtcatcccagaaaatgaattcgacctcgaatttaagtcagggacacaccgggccgagcatgtccttgtcgagtccacaccaggacgccaatgacatgtccgtctcaatgtctggggtcatgtcgcgccaagagtcatatccaaatgtcatcagtccagagtctcagaacaacgcgatgtcatcaatgccagcatcggcggtagaaaatagccaactacctaagaactcaaatatgtccgaaataggtgcagcgctgcaatcgaatactacgtcaaatcaggcacaattttatcagaacggcgtttccagttcttacacttcccagcctgtcacatcgagcgactcgaatcaatatcagaatgctaccaacgaatcagtacaggccgggttcgaagcaagtacaggatatgattcattgccaagtccaatgacaactgtaaactcttcacagcccaacgaaagccaagtttcgctgaacattgacgatcctgctgccgtcagggagctgctcttgaaattacaaaccaaaggcatgctcgcacagttctcattgaaagaggatattattggagcatcaaatccaccgccacctgcagaggtacggaaagacgacagtcgtatggacggccacgcctgtatgatctgcagtaaagtctttccacgaaggtgtgaactcaaaaaacacgaaaagcgacacaagaaaccatacggctgcactcaacccgattgcgacaaaagattcgggagtaagaatgactggaaacggcatgaaaacactcaacatttcatgctagaatcatggcgttgcgaagaaaaaaagagcaatttcgagaatgagctatgcgaacgggtctgctaccggaaagaaaatttcaagaatcaccttgaagtcgaacacgggattaccgatcaacacgccttggagcgaaagatggagaaatgtcgggttggtcggaattccgaggctcggttctggtgcggattttgtgagaagatcgtcgaaatcaaacacaagaatatgcaaccttgggtggagcgcttcaaccacattgacgaacactttaccggcaaaaatcggcgaccagcgcaagagattggcgaatggaagaatttcgattcgacgcaacccaagaagggctcacctcaagatgattctgacggtatcagcgatgttggtgttgtgaacttggaagcgcctgttgcgagaccaaaacaacaagaggccactttcaactcttccttctcggatccgggaaatcccaaatcaaaacgcaagcgggacgaaagtatcaatgctagtggagcgaggaaagttaaacaaacaaaccagggagctggtcgcagactctgttgtcattgcggagatatcataacgattgcacaagcccagtgcctttgtgaacacgtaccgtgcatgcattgtcgttgacatttttttttatcagttccgagggagagcgtggtacactgttgatatttcgggacccgagttatgtctcatcatttcggcattttatgagtgaatgactttacgatatacccccgatatatagagatttacggttcgcgacgcgggcacaacattttgagacacggcaattacgggtttggaaacgatgttggatacttatgatttacccataggagttcacgcagctatctagctaattactcgaagcttctcacgacgttacgtgacctagtagataatgactcggctggaatgcactatacacgggaattaattcattctgaaattgcctcatctaactacaattgccaaacatgccatgtgttaccatccttgttctactgtattctcatcctatacaacaacattgcatctactcaaacttacagtgaagactggctatatcgaaaggattgatcgtccaaggtcatgaatgaagtgacgcaatgtaactaatcttgataggttaagacgctggcggtgagctgctgtgtccgtggaccggtcagttagagtttaagtatcagacgaaccgcatcgactgattggcttatgggatgatcctgtgacatagcactgttggagaggaggacaatgagacgaacatgttgtcattgagcgatgatatcacaccagtcaaccttgacccattccacattgtccgcggctcgtctgctcgagtccccgaccttgtaagaatagcatgtgggaattggttgactggcg

SEQ ID NO: 5340 - DNA, 879 bp, Muscodor strobelii
  misc_feature: SGI cDNA ID NO. 561493
  misc_feature: Reduced expression when VOC is produced
  misc_feature: Encodes the peptide sequence at SEQ ID NO 5341
atggcgccaatgaaaaacagtaacaacagtagtagtaataatcactacggcgaggacggcaacatggcactcgtcaacgtcctcgcctcgtgctacctcgtctcccctaccgcctcgctcaagggcctccattactgcactacccgggcttgcggggccgatccccccctcgcggccctcacctcgtccaacgagctggctctgcagcccaagcctaagaagcatggctacaggaacagcgccgacaaagtcacgacgagtctgaactacagccgcagcacagcaaatagccgccgagggggggcaacatttcagataagggatgaatgtgagagattcttctgtgagaccatgagggccgtgttccaaggtgagcggaacaaggtcggtaatggctccttcttatctggtgtttcatgtgccaatgcgcagctcacaccgcctgacgacaacatggtcgttgatttcccgccaacgccgccttcctcgctccccaaagatggtctagcgaatactacgactactgctggagtggaggctaagggctggatggagttctgggattataagggcggtgcgagtttccgggcttttctcgccgaggacggcaatgagaagtctttgttcgcgttcattgatggtggacttatcggtagagatcttaagcatgccctcgtggcattaatagagctagccgacgtcccactaggttgttcgcacgttgtcatctgcctggaccgcctcatacccgaggagcagaccaaagccctgatgaggagtctgcagtgggtcggcttcgagctcacgacccttgatcactgggctggtgagatagacgtcattagcgataagtggttattcatggggatggaggtctaa

SEQ ID NO: 5341 - protein, 292 aa, Muscodor strobelii
  misc_feature: SGI Peptide ID NO. 561493
  misc_feature (36)..(292): Pfam Id: PF02100 Pfam Desc: Ornithine decarboxylase antizyme
  misc_feature (221)..(292): Pfam Id: PF02100 Pfam Desc: Ornithine decarboxylase antizyme
  misc_feature (1)..(292): NCBI GI: 46136935 Blast Desc: FG09983.1 [Gibberella zeae PH-1]
  misc_feature (1)..(276): NCBI GI: 28950252 Blast Desc: related to ornithine decarboxylase antizyme [Neurospora crassa]
  misc_feature (1)..(292): NCBI GI: 156056232 Blast Desc: ornithine decarboxylase antizyme [Sclerotinia sclerotiorum 1980] gi|154703252|gb|EDO02991.1| ornithine decarboxylase antizyme [Sclerotinia sclerotiorum 1980]
  misc_feature (1)..(292): NCBI GI: 154302641 Blast Desc: BC1G_09897 [Botryotinia fuckeliana B05.10] gi|150855386|gb|EDN30578.1| BC1G_09897 [Botryotinia fuckeliana B05.10]
  misc_feature (1)..(292): NCBI GI: 10304399 Blast Desc: AF291578_1 ornithine decarboxylase antizyme [Botryotinia fuckeliana]
  misc_feature (1)..(292): NCBI GI: 116197411 Blast Desc: CHGG_06861 [Chaetomium globosum CBS 148.51] gi|88178140|gb|EAQ85608.1| CHGG_06861 [Chaetomium globosum CBS 148.51]
  misc_feature (57)..(292): NCBI GI: 145611614 Blast Desc: MGG_00254 [Magnaporthe grisea 70-15] gi|145018879|gb|EDK03158.1| MGG_00254 [Magnaporthe grisea 70-15]
  misc_feature (57)..(292): NCBI GI: 261351876 Blast Desc: conserved [Verticillium albo-atrum VaMs.102]
  misc_feature (91)..(291): NCBI GI: 169612698 Blast Desc: SNOG_09474 [Phaeosphaeria nodorum SN15] gi|160702562|gb|EAT82739.2| SNOG_09474 [Phaeosphaeria nodorum SN15]
  misc_feature (26)..(292): NCBI GI: 154818318 Blast Desc: ornithine decarboxylase antizyme [Paracoccidioides brasiliensis]
  misc_feature: Useful for introducing or modulating the production of volatile compounds
MAPMKNSNNSSSNNHYGEDGNMALVNVLASCYLVSPTASLKGLHYCTTRACGADPPLAALTSSNELALQPKPKKHGYRNSADKVTTSLNYSRSTANSRRGGATFQIRDECERFFCETMRAVFQGERNKVGNGSFLSGVSCANAQLTPPDDNMVVDFPPTPPSSLPKDGLANTTTTAGVEAKGWMEFWDYKGGASFRAFLAEDGNEKSLFAFIDGGLIGRDLKHALVALIELADVPLGCSHVVICLDRLIPEEQTKALMRSLQWVGFELTTLDHWAGEIDVISDKWLFMGMEV

SEQ ID NO: 5342 - DNA, 3773 bp, Muscodor strobelii
  misc_feature: SGI EST ID NO. CUFF.14209.0
  misc_feature: Variant of the nucleotide sequence at SEQ ID NO 5340
gtttccgccaccctttcccgccttttctacttgagcctccaattctccctacaaccactcctcgctttctcctcaccccaactgcaacgcttcagcactagctttcaagccagactcctcgtcttcgtacggttccaagcagccccaggcaatagacaattacaaactgttcttcggaaacaacaacgccaaccttgaccaatccagattcaacgattatcgactttcagtcaccgccaccgaaaaaacagccggctcagtcaactctcaaccctgtctcacctttccagttcaaattccaaccctggattccctcaacaatggcgccaatgaaaaacagtaacaacagtagtagtaataatcactacggcgaggacggcaacatggcactcgtcaacgtcctcgcctcgtgctacctcgtctcccctaccgcctcgctcaagggcctccattactgcactacccgggcttgcggggccgagtggtattcctgaggtccctatctcaggtctaccctcccctccttcaagtccccccctcgcggccctcacctcgtccaacgagctggctctgcagcccaagcctaagaagcatggctacaggaacagcgccgacaaagtcacgacgagtctgaactacagccgcagcacagcaaatagccgccgagggggggcaacatttcagataagggatgaatgtgagagattcttctgtgagaccatgagggccgtgttccaaggtgagcggaacaaggtcggtaatggctccttcttatctggtgtttcatgtgccaatgcgcagctcacaccgcctgacgacaacatggtcgttgatttcccgccaacgccgccttcctcgctccccaaagatggtctagcgaatactacgactactgctggagtggaggctaagggctggatggagttctgggattataagggcggtgcgagtttccgggcttttctcgccgaggacggcaatgagaagtctttgttcgcgttcattgatggtggacttatcggtagagatcttaagcatgccctcgtggcattaatagagctagccgacgtcccactaggttgttcgcacgttgtcatctgcctggaccgcctcatacccgaggagcagaccaaagccctgatgaggagtctgcagtgggtcggcttcgagctcacgacccttgatcactgggctggtgagatagacgtcattagcgataagtggttattcatggggatggaggtctaatgtgtcgcttctggcacaattctagtaccacatatcctattttcccgtcggttacgctatccactcgtttctgttggctttgaggaaatttaatggtcatccaatcgtatgcgacgatgaagggaagaaagaagaggtctggagagtagcatgcgaggaacaatgaaaaagcacacggggagtaaggctcttccaattgcgcatcgtttaggagtcggagtttgctgcatggatggattctgcatcacacaaaattgtcaattgaccaagggaacgagaaaaagcttaatgacttgcaacgcaaaaggagtcaggaagtaggagttcatagtttgccatcatatttcataacaattcaagccgatctgccggagactttactctcatctgtcagcaaaagtaaacccattattgacttgcctcgtaaaagctgctaggagcgagagccacgcccgtccagttttctatcccatcctatatcaatacaaatgatctatcctcccaaatattttctcatctattgtaaatcaattaaccgccaacgccgtgatatctcctactccctcttcactctctcctttcccatagtgccctttccacccctatttcttccctcttcctatatctctttccccatcccagcttttagcccccatgatagacaccaatctcattaccctcataaatccccctcaaaaaccctaacatccatacccttctcctttaagtattccttaacttgtccgaccgtgaactcccctctatgaaacatccccgcacccagcgtagcatccgtccttgtctccctaaaaacctcctcaaaatgctctggcttacccgcgccactcgacgcaataacgggtatcttgaccgcctccttaacctgattgatcaactccagatcaaatccggaattgcttccatccttatcaatacaattcagtaataactccccagcccccatagcctctaccgcaaccgctaactccacaacatccaaatcccttgtttctctacccccgcggatggtacaagcgtaccaacaactagtctcgcccttcggcccagggaatttcgtggaaatagcattatgacgcgtagcgtccggcgaatcagggacgtagacacgtttaggatccacgctcacaaccacggcctgatttccgtaagcaagggaaatctgctcaatagccgtatttccatacaacttcctgccatgcgccccatagtactcctcggccgctatcacggcatcactgccaatagacactttatccgcgccggactggaagtacatagtcgctatctcgagggcggagactttcgtcccgtccgtatcgatcgtgtctcttatgccgccgccgatcgtcagggggacgaatactgataaagatgtctggcggaggatctcgagcatggggaggtcggctagtggacattcccggaaggatgttatgtttaagaatgttatctcgtctgcgccttgttcgtagtacttcttagccatttctacgggtttgccgagattccgaacaccgcggtctgaggatttctcgcggacgtcgtattggtcgccttttgttactacgaggtcccctgcgtcgttggttcgtacgtcgagacaggctattacgcggcgggttaatccgcctgtgggagctggcccggtgagggattggccgagggtttgggcgccgctgcgatcgaggaaggactttatcacgcgcagaccggcgacgccggatttctcggggtggaattgcgtggctaggatgtttccccgcgctactgcccccacgaatgtctcatcgccgtaggaccccgtggctactgtccagccttgtgactcgaggtcctccggtacgtagggcattttgtaggagtggacgtagtagtatttactctctgggcgcaaatcatagagacttttactgctcgcatttgcgctgttccagcctatgtgcggtacactcttatctgtgtcgtcgaatctatttagttttcccttgatggttcccaacccggcgacggagtcatcttctgaggagccttcaaagagtgcttggagtccgacacatatccccatgaatggcttgccggagtcgatgtgcgcccggatggccgggatgtagtctgcggatgcgagctggcttagacagtggccgaagtggccgacgcccggcaggatgagggagtcggcggtggagaggtccgagggggaccgaacccatgatacggtgtatccgcatttttcgatggcgtttacaagggagcggacgttgcctgctacgtagtcgaggaggtgcactgtcggcatttttttggcgtgggctgctcagagagagcgagagattagatgggatagtgtgttagtagcgaatacgaggggagaattcccaattgagggatcagtgattagctggatcaagtaatattaagtatgggttccggagggttattataagagattataaggtcaaaaaaggtgacgatagctgcccgaggccggccgtggtggtgacgag

SEQ ID NO: 5343 - DNA, 1638 bp, Muscodor strobelii
  misc_feature: SGI cDNA ID NO. 561494
  misc_feature: Reduced expression when VOC is produced
  misc_feature: Encodes the peptide sequence at SEQ ID NO 5344
atgccgacagtgcacctcctcgactacgtagcaggcaacgtccgctcccttgtaaacgccatcgaaaaatgcggatacaccgtatcatgggttcggtccccctcggacctctccaccgccgactccctcatcctgccgggcgtcggccacttcggccactgtctaagccagctcgcatccgcagactacatcccggccatccgggcgcacatcgactccggcaagccattcatggggatatgtgtcggactccaagcactctttgaaggctcctcagaagatgactccgtcgccgggttgggaaccatcaagggaaaactaaatagattcgacgacacagataagagtgtaccgcacataggctggaacagcgcaaatgcgagcagtaaaagtctctatgatttgcgcccagagagtaaatactactacgtccactcctacaaaatgccctacgtaccggaggacctcgagtcacaaggctggacagtagccacggggtcctacggcgatgagacattcgtgggggcagtagcgcggggaaacatcctagccacgcaattccaccccgagaaatccggcgtcgccggtctgcgcgtgataaagtccttcctcgatcgcagcggcgcccaaaccctcggccaatccctcaccgggccagctcccacaggcggattaacccgccgcgtaatagcctgtctcgacgtacgaaccaacgacgcaggggacctcgtagtaacaaaaggcgaccaatacgacgtccgcgagaaatcctcagaccgcggtgttcggaatctcggcaaacccgtagaaatggctaagaagtactacgaacaaggcgcagacgagataacattcttaaacataacatccttccgggaatgtccactagccgacctccccatgctcgagatcctccgccagacatctttatcagtattcgtccccctgacgatcggcggcggcataagagacacgatcgatacggacgggacgaaagtctccgccctcgagatagcgactatgtacttccagtccggcgcggataaagtgtctattggcagtgatgccgtgatagcggccgaggagtactatggggcgcatggcaggaagttgtatggaaatacggctattgagcagatttcccttgcttacggaaatcaggccgtggttgtgagcgtggatcctaaacgtgtctacgtccctgattcgccggacgctacgcgtcataatgctatttccacgaaattccctgggccgaagggcgagactagttgttggtacgcttgtaccatccgcgggggtagagaaacaagggatttggatgttgtggagttagcggttgcggtagaggctatgggggctggggagttattactgaattgtattgataaggatggaagcaattccggatttgatctggagttgatcaatcaggttaaggaggcggtcaagatacccgttattgcgtcgagtggcgcgggtaagccagagcattttgaggaggtttttagggagacaaggacggatgctacgctgggtgcggggatgtttcatagaggggagttcacggtcggacaagttaaggaatacttaaaggagaagggtatggatgttagggtttttgagggggatttatga

SEQ ID NO: 5344 - protein, 545 aa, Muscodor strobelii
  misc_feature: SGI Peptide ID NO. 561494
  misc_feature (5)..(207): Pfam Id: PF00117 Pfam Desc: Glutamine amidotransferase class-I
  misc_feature (228)..(523): Pfam Id: PF00977 Pfam Desc: Histidine biosynthesis protein
  misc_feature (10)..(209): Pfam Id: PF01174 Pfam Desc: SNO glutamine amidotransferase family
  misc_feature (1)..(545): NCBI GI: 85084828 Blast Desc: imidazole glycerol phosphate synthase hisHF [Neurospora crassa OR74A] gi|28918472|gb|EAA28145.1| imidazole glycerol phosphate synthase hisHF [Neurospora crassa OR74A] hishf
  misc_feature (1)..(545): NCBI GI: 171676479 Blast Desc: protein product [Podospora anserina] gi|170936306|emb|CAP60964.1| protein product [Podospora anserina]
  misc_feature (1)..(542): NCBI GI: 46136937 Blast Desc: FG09984.1 [Gibberella zeae PH-1]
  misc_feature (1)..(545): NCBI GI: 156055528 Blast Desc: SS1G_05116 [Sclerotinia sclerotiorum 1980] gi|154702900|gb|EDO02639.1| SS1G_05116 [Sclerotinia sclerotiorum 1980]
  misc_feature (1)..(545): NCBI GI: 154300098 Blast Desc: BC1G_11238 [Botryotinia fuckeliana B05.10] gi|150856851|gb|EDN32043.1| BC1G_11238 [Botryotinia fuckeliana B05.10]
  misc_feature (1)..(545): NCBI GI: 256732198 Blast Desc: [Nectria haematococca mpVI 77-13-4]
  misc_feature (1)..(545): NCBI GI: 116197413 Blast Desc: CHGG_06862 [Chaetomium globosum CBS 148.51] gi|88178141|gb|EAQ85609.1| CHGG_06862 [Chaetomium globosum CBS 148.51]
  misc_feature (1)..(545): NCBI GI: 39975201 Blast Desc: MGG_00253 [Magnaporthe grisea 70-15] gi|145018880|gb|EDK03159.1| MGG_00253 [Magnaporthe grisea 70-15]
  misc_feature (1)..(545): NCBI GI: 169625148 Blast Desc: SNOG_15843 [Phaeosphaeria nodorum SN15] gi|111055561|gb|EAT76681.1| SNOG_15843 [Phaeosphaeria nodorum SN15]
  misc_feature (1)..(542): NCBI GI: 115398405 Blast Desc: imidazole glycerol phosphate synthase hisHF [Aspergillus terreus NIH2624] gi|114192985|gb|EAU34685.1| imidazole glycerol phosphate synthase hisHF [Aspergillus terreus
  misc_feature: Useful for introducing or modulating the production of volatile compounds
MPTVHLLDYVAGNVRSLVNAIEKCGYTVSWVRSPSDLSTADSLILPGVGHFGHCLSQLASADYIPAIRAHIDSGKPFMGICVGLQALFEGSSEDDSVAGLGTIKGKLNRFDDTDKSVPHIGWNSANASSKSLYDLRPESKYYYVHSYKMPYVPEDLESQGWTVATGSYGDETFVGAVARGNILATQFHPEKSGVAGLRVIKSFLDRSGAQTLGQSLTGPAPTGGLTRRVIACLDVRTNDAGDLVVTKGDQYDVREKSSDRGVRNLGKPVEMAKKYYEQGADEITFLNITSFRECPLADLPMLEILRQTSLSVFVPLTIGGGIRDTIDTDGTKVSALEIATMYFQSGADKVSIGSDAVIAAEEYYGAHGRKLYGNTAIEQISLAYGNQAVVVSVDPKRVYVPDSPDATRHNAISTKFPGPKGETSCWYACTIRGGRETRDLDVVELAVAVEAMGAGELLLNCIDKDGSNSGFDLELINQVKEAVKIPVIASSGAGKPEHFEEVFRETRTDATLGAGMFHRGEFTVGQVKEYLKEKGMDVRVFEGDL

SEQ ID NO: 5345 - DNA, 3893 bp, Muscodor strobelii
  misc_feature: SGI EST ID NO. CUFF.14209.1
  misc_feature: Variant of the nucleotide sequence at SEQ ID NO 5343
ctcgtcaccaccacggccggcctcgggcagctatcgtcaccttttttgaccttataatctcttataataaccctccggaacccatacttaatattacttgatccagctaatcactgatccctcaattgggaattctcccctcgtattcgctactaacacactatcccatctaatctctcgctctctctgagcagcccacgccaaaaaaatgccgacagtgcacctcctcgactacgtagcaggcaacgtccgctcccttgtaaacgccatcgaaaaatgcggatacaccgtatcatgggttcggtccccctcggacctctccaccgccgactccctcatcctgccgggcgtcggccacttcggccactgtctaagccagctcgcatccgcagactacatcccggccatccgggcgcacatcgactccggcaagccattcatggggatatgtgtcggactccaagcactctttgaaggctcctcagaagatgactccgtcgccgggttgggaaccatcaagggaaaactaaatagattcgacgacacagataagagtgtaccgcacataggctggaacagcgcaaatgcgagcagtaaaagtctctatgatttgcgcccagagagtaaatactactacgtccactcctacaaaatgccctacgtaccggaggacctcgagtcacaaggctggacagtagccacggggtcctacggcgatgagacattcgtgggggcagtagcgcggggaaacatcctagccacgcaattccaccccgagaaatccggcgtcgccggtctgcgcgtgataaagtccttcctcgatcgcagcggcgcccaaaccctcggccaatccctcaccgggccagctcccacaggcggattaacccgccgcgtaatagcctgtctcgacgtacgaaccaacgacgcaggggacctcgtagtaacaaaaggcgaccaatacgacgtccgcgagaaatcctcagaccgcggtgttcggaatctcggcaaacccgtagaaatggctaagaagtactacgaacaaggcgcagacgagataacattcttaaacataacatccttccgggaatgtccactagccgacctccccatgctcgagatcctccgccagacatctttatcagtattcgtccccctgacgatcggcggcggcataagagacacgatcgatacggacgggacgaaagtctccgccctcgagatagcgactatgtacttccagtccggcgcggataaagtgtctattggcagtgatgccgtgatagcggccgaggagtactatggggcgcatggcaggaagttgtatggaaatacggctattgagcagatttcccttgcttacggaaatcaggccgtggttgtgagcgtggatcctaaacgtgtctacgtccctgattcgccggacgctacgcgtcataatgctatttccacgaaattccctgggccgaagggcgagactagttgttggtacgcttgtaccatccgcgggggtagagaaacaagggatttggatgttgtggagttagcggttgcggtagaggctatgggggctggggagttattactgaattgtattgataaggatggaagcaattccggatttgatctggagttgatcaatcaggttaaggaggcggtcaagatacccgttattgcgtcgagtggcgcgggtaagccagagcattttgaggaggtttttagggagacaaggacggatgctacgctgggtgcggggatgtttcatagaggggagttcacggtcggacaagttaaggaatacttaaaggagaagggtatggatgttagggtttttgagggggatttatgagggtaatgagattggtgtctatcatgggggctaaaagctgggatggggaaagagatataggaagagggaagaaataggggtggaaagggcactatgggaaaggagagagtgaagagggagtaggagatatcacggcgttggcggttaattgatttacaatagatgagaaaatatttgggaggatagatcatttgtattgatataggatgggatagaaaactggacgggcgtggctctcgctcctagcagcttttacgaggcaagtcaataatgggtttacttttgctgacagatgagagtaaagtctccggcagatcggcttgaattgttatgaaatatgatggcaaactatgaactcctacttcctgactccttttgcgttgcaagtcattaagctttttctcgttcccttggtcaattgacaattttgtgtgatgcagaatccatccatgcagcaaactccgactcctaaacgatgcgcaattggaagagccttactccccgtgtgctttttcattgttcctcgcatgctactctccagacctcttctttcttcccttcatcgtcgcatacgattggatgaccattaaatttcctcaaagccaacagaaacgagtggatagcgtaaccgacgggaaaataggatatgtggtactagaattgtgccagaagcgacacattagacctccatccccatgaataaccacttatcgctaatgacgtctatctcaccagcccagtgatcaagggtcgtgagctcgaagccgacccactgcagactcctcatcagggctttggtctgctcctcgggtatgaggcggtccaggcagatgacaacgtgcgaacaacctagtgggacgtcggctagctctattaatgccacgaggctgttgctttgttagtatagtacgtcaggttgactttatttggggggtgttgaacattgggagaagtgatgggagaaaggggaggagatcgggagacggatcgtaactgggaagacgtacgcatgcttaagatctctaccgataagtccaccatcaatgaacgcgaacaaagacttctcattgccgtcctcggcgagaaaagcccggaaactcgcaccgcccttataatcccagaactccatccagcccttagcctccactccagcagtagtcgtagtattcgctagaccatctttggggagcgaggaaggcggcgttggcgggaaatcaacgaccatgttgtcgtcaggcggtgtgagctgcgcattggcacatgaaacaccagataagaaggagccattaccgaccttgttccgctcaccttggaacacggccctcatggtctcacagaagaatctctcacattcatcccttatctgaaatgttgccccccctcggcggctatttgctgtgctgcggctgtagttcagactcgtcgtgactttgtcggcgctgttcctgtagccatgcttcttaggcttgggctgcagagccagctcgttggacgaggtgagggccgcgagggggggacttgaaggaggggagggtagacctgagatagggacctcaggaataccactcggccccgcaagcccgggtagtgcagtaatggaggcccttgagcgaggcggtaggggagacgaggtagcacgaggcgaggacgttgacgagtgccatgttgccgtcctcgccgtagtgattattactactactgttgttactgtttttcattggcgccattgttgagggaatccagggttggaatttgaactggaaaggtgagacagggttgagagttgactgagccggctgttttttcggtggcggtgactgaaagtcgataatcgttgaatctggattggtcaaggttggcgttgttgtttccgaagaacagtttgtaattgtctattgcctggggctgcttggaaccgtacgaagacgaggagtctggcttgaaagctagtgctgaagcgttgcagttggggtgaggagaaagcgaggagtggttgtagggagaattggaggctcaagtagaaaaggcgggaaagggtggcggaaac

SEQ ID NO: 5346 - DNA, 1377 bp, Muscodor strobelii
  misc_feature: SGI cDNA ID NO. 561495
  misc_feature: Reduced expression when VOC is produced
  misc_feature: Encodes the peptide sequence at SEQ ID NO 5347
atgtcgagcttggctgaaagtctcccggaggacgatgccaaaatggacatcgactccgagcagccaccccagcctcagattcaaaccctagattctcgagatcccattcccattccatcgatctcacaaacacaatcacaacagcagtcacgagacggccaagacgatgactcggaatgggaatacgagtactcgacaaacgagaccgaaacgttctatgtgactctcgatctctccaaggaagacttcagatcacagtatggcaagtcacgcctccccttcgcctcacgaggcagttggcccgtccacaaggccatggagggtttcgtcaaccgacgcaaagacgcccgccccggcacctccagcagcaactcagacgccgagcccgacgccgaggccgataactccaacgacgagggcgacaacgaggtaaacacatcacaactcgatagagaccgaacaccctcagcaaccacaggcccagatcgcgtccagatcctcgacctccacaccaccgaacccatgatctcctacaaggggcgaatattcacggggaaatggtacacaaacacaaccaccgagctcctcctcacgcaacacgacccacacatacccctcccttccttgcgccacctccccgattccgtcgatctactagccgcgagttcggcacgcatcaacgtcgtagagaagaaactcaagcgatcctcacaagaacggaaacgcgccttggcatcgatgcgaacaagcgccatggtcctacctcccgtcgataagaacgcgaccgaggaacgaatcgaccagcggaacttcctggcgaatctcatggctatcaagaaacgtaaaggcgagacggacgaggtcacggttattgcaagaagtatgcagggcgccaataaacgcagcagggaagattggcagggtgagagggatgaggatgtagaggggggtggtgaggatattttgagtatgcctacaccggcccattggggcgatttggaggagattgggggcgatgggaagacgactaggcatggaagtgatggggaggatggggatgagtcgcctaccgaacgtgacgttgatggtggagatgaggacgcagagggaagtgccacgggcaatgacgaccaagatgaggatggtgaagaggaagatgacgaagaaaatgacgaagatatggacgtcgatgacgacgccgatgtcgatcagatacagtattacaccccagatggcgaggacgacgatcaggatggagaggatggagaagactcggactcggactcggtagacaatggcagagacgccgatgaagatgacgacgaagagatgagcgatatggatgagaatattgcgccgccacagggggtggactga

SEQ ID NO: 5347 - protein, 458 aa, Muscodor strobelii
  misc_feature: SGI Peptide ID NO. 561495
  misc_feature (47)..(290): NCBI GI: 116197415 Blast Desc: CHGG_06863 [Chaetomium globosum CBS 148.51] gi|88178142|gb|EAQ85610.1| CHGG_06863 [Chaetomium globosum CBS 148.51]
  misc_feature (39)..(297): NCBI GI: 256731804 Blast Desc: NECHADRAFT_80556 [Nectria haematococca mpVI 77-13-4]
  misc_feature (55)..(234): NCBI GI: 171676481 Blast Desc: protein product [Podospora anserina] gi|170936307|emb|CAP60965.1| protein product [Podospora anserina]
  misc_feature (115)..(290): NCBI GI: 85084832 Blast Desc: NCU07157 [Neurospora crassa OR74A] gi|28918473|gb|EAA28146.1| [Neurospora crassa OR74A] gi|28950254|emb|CAD71120.1| [Neurospora crassa]
  misc_feature (164)..(424): NCBI GI: 156055072 Blast Desc: SS1G_04887 [Sclerotinia sclerotiorum 1980] gi|154702672|gb|EDO02411.1| SS1G_04887 [Sclerotinia sclerotiorum 1980]
  misc_feature (56)..(303): NCBI GI: 67900932 Blast Desc: AN7453.2 [Aspergillus nidulans FGSC A4] gi|40742843|gb|EAA62033.1| AN7453.2 [Aspergillus nidulans FGSC A4] gi|259483759|tpe|CBF79412.1| TPA: conserved [Aspergillus FGSC
  misc_feature (55)..(314): NCBI GI: 145234374 Blast Desc: An02g14270 [Aspergillus niger] gi|134057504|emb|CAK48858.1| [Aspergillus niger]
  misc_feature (55)..(314): NCBI GI: 115400757 Blast Desc: conserved [Aspergillus terreus NIH2624] gi|114191633|gb|EAU33333.1| conserved [Aspergillus terreus NIH2624]
  misc_feature (54)..(303): NCBI GI: 119480383 Blast Desc: NFIA_082710 [Neosartorya fischeri NRRL 181] gi|119408374|gb|EAW18323.1| conserved [Neosartorya fischeri NRRL 181]
  misc_feature (56)..(291): NCBI GI: 238842126 Blast Desc: conserved [Microsporum canis CBS 113480]
  misc_feature: Useful for introducing or modulating the production of volatile compounds
MSSLAESLPEDDAKMDIDSEQPPQPQIQTLDSRDPIPIPSISQTQSQQQSRDGQDDDSEWEYEYSTNETETFYVTLDLSKEDFRSQYGKSRLPFASRGSWPVHKAMEGFVNRRKDARPGTSSSNSDAEPDAEADNSNDEGDNEVNTSQLDRDRTPSATTGPDRVQILDLHTTEPMISYKGRIFTGKWYTNTTTELLLTQHDPHIPLPSLRHLPDSVDLLAASSARINVVEKKLKRSSQERKRALASMRTSAMVLPPVDKNATEERIDQRNFLANLMAIKKRKGETDEVTVIARSMQGANKRSREDWQGERDEDVEGGGEDILSMPTPAHWGDLEEIGGDGKTTRHGSDGEDGDESPTERDVDGGDEDAEGSATGNDDQDEDGEEEDDEENDEDMDVDDDADVDQIQYYTPDGEDDDQDGEDGEDSDSDSVDNGRDADEDDDEEMSDMDENIAPPQGVD

SEQ ID NO: 5348 - DNA, 2676 bp, Muscodor strobelii
  misc_feature: SGI EST ID NO. CUFF.14221.0
  misc_feature: Variant of the nucleotide sequence at SEQ ID NO 5346
ttggatctttacccctccattagtgaggttgtgcctattgtgcccattttgaccgcgccagggtgtcgctgaaaaaggcaacgacctcaccttggttcgtgcattagcgtgtatttctgacgtcgaaattccatgcagatcaattggagattcggacgaggttatctccagctccaagtccgctatcttgtaattgatttcacccgctaaatttcgacattgtacatgccgtatcccatgcaggcacttagtgttcaattctacgcatgaagctgcaaagagcgtctacatctctataattctcacttcgatgaaactcctcgtccatcaccagctccaacatgtcgagcttggctgaaagtctcccggaggacgatgccaaaatggacatcgactccgagcagccaccccagcctcagattcaaaccctagattctcgagatcccattcccattccatcgatctcacaaacacaatcacaacagcagtcacgagacggccaagacgatgactcggaatgggaatacgagtactcgacaaacgagaccgaaacgttctatgtgactctcgatctctccaaggaagacttcagatcacagtatggcaagtcacgcctccccttcgcctcacgaggcagttggcccgtccacaaggccatggagggtttcgtcaaccgacgcaaagacgcccgccccggcacctccagcagcaactcagacgccgagcccgacgccgaggccgataactccaacgacgagggcgacaacgaggtaaacacatcacaactcgatagagaccgaacaccctcagcaaccacaggcccagatcgcgtccagatcctcgacctccacaccaccgaacccatgatctcctacaaggggcgaatattcacggggaaatggtacacaaacacaaccaccgagctcctcctcacgcaacacgacccacacatacccctcccttccttgcgccacctccccgattccgtcgatctactagccgcgagttcggcacgcatcaacgtcgtagagaagaaactcaagcgatcctcacaagaacggaaacgcgccttggcatcgatgcgaacaagcgccatggtcctacctcccgtcgataagaacgcgaccgaggaacgaatcgaccagcggaacttcctggcgaatctcatggctatcaagaaacgtaaaggcgagacggacgaggtcacggttattgcaagaagtatgcagggcgccaataaacgcagcaggtatttgaaaccgaggggtccgaggggtggtaggatccttgcgagtcatgtttataggcggctgagaaatgaagaggggacgggcggtaggtcgagagcgggacggaaaaagggaagtaggagtaggggcaagaagttggcgtggaatctgaagagcgtgccgcttggacggtatcatagggaagattggcagggtgagagggatgaggatgtagaggggggtggtgaggatattttgagtatgcctacaccggcccattggggcgatttggaggagattgggggcgatgggaagacgactaggcatggaagtgatggggaggatggggatgagtcgcctaccgaacgtgacgttgatggtggagatgaggacgcagagggaagtgccacgggcaatgacgaccaagatgaggatggtgaagaggaagatgacgaagaaaatgacgaagatatggacgtcgatgacgacgccgatgtcgatcagatacagtattacaccccagatggcgaggacgacgatcaggatggagaggatggagaagactcggactcggactcggtagacaatggcagagacgccgatgaagatgacgacgaagagatgagcgatatggatgagaatattgcgccgccacagggggtggactgatcattttacgaattgtttcccgatacccatgaataaaaagaaacgctacactttgactatgtcgtacggttcacgatggtttcgctgcattttttatcttcgatatgcttcattttgaagttatagatttctcttctactttttcacagctaggtgtaggatacttgactcctgcaccaggcgaatcgtggttaagtcacattctgccaaatctcgacatctcaactcatttgccccatttccgcccatgtttcacgcgtacctccctccgtccagatccaacccctttttttctccttttatcccctcgtcgttgttgatgggattgcataatcacatcaagtcctggatacttttatcagcatccgtcttgataagctccaccatgccgtccggcatgactggctccccatctttcccctttacgtagcggaatggcatctctgtgctttcgtgctcgttgatttttagctcggggtggtctgtgtaggggatgtttttcaatgtccctgggattttgttagcgtctgctgcgtgttgtttttagaggtagatagaagggcacaagatgggagcgggggtaaagaatgagaatggaaaaatggaggttaaggacaggaaaagggaaaggggagaagagaagaaatacattgctcctcgatgaccattcgcgttacgcggacggcggtatcggtcgtcatttgcacggggcccaaacgtcttccttcgaagccttttacgcgaagctccgaggtacggtctatgaagtgtgagcgtg

SEQ ID NO: 5349 - DNA, 630 bp, Muscodor strobelii
  misc_feature: SGI cDNA ID NO. 561496
  misc_feature: Encodes the peptide sequence at SEQ ID NO 5350
atgccgataaagaaaacctacatagtagagcatctcgacccagaactcggtccctggtccgagctagaatacacatgcatcgcgaaggaaaccggtctcgcgcacagcgagttcatactttcctccttaccgcctgaactcgcttctaatcttcctgagaaactcggtatcgagcaagcattcaaagcagagacgaaaggcgttgaggagttgtatagtggggacgacaggaaaaaggtctgtctgcttgatccgcgggcggagaaggatttgaatcctgatgataggggggaatttgatgcgtttctttttggaggcattctgggcgatgacccacctcgcgaccgtacctcggagcttcgcgtaaaaggcttcgaaggaagacgtttgggccccgtgcaaatgacgaccgataccgccgtccgcgtaacgcgaatggtcatcgaggagcaatggacattgaaaaacatcccctacacagaccaccccgagctaaaaatcaacgagcacgaaagcacagagatgccattccgctacgtaaaggggaaagatggggagccagtcatgccggacggcatggtggagcttatcaagacggatgctgataaaagtatccaggacttgatgtga

SEQ ID NO: 5350 - protein, 209 aa, Muscodor strobelii
  misc_feature: SGI Peptide ID NO. 561496
  misc_feature (5)..(209): Pfam Id: PF04252 Pfam Desc: Domain of function (DUF431)
  misc_feature (6)..(209): Pfam Id: PF04252 Pfam Desc: Domain of function (DUF431)
  misc_feature (5)..(209): NCBI GI: 116197761 Blast Desc: conserved [Chaetomium globosum CBS 148.51] gi|88178315|gb|EAQ85783.1| conserved [Chaetomium globosum CBS 148.51]
  misc_feature (5)..(209): NCBI GI: 256732163 Blast Desc: [Nectria haematococca mpVI 77-13-4]
  misc_feature (5)..(209): NCBI GI: 39974159 Blast Desc: MGG_00774 [Magnaporthe grisea 70-15] gi|145018290|gb|EDK02569.1| MGG_00774 [Magnaporthe grisea 70-15]
  misc_feature (4)..(209): NCBI GI: 85100438 Blast Desc: NCU04317 [Neurospora crassa OR74A] gi|28922497|gb|EAA31727.1| conserved [Neurospora crassa OR74A] gi|28950177|emb|CAD71045.1| conserved [Neurospora crassa]
  misc_feature (5)..(209): NCBI GI: 261351971 Blast Desc: DUF431 domain-containing protein [Verticillium albo-atrum VaMs.102]
  misc_feature (5)..(209): NCBI GI: 171693773 Blast Desc: protein product [Podospora anserina] gi|170946835|emb|CAP73639.1| protein product [Podospora anserina]
  misc_feature (5)..(209): NCBI GI: 46137261 Blast Desc: FG10146.1 [Gibberella zeae PH-1]
  misc_feature (6)..(209): NCBI GI: 242785822 Blast Desc: DUF431 domain protein [Talaromyces stipitatus ATCC 10500] gi|218720822|gb|EED20241.1| DUF431 domain protein [Talaromyces stipitatus ATCC 10500]
  misc_feature (6)..(209): NCBI GI: 261198965 Blast Desc: DUF431 domain-containing protein [Ajellomyces dermatitidis SLH14081] gi|239595036|gb|EEQ77617.1| DUF431 domain-containing protein [Ajellomyces dermatitidis SLH14081]
  misc_feature (1)..(209): NCBI GI: 225557731 Blast Desc: DUF431 domain-containing protein [Ajellomyces capsulatus G186AR]
MPIKKTYIVEHLDPELGPWSELEYTCIAKETGLAHSEFILSSLPPELASNLPEKLGIEQAFKAETKGVEELYSGDDRKKVCLLDPRAEKDLNPDDRGEFDAFLFGGILGDDPPRDRTSELRVKGFEGRRLGPVQMTTDTAVRVTRMVIEEQWTLKNIPYTDHPELKINEHESTEMPFRYVKGKDGEPVMPDGMVELIKTDADKSIQDLM

SEQ ID NO: 5351 - DNA, 2744 bp, Muscodor strobelii
  misc_feature: SGI EST ID NO. CUFF.14222.1
  misc_feature: Variant of the nucleotide sequence at SEQ ID NO 5349
aagcattcaaagcagagacgaaaggcgttgaggagttgtatagtggggacgacaggaaaaaggtctgtctgcttgatccgcgggcggagaaggatttgaatcctgatgataggggggaatttgatgcgtttctttttggaggcattctgggcgatgacccacctcgcgaccgtacctcggagcttcgcgtaaaaggcttcgaaggaagacgtttgggccccgtgcaaatgacgaccgataccgccgtccgcgtaacgcgaatggtcatcgaggagcaatggacattgaaaaacatcccctacacagaccaccccgagctaaaaatcaacgagcacgaaagcacagagatgccattccgctacgtaaaggggaaagatggggagccagtcatgccggacggcatggtggagcttatcaagacggatgctgataaaagtatccaggacttgatgtgattatgcaatcccatcaacaacgacgaggggataaaaggagaaaaaaaggggttggatctggacggagggaggtacgcgtgaaacatgggcggaaatggggcaaatgagttgagatgtcgagatttggcagaatgtgacttaaccacgattcgcctggtgcaggagtcaagtatcctacacctagctgtgaaaaagtagaagagaaatctataacttcaaaatgaagcatatcgaagataaaaaatgcagcgaaaccatcgtgaaccgtacgacatagtcaaagtgtagcgtttctttttattcatgggtatcgggaaacaattcgtaaaatgatcagtccaccccctgtggcggcgcaatattctcatccatatcgctcatctcttcgtcgtcatcttcatcggcgtctctgccattgtctaccgagtccgagtccgagtcttctccatcctctccatcctgatcgtcgtcctcgccatctggggtgtaatactgtatctgatcgacatcggcgtcgtcatcgacgtccatatcttcgtcattttcttcgtcatcttcctcttcaccatcctcatcttggtcgtcattgcccgtggcacttccctctgcgtcctcatctccaccatcaacgtcacgttcggtaggcgactcatccccatcctccccatcacttccatgcctagtcgtcttcccatcgcccccaatctcctccaaatcgccccaatgggccggtgtaggcatactcaaaatatcctcaccacccccctctacatcctcatccctctcaccctgccaatcttccctatgataccgtccaagcggcacgctcttcagattccacgccaacttcttgcccctactcctacttccctttttccgtcccgctctcgacctaccgcccgtcccctcttcatttctcagccgcctataaacatgactcgcaaggatcctaccacccctcggacccctcggtttcaaatacctgctgcgtttattggcgccctgcatacttcttgcaataaccgtgacctcgtccgtctcgcctttacgtttcttgatagccatgagattcgccaggaagttccgctggtcgattcgttcctcggtcgcgttcttatcgacgggaggtaggaccatggcgcttgttcgcatcgatgccaaggcgcgtttccgttcttgtgaggatcgcttgagtttcttctctacgacgttgatgcgtgccgaactcgcggctagtagatcgacggaatcggggaggtggcgcaaggaagggaggggtatgtgtgggtcgtgttgcgtgaggaggagctcggtggttgtgtttgtgtaccatttccccgtgaatattcgccccttgtaggagatcatgggttcggtggtgtggaggtcgaggatctggacgcgatctgggcctgtggttgctgagggtgttcggtctctatcgagttgtgatgtgtttacctcgttgtcgccctcgtcgttggagttatcggcctcggcgtcgggctcggcgtctgagttgctgctggaggtgccggggcgggcgtctttgcgtcggttgacgaaaccctccatggccttgtggacgggccaactgcctcgtgaggcgaaggggaggcgtgacttgccatactgtgatctgaagtcttccttggagagatcgagagtcacatagaacgtctgtgaggcagaatgtcagtcacgaaggccagcatctactgggactgcaatcacgtacttcggtctcgtttgtcgagtactcgtattcccattccgagtcatcgtcttggccgtctcgtgactgctgttgtgattgtgtttgtgagatcgatggaatgggaatgggatctcgagaatctagggtttgaatctgaggctggggtggctgctcggagtcgatgtccattttggcatcgtcctccgggagactttcagccaagctcgacatgttggagctggtgatggacgaggagtttcatcgaagtgagaattatagagatgtagacgctctttgcagcttcatgcgtagaattgaacactaagtgcctgcatgggatacggcatgtacaatgtcgaaatttagcgggtgaaatcaattacaagatagcggacttggagctggagataacctcgtccgaatctccaattgatctgcatggaatttcgacgtcagaaatacacgctaatgcacgaaccaaggtgaggtcgttgcctttttcagcgacaccctggcgcggtcaaaatgggcacaataggcacaacctcactaatggaggggtaaagatccaa

SEQ ID NO: 5352 - DNA, 996 bp, Muscodor strobelii
  misc_feature: SGI cDNA ID NO. 561497
  misc_feature: Encodes the peptide sequence at SEQ ID NO 5353
atggatcatcattccatcaaggctgagccgggcctgctgagggaccggctgcacgacgatgacgcccagattgccgatgcgcgcccgtcgtacaagtcgtggaagaagaagtatcgcaagatgcgcatcaccttcgactcccgcatgcgcgagagcgaggacctgcacagcgtcgagcagagggccatccgcaccgccaagcgcatcgccatcgagaacgatcgcttgcttgacttgctgctagacatcaacgattctccccagatccccttcgagcgccgcatcgatctcaccgtcgacgacgaagaggacgaagatgccaccgacaccgacaactccgagaacgcccagaagcccaccaagtctctcaagaagctcgtccagcaggtcccccacatgagctacaacgcctacgtctccaaatttcccgaggcattggaagatctggaccctaaggacgcccagacccatcccactgccttcctcaccgcagacgacgtcgacgagtatctataccatctcgacgcgcgtctcggtctcggtccccggcctacgcgcgcgccttctgtcgtcggtgccgcacccaccaaccctcaggccaacttcgctcttaagaacccaacatctgtctacaactggcttcgacgtcacgctcctaagacgtttctgcaggacctcgagaaagagaaggacaaggacaaagatgaccgcgataaagacgatggtcgtaagcgtaagagcaccgctaccaggggaaataggaagtctaccggtggccgcaaggaaaaggagcgcgagaaggagagagataatggcgagggtatggactgggaagaggagctggcgtatgatgcacccaaggggaagagaaagagagatgatgatggcgggtatcgaccaaagggtggttcgtctcgtccgactaagaagcgcaagagtaaggatctcgcctcttcgtcggctaaggcgcccaagtcgaggaaatctatgacttga

SEQ ID NO: 5353 - protein, 331 aa, Muscodor strobelii
  misc_feature: SGI Peptide ID NO. 561497
  misc_feature (13)..(321): NCBI GI: 85074557 Blast Desc: NCU03858 [Neurospora crassa OR74A] gi|28916874|gb|EAA26615.1| [Neurospora crassa OR74A]
  misc_feature (21)..(331): NCBI GI: 116201615 Blast Desc: CHGG_08692 [Chaetomium globosum CBS 148.51] gi|88177210|gb|EAQ84678.1| CHGG_08692 [Chaetomium globosum CBS 148.51]
  misc_feature (28)..(227): NCBI GI: 171678019 Blast Desc: protein product [Podospora anserina] gi|170937078|emb|CAP61737.1| protein product [Podospora anserina]
  misc_feature (30)..(329): NCBI GI: 39971903 Blast Desc: MGG_07267 [Magnaporthe grisea 70-15] gi|145019771|gb|EDK03999.1| MGG_07267 [Magnaporthe grisea 70-15]
  misc_feature (15)..(312): NCBI GI: 261351957 Blast Desc: conserved [Verticillium albo-atrum VaMs.102]
  misc_feature (41)..(329): NCBI GI: 256731868 Blast Desc: NECHADRAFT_40941 [Nectria haematococca mpVI 77-13-4]
  misc_feature (24)..(311): NCBI GI: 156055148 Blast Desc: SS1G_04925 [Sclerotinia sclerotiorum 1980] gi|154702710|gb|EDO02449.1| SS1G_04925 [Sclerotinia sclerotiorum 1980]
  misc_feature (28)..(331): NCBI GI: 46137661 Blast Desc: FG10346.1 [Gibberella zeae PH-1]
  misc_feature (29)..(329): NCBI GI: 154292197 Blast Desc: BC1G_14720 [Botryotinia fuckeliana B05.10] gi|150846271|gb|EDN21464.1| BC1G_14720 [Botryotinia fuckeliana B05.10]
  misc_feature (33)..(329): NCBI GI: 159128033 Blast Desc: conserved [Aspergillus fumigatus A1163]
MDHHSIKAEPGLLRDRLHDDDAQIADARPSYKSWKKKYRKMRITFDSRMRESEDLHSVEQRAIRTAKRIAIENDRLLDLLLDINDSPQIPFERRIDLTVDDEEDEDATDTDNSENAQKPTKSLKKLVQQVPHMSYNAYVSKFPEALEDLDPKDAQTHPTAFLTADDVDEYLYHLDARLGLGPRPTRAPSVVGAAPTNPQANFALKNPTSVYNWLRRHAPKTFLQDLEKEKDKDKDDRDKDDGRKRKSTATRGNRKSTGGRKEKEREKERDNGEGMDWEEELAYDAPKGKRKRDDDGGYRPKGGSSRPTKKRKSKDLASSSAKAPKSRKSMT

SEQ ID NO: 5354 - DNA, 2334 bp, Muscodor strobelii
  misc_feature: SGI EST ID NO. CUFF.14253.0
  misc_feature: Variant of the nucleotide sequence at SEQ ID NO 5352
gaaataacagtctattgaagtaacaggaaatcatttatgggttgcaagggttattcaacgggctgggagaatctaatttggtacttgtcgtgacgcattcaggcttgatactgccaactttacacatgtacatttgcggttggtaggaggtagctgcgtacacggttagccctgtgtcgtcgcgtctttggggtctgcatcctctgctctgcagaatagaagactgcgcatcggcgatacgaccccttccttcccaacagcctgtgacaagcctagaaaacggctgcagcctcactgtcttaccaacatttcatccacacgtctctggattgctctcctctcccggctatccatcccacccatcttcctcgcctccacgttgccagctcaagcagatacgcaggttccgtcttgcatcttggcgctttgcgaccatggatcatcattccatcaaggctgagccgggcctgctgagggaccggctgcacgacgatgacgcccagattgccgatgcgcgcccgtcgtacaagtcgtggaagaagaagtatcgcaagatgcgcatcaccttcgactcccgcatgcgcgagagcgaggacctgcacagcgtcgagcagagggccatccgcaccgccaagcgcatcgccatcgagaacgatcgcttgcttgacttgctgctagacatcaacgattctccccagatccccttcgagcgccgcatcgatctcaccgtcgacgacgaagaggacgaagatgccaccgacaccgacaactccgagaacgcccagaagcccaccaagtctctcaagaagctcgtccagcaggtcccccacatgagctacaacgcctacgtctccaaatttcccgaggcattggaagatctggaccctaaggacgcccagacccatcccactgccttcctcaccgcagacgacgtcgacgagtatctataccatctcgacgcgcgtctcggtctcggtccccggcctacgcgcgcgccttctgtcgtcggtgccgcacccaccaaccctcaggccaacttcgctcttaagaacccaacatctgtctacaactggcttcgacgtcacgctcctaagacgtttctgcaggacctcgagaaagagaaggacaaggacaaagatgaccgcgataaagacgatggtcgtaagcgtaagagcaccgctaccaggggaaataggaagtctaccggtggccgcaaggaaaaggagcgcgagaaggagagagataatggcgagggtatggactgggaagaggagctggcgtatgatgcacccaaggggaagagaaagagagatgatgatggcgggtatcgaccaaagggtggttcgtctcgtccgactaagaagcgcaagagtaaggatctcgcctcttcgtcggctaaggcgcccaagtcgaggaaatctatgacttgagctgtaagatggtctcatgtcatggatttgcgtccaggcctacgcggaaacacttgttgacgaaggggcgttacatggtactgctttctactcaacggcactcggacgaacggctacggtgtttgtatggttgtattgatatggtagaggctttttgtcgtcggacatcgtatgagactacacaacgacggcgacgttacgcatggcgcatggatcgtggatgtatcatacaggtctctttgacagctacttgtcttctgagggccctcatgtcactgggatgaggaatatagattaattgtacgaaaaggcaagaacgaatcgcatcactctaggatattaatgaaaggaaatcagtccagaaacatatctctattattttattttcctcttcaaatcttcatcctcaaagtcaggttgcttttgagcagagttgaaagtgtcatctagagatctatgatagcttccccaatgacgacagtacccaatcatctccgctctttgcaccacacgtggatcttttcaaccaccaccacactttagactcactcatgctaatattcgcactaacaagacttcaattctgcgaacttgattgccattgaggcactcttatgtctcagtgaatcgaaatcctcacctatctaacccaatcttagcaccacatcatctcacccactgcccccctcaaaaagcagtaactcccatctccctcaacccatcacctcacagcaaaagatgccgataaagaaaacctacatagtagagcatctcgacccagaactcggtccctggtccgagctagaatacacatgcatcgcgaaggaaaccggtctcgcgcacagcgagttcatactttcctccttaccgcctgaactcgcttctaatcttcctgagaaactcg

SEQ ID NO: 5355 - DNA, 1077 bp, Muscodor strobelii
  misc_feature: SGI cDNA ID NO. 561498
  misc_feature: Reduced expression when VOC is produced
  misc_feature: Encodes the peptide sequence at SEQ ID NO 5356
atgctccgcacactcgttagaatggccgaatcctctgcaaagcgcctcaaaaccgagggcagcgtcctcatcggcactcataacggccacttccacgccgacgaggctctggccgtccacatgctcagacagctgcccgcctactccaacgcctctctcgcccgcacccgcgatcccgccgtcctcgccacatgccacaccgtagtcgacgtcggcggcgagtacgaccccgagagaaaccgctacgaccaccatatgcgcaccttcaccaccaccttccccggccgccagaccaagctctcctccgccggcttggtctacatgcactttggcaagaccttggtggctcagcgcctgggaaaacctgaagactccgaagatgtaagcatcgtatggaataaggtctacgattctttcatcgaggctgtagatgcccacgacaacggcatcgacgtctacgatcccgccgctctctccgccgcagggattaccaagagattcaaagacggcggaaataaccttggcgcaatggttgcccgcttcaaccctgaatggaacgacgagatcccgtctgacccattcgctgcccaagccgccgaagacgctcggttctggaaggcatcaaccagaatcggtgaggaatttgacagagagcttgcgtataaagctcgctcctggctacctgcaagagagattgttaagaaggcatacgaaaagcgcaaggagtatgacgcgcaaggccggatcatggtgttcgacggccagtccgtaccatggaaggatcacctctacacccttgaggaagaggaaggcacagaaagcaaggtgctatacgtcttgtatccagagaaacccacgcccgacgccaagtggagaatccaagctgtgccagtcgctgatggttcgttcgagagtcgcaaagccttacctgagccatggagagggtcaagagatgagcagctggatgagaagtcgggtgttccaggcggtgtgttcgtacatgcttcaggattcatcggcggtaataagacgtttgagggtgctaaggcaatggctgataaggcctgcgagttctag

SEQ ID NO: 5356 - protein, 358 aa, Muscodor strobelii
  misc_feature: SGI Peptide ID NO. 561498
  misc_feature (21)..(357): Pfam Id: PF03690 Pfam Desc: Uncharacterised protein family (UPF0160)
  misc_feature (8)..(358): NCBI GI: 154300952 Blast Desc: BC1G_10614 [Botryotinia fuckeliana B05.10] gi|150856362|gb|EDN31554.1| BC1G_10614 [Botryotinia fuckeliana B05.10]
  misc_feature (8)..(358): NCBI GI: 156043107 Blast Desc: SS1G_10556 [Sclerotinia sclerotiorum 1980] gi|154694944|gb|EDN94682.1| SS1G_10556 [Sclerotinia sclerotiorum 1980]
  misc_feature (2)..(357): NCBI GI: 164426565 Blast Desc: MYG1 protein [Neurospora crassa OR74A] gi|157071388|gb|EAA26616.2| MYG1 protein [Neurospora crassa OR74A]
  misc_feature (8)..(358): NCBI GI: 116201613 Blast Desc: CHGG_08691 [Chaetomium globosum CBS 148.51] gi|88177209|gb|EAQ84677.1| CHGG_08691 [Chaetomium globosum CBS 148.51]
  misc_feature (8)..(357): NCBI GI: 256732052 Blast Desc: [Nectria haematococca mpVI 77-13-4]
  misc_feature (8)..(357): NCBI GI: 46136947 Blast Desc: FG09989.1 [Gibberella zeae PH-1]
  misc_feature (8)..(358): NCBI GI: 39971901 Blast Desc: MGG_07266 [Magnaporthe grisea 70-15] gi|145019770|gb|EDK03998.1| MGG_07266 [Magnaporthe grisea 70-15]
  misc_feature (21)..(356): NCBI GI: 261351958 Blast Desc: MYG1 [Verticillium albo-atrum VaMs.102]
  misc_feature (8)..(356): NCBI GI: 171678021 Blast Desc: protein product [Podospora anserina] gi|170937079|emb|CAP61738.1| protein product [Podospora anserina]
  misc_feature (2)..(358): NCBI GI: 226280446 Blast Desc: conserved [Paracoccidioides brasiliensis Pb01]
  misc_feature: Useful for introducing or modulating the production of volatile compounds
MLRTLVRMAESSAKRLKTEGSVLIGTHNGHFHADEALAVHMLRQLPAYSNASLARTRDPAVLATCHTVVDVGGEYDPERNRYDHHMRTFTTTFPGRQTKLSSAGLVYMHFGKTLVAQRLGKPEDSEDVSIVWNKVYDSFIEAVDAHDNGIDVYDPAALSAAGITKRFKDGGNNLGAMVARFNPEWNDEIPSDPFAAQAAEDARFWKASTRIGEEFDRELAYKARSWLPAREIVKKAYEKRKEYDAQGRIMVFDGQSVPWKDHLYTLEEEEGTESKVLYVLYPEKPTPDAKWRIQAVPVADGSFESRKALPEPWRGSRDEQLDEKSGVPGGVFVHASGFIGGNKTFEGAKAMADKACEF

SEQ ID NO: 5357 - DNA, 1453 bp, Muscodor strobelii
  misc_feature: SGI EST ID NO. CUFF.14256.0
  misc_feature: Variant of the nucleotide sequence at SEQ ID NO 5355
cctgcccactagatgtatgacaactaaatactctaccccccaccaagaattgtttccagcccatacaaacaggcacttacttccatcttcaactcaagacttacttcctccttctcccgagcccataccaactgcatgctccgcacactcgttagaatggccgaatcctctgcaaagcgcctcaaaaccgagggcagcgtcctcatcggcactcataacggccacttccacgccgacgaggctctggccgtccacatgctcagacagctgcccgcctactccaacgcctctctcgcccgcacccgcgatcccgccgtcctcgccacatgccacaccgtagtcgacgtcggcggcgagtacgaccccgagagaaaccgctacgaccaccatatgcgcaccttcaccaccaccttccccggccgccagaccaagctctcctccgccggcttggtctacatgcactttggcaagaccttggtggctcagcgcctgggaaaacctgaagactccgaagatgtaagcatcgtatggaataaggtctacgattctttcatcgaggctgtagatgcccacgacaacggcatcgacgtctacgatcccgccgctctctccgccgcagggattaccaagagattcaaagacggcggaaataaccttggcgcaatggttgcccgcttcaaccctgaatggaacgacgagatcccgtctgacccattcgctgcccaagccgccgaagacgctcggttctggaaggcatcaaccagaatcggtgaggaatttgacagagagcttgcgtataaagctcgctcctggctacctgcaagagagattgttaagaaggcatacgaaaagcgcaaggagtatgacgcgcaaggccggatcatggtgttcgacggccagtccgtaccatggaaggatcacctctacacccttgaggaagaggaaggcacagaaagcaaggtgctatacgtcttgtatccagagaaacccacgcccgacgccaagtggagaatccaagctgtgccagtcgctgatggttcgttcgagagtcgcaaagccttacctgagccatggagagggtcaagagatgagcagctggatgagaagtcgggtgttccaggcggtgtgttcgtacatgcttcaggattcatcggcggtaataagacgtttgagggtgctaaggcaatggctgataaggcctgcgagttctagagaaaagggaagaaaggagttagctggatgcaccggtggacctgtacatgcctctaggcccattgggcgaagcgagccatacgggtcagtagtatggtcatccaccatcatgtggaggattggcatagagaaaaatggcgttatgagatatgagaaatcacaaacacaaacccccaaagataaatcataggcagaatcatacgaaataataagtgtgtccgagttcatgaatataaattat

SEQ ID NO: 5358 - DNA, 501 bp, Muscodor strobelii
  misc_feature: SGI cDNA ID NO. 561499
  misc_feature: Encodes the peptide sequence at SEQ ID NO 5359
atgaacccccatcagaagaacaagatcgacgtctcgtccctgacccccgacgagcaacgcctcttccgcctctacggcaagctaccctccaaatccgaccacttcgccaagcacctgaaagagcgcaaatacttcgacagcggtgactacgccatgtccaaggccggcaaaggcgacaaactcgacaccggatccgtcggttctcagcaccccgtccccgagaacatcccccatctctcgtcgccctcgaacggcgtcccggctcatcagcaccatggtagtatcagtggaggtgtgagcggcggccaactgcatcaattgcaggctatgggcggtcaggcgagtggaagtccagtgaaggaaagcagttttttgaagagtgagactagtgcttcggaggatatggatgcagatgcagatggcaaggaggggggtgcggatggaaatgggaatgcgacgcctacccctgctgatgcgaaggggatccctattcgtagatag

SEQ ID NO: 5359 - protein, 166 aa, Muscodor strobelii
  misc_feature: SGI Peptide ID NO. 561499
  misc_feature (4)..(79): Pfam Id: PF04667 Pfam Desc: cAMP-regulated phosphoprotein/endosulfine conserved region
  misc_feature (4)..(60): Pfam Id: PF04667 Pfam Desc: cAMP-regulated phosphoprotein/endosulfine conserved region
  misc_feature (1)..(166): NCBI GI: 46136949 Blast Desc: FG09990.1 [Gibberella zeae PH-1]
  misc_feature (1)..(129): NCBI GI: 39971899 Blast Desc: MGG_07265 [Magnaporthe grisea 70-15] gi|145019769|gb|EDK03997.1| MGG_07265 [Magnaporthe grisea 70-15]
  misc_feature (1)..(164): NCBI GI: 156043105 Blast Desc: SS1G_10555 [Sclerotinia sclerotiorum 1980] gi|154694943|gb|EDN94681.1| SS1G_10555 [Sclerotinia sclerotiorum 1980]
  misc_feature (1)..(164): NCBI GI: 154300950 Blast Desc: BC1G_10613 [Botryotinia fuckeliana B05.10] gi|150856361|gb|EDN31553.1| BC1G_10613 [Botryotinia fuckeliana B05.10]
  misc_feature (1)..(137): NCBI GI: 116201611 Blast Desc: CHGG_08690 [Chaetomium globosum CBS 148.51] gi|88177208|gb|EAQ84676.1| CHGG_08690 [Chaetomium globosum CBS 148.51]
  misc_feature (1)..(166): NCBI GI: 171678023 Blast Desc: protein product [Podospora anserina] gi|170937080|emb|CAP61739.1| protein product [Podospora anserina]
  misc_feature (13)..(166): NCBI GI: 261351959 Blast Desc: conserved [Verticillium albo-atrum VaMs.102]
  misc_feature (1)..(166): NCBI GI: 226280443 Blast Desc: conserved [Paracoccidioides brasiliensis Pb01]
  misc_feature (1)..(166): NCBI GI: 240274153 Blast Desc: cAMP-regulated phosphoprotein family protein Igo1 [Ajellomyces capsulatus H143]
  misc_feature (1)..(166): NCBI GI: 225557733 Blast Desc: conserved [Ajellomyces capsulatus G186AR]
MNPHQKNKIDVSSLTPDEQRLFRLYGKLPSKSDHFAKHLKERKYFDSGDYAMSKAGKGDKLDTGSVGSQHPVPENIPHLSSPSNGVPAHQHHGSISGGVSGGQLHQLQAMGGQASGSPVKESSFLKSETSASEDMDADADGKEGGADGNGNATPTPADAKGIPIRR

SEQ ID NO: 5360 - DNA, 1316 bp, Muscodor strobelii
  misc_feature: SGI EST ID NO. CUFF.13616.0
  misc_feature: Variant of the nucleotide sequence at SEQ ID NO 5358
gctggtagtgccaaacgcaaccaccacaaggaccacaccaccacgggccacctcgaccacctctctgccatacaaacagacaaccacaccatcccagtgaatctagcgagcacaaccaccccattgaatctttacttacttaaggctgcacatcgattgattttacctcgcctgtcctcgctgcgcgcacgatcgcaagtctcaacgcgagtcgctcatcgatcctcccccctccgatacagctcgcgaacccctcctgcccaccatgaacccccatcagaagaacaagatcgacgtctcgtccctgacccccgacgagcaacgcctcttccgcctctacggcaagctaccctccaaatccgaccacttcgccaagcacctgaaagagcgcaaatacttcgacagcggtgactacgccatgtccaaggccggcaaaggcgacaaactcgacaccggatccgtcggttctcagcaccccgtccccgagaacatcccccatctctcgtcgccctcgaacggcgtcccggctcatcagcaccatggtagtatcagtggaggtgtgagcggcggccaactgcatcaattgcaggctatgggcggtcaggcgagtggaagtccagtgaaggaaagcagttttttgaagagtgagactagtgcttcggaggatatggatgcagatgcagatggcaaggaggggggtgcggatggaaatgggaatgcgacgcctacccctgctgatgcgaaggggatccctattcgtagatagattgggcgtgatggcaagataaggagagcgaacaagttcatttcttttgtttgggcggtatgatatctggttgacatagggcgtttgatttctcgacgggacggatctcggctgtgtacggcggtgacacaagccgcccactcgcttgcacaagacaagagaagaaacttcgtttctagtacatatatgtacgggagacgatatttgcctggccgatacaacaccacaggcgacatgagatgctttgctgagggacgccgatgaattattcacgaaacttcgttgtggtatctaggcgttggggggcgtttctacatttcgaggtatttcattttccgcacagaaagatgtgggatgagacgaagttgctaggtagtctgagtataccaatgcgacaaattgtatttgctacgttgctcattaagtccatgtgtacgctatacgctatagatcgcgatatggtgatgaaaatatgggaatatgttagatctgatttaggatgacagacggactaacgagcaatatggtgtcgtgtataagaatgataaaa

SEQ ID NO: 5361 - DNA, 1575 bp, Muscodor strobelii
  misc_feature: SGI cDNA ID NO. 561500
  misc_feature: Encodes the peptide sequence at SEQ ID NO 5362
atgaatccacatacctatcagctccttgtcggcgtcttcgcctcggtaggctcgatcctatacggctacgatctcggtgttatcgctggtgtagttggcagctctgcttttgccgaccacttcaaatcgaatgcagctcaaaatggtgcagtagtatccctcttcacaggcggtgccttcttcggtgccggtggtgcaggctatgccggcgattatctcggacgacggatgacgatcttggtcggttcgctcatattcatccttggcggaggtctgcagactggcgcacgcacaatcgaatatttgtatgccggtagagcgcttgctggcgctggtgttggatttttgactatgatcattcgtaagtatttagactgccaaaggctcgataattctgccctcagcccttttgccgtataccagagcgagatctcccatccatcaatccgaggacgtatcacagcgctccaacaattcatgctgggaatcggtgctctagtagcaggttggacaacatacgggtgttacacgaacctaaaagatgatggtcaatggcgaataccacttggaatccagatcattccagctgttgtactcgcagctcttatcctgctcttccctgagagtccacgttggcttatcgaccacaacaggagtgatgagggcctggcaacactcgcgaaactacattcacgaggtgatatcaatgacccatgggtccgcgcagaattcgaccaaatccaggaatctatctcatacgagcacgagcacgaagcgaaaagctacaaggaactattcgtaaacaaatcagcattccgccgtctcttcctagcctgcgcgatccaagcctcggtgcaagttacaggcgtctcggcgatccaatacttctccgtcacgatcttcggacaaatcggaatcggacccagcgacgcactcaagtatcaggctatcaacagtgtgctagcgctcattgcacaggcggcttgtatcttgtttattgataagtttggaagaagaccgacattcattgttggcatgttgtttaattgcatcttctttataatcgttactattttgctcgctctatttccgcctgagtcgggtgcgggcggtactgcaggttggggttttatcatcaccacatggctcttcaacatatcattctcattcgccaacggtcctctatcatggataatccccgccgaaatattcgacacgcacacgcgatccaagggtgtatcaatagcaacaatgacatcctacggcttcaacaccctaatcggacaagtgacgcaaatagccgtcgacagtgtgcactggcggtatttcctcctctttgccatcggaaacttcacaaacgccgtgtttttctacttagtactgccagagactaagttgttgccgctggaagagatgaattacctgttctctcatgcgccctggatcgtcgctgggaaggatccgaagacgtattcggctgatctagcggcggatgttgatcgacgggcgagggagatggctgagaagggaagtttggaggaacaccgggagggagagagggaacatggtgcgtga

SEQ ID NO: 5362 - protein, 524 aa, Muscodor strobelii
  misc_feature: SGI Peptide ID NO. 561500
  misc_feature (14)..(428): Pfam Id: PF07690 Pfam Desc: Major Facilitator Superfamily
  misc_feature (10)..(476): Pfam Id: PF00083 Pfam Desc: Sugar (and other) transporter
  misc_feature (142)..(428): Pfam Id: PF07690 Pfam Desc: Major Facilitator Superfamily
  misc_feature (14)..(124): Pfam Id: PF07690 Pfam Desc: Major Facilitator Superfamily
  misc_feature (139)..(476): Pfam Id: PF00083 Pfam Desc: Sugar (and other) transporter
  misc_feature (10)..(120): Pfam Id: PF00083 Pfam Desc: Sugar (and other) transporter
  misc_feature (1)..(521): NCBI GI: 154301749 Blast Desc: BC1G_10026 [Botryotinia fuckeliana B05.10] gi|150855688|gb|EDN30880.1| BC1G_10026 [Botryotinia fuckeliana B05.10]
  misc_feature (1)..(517): NCBI GI: 121702009 Blast Desc: MFS sugar transporter, [Aspergillus clavatus NRRL 1] gi|119397412|gb|EAW07843.1| MFS sugar transporter, [Aspergillus clavatus NRRL 1]
  misc_feature (1)..(509): NCBI GI: 67521638 Blast Desc: AN1276.2 [Aspergillus nidulans FGSC A4] gi|40746713|gb|EAA65869.1| AN1276.2 [Aspergillus nidulans FGSC A4] gi|259488401|tpe|CBF87810.1| TPA: MFS sugar transporter, FGSC
  misc_feature (1)..(509): NCBI GI: 255940274 Blast Desc: Pc16g05670 [Penicillium chrysogenum Wisconsin 54-1255] gi|211585529|emb|CAP93237.1| Pc16g05670 [Penicillium chrysogenum Wisconsin 54-1255]
  misc_feature (1)..(509): NCBI GI: 145239289 Blast Desc: An08g01720 [Aspergillus niger] gi|134076797|emb|CAK39852.1| protein product [Aspergillus niger]
  misc_feature (1)..(517): NCBI GI: 119496005 Blast Desc: MFS sugar transporter, [Neosartorya fischeri NRRL 181] gi|119412938|gb|EAW22879.1| MFS sugar transporter, [Neosartorya fischeri NRRL 181]
  misc_feature (24)..(517): NCBI GI: 169781832 Blast Desc: [Aspergillus oryzae RIB40] gi|83774121|dbj|BAE64246.1| protein product [Aspergillus oryzae]
  misc_feature (4)..(491): NCBI GI: 115491311 Blast Desc: conserved [Aspergillus terreus NIH2624] gi|114197143|gb|EAU38843.1| conserved [Aspergillus terreus NIH2624]
  misc_feature (3)..(514): NCBI GI: 169606071 Blast Desc: SNOG_06068 [Phaeosphaeria nodorum SN15] gi|160706910|gb|EAT87132.2| SNOG_06068 [Phaeosphaeria nodorum SN15]
  misc_feature (1)..(522): NCBI GI: 189197741 Blast Desc: sugar transporter STL1 [Pyrenophora tritici-repentis Pt-1C-BFP] gi|187981156|gb|EDU47782.1| sugar transporter STL1 [Pyrenophora tritici-repentis Pt-1C-BFP]
MNPHTYQLLVGVFASVGSILYGYDLGVIAGVVGSSAFADHFKSNAAQNGAVVSLFTGGAFFGAGGAGYAGDYLGRRMTILVGSLIFILGGGLQTGARTIEYLYAGRALAGAGVGFLTMIIRKYLDCQRLDNSALSPFAVYQSEISHPSIRGRITALQQFMLGIGALVAGWTTYGCYTNLKDDGQWRIPLGIQIIPAVVLAALILLFPESPRWLIDHNRSDEGLATLAKLHSRGDINDPWVRAEFDQIQESISYEHEHEAKSYKELFVNKSAFRRLFLACAIQASVQVTGVSAIQYFSVTIFGQIGIGPSDALKYQAINSVLALIAQAACILFIDKFGRRPTFIVGMLFNCIFFIIVTILLALFPPESGAGGTAGWGFIITTWLFNISFSFANGPLSWIIPAEIFDTHTRSKGVSIATMTSYGFNTLIGQVTQIAVDSVHWRYFLLFAIGNFTNAVFFYLVLPETKLLPLEEMNYLFSHAPWIVAGKDPKTYSADLAADVDRRAREMAEKGSLEEHREGEREHGA

SEQ ID NO: 5363 - DNA, 605 bp, Muscodor strobelii
  misc_feature: SGI EST ID NO. CUFF.13626.0
  misc_feature: Variant of the nucleotide sequence at SEQ ID NO 5361
tttggtaaattgtcaaacagtgaacaatcttctgacacctgcactgtatagccgtataccagagcgagatctcccatccatcaatccgaggacgtatcacagcgctccaacaattcatgctgggaatcggtgctctagtagcaggttggacaacatacgggtgttacacgaacctaaaagatgatggtcaatggcgaataccacttggaatccagatcattccagctgttgtactcgcagctcttatcctgctcttccctgagagtccacgttggcttatcgaccacaacaggagtgatgagggcctggcaacactcgcgaaactacattcacgaggtgatatcaatgacccatgggtccgcgcagaattcgaccaaatccaggaatctatctcatacgagcacgagcacgaagcgaaaagctacaaggaactattcgtaaacaaatcagcattccgccgtctcttcctagcctgcgcgatccaagcctcggtgcaagttacaggcgtctcggcgatccaatacttctccgtcacgatcttcggacaaatcggaatcggacccagcgacgcactcaagtatcaggctatcaacagtgtgctagcg

SEQ ID NO: 5364 - DNA, 1524 bp, Muscodor strobelii
  misc_feature: SGI cDNA ID NO. 561501
  misc_feature: Encodes the peptide sequence at SEQ ID NO 5365
atgcaccaccacctaaggcgaatcaccatcgtcgtccttgtctttatcttcattgcactgatcttgacatttctcccgcgtgccttggctcctgtgcctcctagcagagaaaaggtagaagccgaccagcgatggatcaacacgtctccacattggctcgacagacaggcctgccgctggtttgctctgtgtgggctgatgcatcgcaaagctgatcctccaacaagatctgagcaatgcgcaaacaacgcgcgacgagctgcgacaactatcgcccaccagcaggatagtagtagacgtcgagagagtaccagggttgatgagctgagaagcatacctgattatgtcctcacacatgctccactcgttcacttgtattctgaagagtacttctggccatctgatatcgaggatcacatcaaacacgtaaccccatactccgatgattcgccgttggaccaagtagatgcgctatcattgtctactttagatgcgctcaaccacaagacaggactactaaccttgaagagcaaagacaacgttgagtgtcgcccagcgtggctccatagcgccacgaacacaccagtcgtgaccgatcgtgagcctgatgattacgatgttgacattggaagtcccgagagaagaccgctagaggccgagacgacttggtttgacgtggatgagagtcatccgttgcgccgtatttctgacccgagaaagaagccgcagaacaatggtcatcctcaattaccgccgaaaggctctctcgtctcactctcccgcgagcagcgcagaatggccactcgagatgcaaatcacaagccggacgaggaaggatactcaaaagcgccagctacactaatcatagtagacaagggatcaggcattgttgacgcattctggttcttcttctacgcatacaatcttggccagacagtgttgggaactagatatgggaatcatgttggcgactgggaacatgccatggtacgcttcgagtcaggaacacctcgtgcggtctacttcagcgagcacgagggtggtcaagcgtatacttggcaggctgttgagaagcaagggaatgccacgcaagatcaaagaccagtcatctacagcgctgtcggaagtcatgctatgtacgccatgccagggactcacccatacgtactaccattcgaaatgcttaaagatattaccgatagaggccccctctgggatccatcaaagaactttcgtggatattggtacaaccacactggtggtgaagagtccgatgccttggtcccgacccgagagaacccggaagctcccatcggctggttccattacgaaggcagttggggcgataagatttacggtctagatgatggaagacaatggcggctgtttggccagtatcattatgtcactggtccgcaaggtcctaaattcaagaatctgggcagacggaaagtttgccagaaattcaggtgtcggatgatacacagtattgccgaaggcaagaagggaagctggttctcgtga

SEQ ID NO: 5365 - protein, 507 aa, Muscodor strobelii
  misc_feature: SGI Peptide ID NO. 561501
  misc_feature (8)..(506): NCBI GI: 46136941 Blast Desc: FG09986.1 [Gibberella zeae PH-1]
  misc_feature (15)..(506): NCBI GI: 256731805 Blast Desc: NECHADRAFT_61308 [Nectria haematococca mpVI 77-13-4]
  misc_feature (3)..(506): NCBI GI: 261351782 Blast Desc: vacuolar protein sorting-associated protein [Verticillium albo-atrum VaMs.102]
  misc_feature (1)..(506): NCBI GI: 85084837 Blast Desc: NCU07158 [Neurospora crassa OR74A] gi|28918474|gb|EAA28147.1| conserved [Neurospora crassa OR74A] gi|28950255|emb|CAD71121.1| conserved [Neurospora crassa]
  misc_feature (1)..(506): NCBI GI: 171676483 Blast Desc: protein product [Podospora anserina] gi|170936308|emb|CAP60966.1| protein product [Podospora anserina]
  misc_feature (5)..(505): NCBI GI: 154302312 Blast Desc: BC1G_09940 [Botryotinia fuckeliana B05.10] gi|150855428|gb|EDN30620.1| BC1G_09940 [Botryotinia fuckeliana B05.10]
  misc_feature (5)..(505): NCBI GI: 156055926 Blast Desc: SS1G_05315 [Sclerotinia sclerotiorum 1980] gi|154703099|gb|EDO02838.1| SS1G_05315 [Sclerotinia sclerotiorum 1980]
  misc_feature (7)..(486): NCBI GI: 154281487 Blast Desc: conserved [Ajellomyces capsulatus NAm1] gi|150411735|gb|EDN07123.1| conserved [Ajellomyces capsulatus NAm1]
  misc_feature (7)..(486): NCBI GI: 225563113 Blast Desc: vacuolar sorting-associated protein [Ajellomyces capsulatus G186AR]
  misc_feature (7)..(487): NCBI GI: 225680640 Blast Desc: vacuolar sorting protein [Paracoccidioides brasiliensis Pb03]
MHHHLRRITIVVLVFIFIALILTFLPRALAPVPPSREKVEADQRWINTSPHWLDRQACRWFALCGLMHRKADPPTRSEQCANNARRAATTIAHQQDSSRRRESTRVDELRSIPDYVLTHAPLVHLYSEEYFWPSDIEDHIKHVTPYSDDSPLDQVDALSLSTLDALNHKTGLLTLKSKDNVECRPAWLHSATNTPVVTDREPDDYDVDIGSPERRPLEAETTWFDVDESHPLRRISDPRKKPQNNGHPQLPPKGSLVSLSREQRRMATRDANHKPDEEGYSKAPATLIIVDKGSGIVDAFWFFFYAYNLGQTVLGTRYGNHVGDWEHAMVRFESGTPRAVYFSEHEGGQAYTWQAVEKQGNATQDQRPVIYSAVGSHAMYAMPGTHPYVLPFEMLKDITDRGPLWDPSKNFRGYWYNHTGGEESDALVPTRENPEAPIGWFHYEGSWGDKIYGLDDGRQWRLFGQYHYVTGPQGPKFKNLGRRKVCQKFRCRMIHSIAEGKKGSWFS

SEQ ID NO: 5366 - DNA, 2373 bp, Muscodor strobelii
  misc_feature: SGI EST ID NO. CUFF.13631.0
  misc_feature: Variant of the nucleotide sequence at SEQ ID NO 5364
ttgagtggctgtcgctatcaactccgtgctcaagtttgcgtctgttattgcggatgttgagccgcaatataggagaatactctagcaactcggtaatgtaatgatttagcatgaacagagactcacggcttaccccgagataggaatgtgacatttattctagtggtaccccggcaagtgtggctgagatctctgcctgagctgaggtagcccccccagacttgaccaacacaccaccaattgacgtatacctctcgttcaatctcgcgaaaagtagagttttgattgatttcgttgatttgcgtctgtgcgagtttgattcttcgttccccaggttcgcttgtgttctcacgcgttgcgctaccgcgtcgatttactacgccacacctatctttgctttggacctaacaccggctcgtggcttcacggtgtagctctgatgcaccaccacctaaggcgaatcaccatcgtcgtccttgtctttatcttcattgcactgatcttgacatttctcccgcgtgccttggctcctgtgcctcctagcagagaaaaggtagaagccgaccagcgatggatcaacacgtctccacattggctcgacagacaggcctgccgctggtttgctctgtgtgggctgatgcatcgcaaagctgatcctccaacaagatctgagcaatgcgcaaacaacgcgcgacgagctgcgacaactatcgcccaccagcaggatagtagtagacgtcgagagagtaccagggttgatgagctgagaagcatacctgattatgtcctcacacatgctccactcgttcacttgtattctgaagagtacttctggccatctgatatcgaggatcacatcaaacacgtaaccccatactccgatgattcgccgttggaccaagtagatgcgctatcattgtctactttagatgcgctcaaccacaagacaggactactaaccttgaagagcaaagacaacgttgagtgtcgcccagcgtggctccatagcgccacgaacacaccagtcgtgaccgatcgtgagcctgatgattacgatgttgacattggaagtcccgagagaagaccgctagaggccgagacgacttggtttgacgtggatgagagtcatccgttgcgccgtatttctgacccgagaaagaagccgcagaacaatggtcatcctcaattaccgccgaaaggctctctcgtctcactctcccgcgagcagcgcagaatggccactcgagatgcaaatcacaagccggacgaggaaggatactcaaaagcgccagctacactaatcatagtagacaagggatcaggcattgttgacgcattctggttcttcttctacgcatacaatcttggccagacagtgttgggaactagatatgggaatcatgttggcgactgggaacatgccatggtacgcttcgagtcaggaacacctcgtgcggtctacttcagcgagcacgagggtggtcaagcgtatacttggcaggctgttgagaagcaagggaatgccacgcaagatcaaagaccagtcatctacagcgctgtcggaagtcatgctatgtacgccatgccagggactcacccatacgtactaccattcgaaatgcttaaagatattaccgatagaggccccctctgggatccatcaaagaactttcgtggatattggtacaaccacactggtggtgaagagtccgatgccttggtcccgacccgagagaacccggaagctcccatcggctggttccattacgaaggcagttggggcgataagatttacggtctagatgatggaagacaatggcggctgtttggccagtatcattatgtcactggtccgcaaggtcctaaattcaagaatctgggcagacggaaagtttgccagaaattcaggtgtcggatgatacacagtattgccgaaggcaagaagggaagctggttctcgtgatcaaccaattttttgcacttcaaacatttgctagctcaaaaagatacccatttccagactcgtctttctcgtatcatagttattgacacattctagactcttccggtactcatgtgttttcgaccaccaacttactgcataccacaccctaatgctgaggccacgtgcatagcgactagtgtcgcatttaccaagcagcgcgccaacgtgtcggtaccttcgaaggctgaaagatcgtgcaggcgagagcttgaggcaacgtacgcgccatcaacaagcgaggtatgatcggttctggaccactgtccgggatgtggggaatccctgcaacacgccatggtgccaacgacaaccccagaaactcaaccagcgtctgctattggagcgcatgaatggtgaggtcgggcgtt

SEQ ID NO: 5367 - DNA, 1905 bp, Muscodor strobelii
  misc_feature: SGI cDNA ID NO. 561502
  misc_feature: Encodes the peptide sequence at SEQ ID NO 5368
atgtcgttggctactcgccctgaatttgcggctgcccgcgagatctacatcgttgatgtcgacctcatgaagtacatatgcgactttctcgacattcaatcggtagctcgactcgtccaggcttcaaagtctctgcgctgtaccctatttgagtatctcataaagagaatcgtcctatggcacaagaagacggatgtctggcaatgggatgccggcttgcagcaacgggtatttttacaggcacaggttccttggcaagactgggatttcgatatcaacactcgacgcttcagactggctaaccctattgtaacggcgatcaggtataagtggtcgatagatgccgtggagcaagtcatcaagattacgcgtgatttacacccgccaatgctggatgggatggatgaatgcgacattgacgatgcaattccgcccgttttcgtcgcagttgaagaagacagatccgacatcctgtctcttttagaagctaatggcgcggatctcaacctccgagagacttgccacttgcctccccaattctgcggctgcaaagatagcaacagatatcacaagacagacgatgtctccgccgccgatgttaagtcagaggttgattcacgagttgcaacaccaaggctttgcggcaagataattgatcgcgccatcgacaaggaaaatctaggcttaactactgccctcttagcaaggttggatctgcccttctactggaattctttggcaaaagcgttgacccagcggtggattcctggattccatgcaattgtcgcctcgggtcgcctttcaaagcgagaagtacaaatcgagctttcagaagcactgtgccagggaggagatcgatatcgctacccatacccggaagacacgccggagtggatagaaacactgatatcactgggagccgacccagagccaaagatcgccgataaacctgtagatggagcccgtctgccaaatgcgttagaaaatatgctcgagaggaatatgtggggtgacttatctggcgcattaaagctcctcgatcttgtgaagttccgcgacagtacattattgagagccatacgcatctgcactgaggacgacttttatctcaacgtcacaaagaagatcttgagcgatactgattttgtagcccgggcatacaaaaagatctttttggtcgcattcaaaagctattacttgccgagtccggaatgggaacctcatccgtggaaactcgaaacgcgaacgtatatattcaacgagcaaacaatacattttcttatatgttgcctcggaaagctgataaggcttgggaagatcatcggcttgactgagcctatctcgtctaactctagacgcactttactcgagtacgtcactggagctaccgccctcacagacatcagcaagtggtatccgcccaacgactggaccgtagctttattgcggatgggtgtggaagttggaccgccgagagactggtgctgcaagcaaaactatcgatcagcagtcttcaaatctattgcagttcaacaaggatggtcaggaaagccacaggtgtggaacacgcggacaagtcggtccgacatctttccagttttggccaaaattaagaaaaggaataagcagttcatgtaccaaggagggttcgtctctagactcagatggttttgccgtcactgcagatttccagaccccaaaccaagtggtggccgccgcgttaagagaacgaggacgatactaggtcagggcagagattttcgtctcgtatcacgccaggccagccgcgacgtaaagtacgcgcggcatcatctgtccgctgctggcggattccgccgtagttcccgtggtccaacttgtccacattgtctgaggccaatgaagctgcgcgaggatgatgattga

SEQ ID NO: 5368 - protein, 634 aa, Muscodor strobelii
  misc_feature: SGI Peptide ID NO. 561502
MSLATRPEFAAAREIYIVDVDLMKYICDFLDIQSVARLVQASKSLRCTLFEYLIKRIVLWHKKTDVWQWDAGLQQRVFLQAQVPWQDWDFDINTRRFRLANPIVTAIRYKWSIDAVEQVIKITRDLHPPMLDGMDECDIDDAIPPVFVAVEEDRSDILSLLEANGADLNLRETCHLPPQFCGCKDSNRYHKTDDVSAADVKSEVDSRVATPRLCGKIIDRAIDKENLGLTTALLARLDLPFYWNSLAKALTQRWIPGFHAIVASGRLSKREVQIELSEALCQGGDRYRYPYPEDTPEWIETLISLGADPEPKIADKPVDGARLPNALENMLERNMWGDLSGALKLLDLVKFRDSTLLRAIRICTEDDFYLNVTKKILSDTDFVARAYKKIFLVAFKSYYLPSPEWEPHPWKLETRTYIFNEQTIHFLICCLGKLIRLGKIIGLTEPISSNSRRTLLEYVTGATALTDISKWYPPNDWTVALLRMGVEVGPPRDWCCKQNYRSAVFKSIAVQQGWSGKPQVWNTRTSRSDIFPVLAKIKKRNKQFMYQGGFVSRLRWFCRHCRFPDPKPSGGRRVKRTRTILGQGRDFRLVSRQASRDVKYARHHLSAAGGFRRSSRGPTCPHCLRPMKLREDDD

SEQ ID NO: 5369 - DNA, 1917 bp, Muscodor strobelii
  misc_feature: SGI cDNA ID NO. 561503
  misc_feature: Encodes the peptide sequence at SEQ ID NO 5370
atggcttctcatttgcgaggcacgaccgtcgtatcaagagggtttcgatatttggatggatccggaccaaaaacccccgagccttgcacccaaggcgttgaggagcaatacccgccaccgccgcgaccaccacgcctgaggttaaagagacgtcaggtgtcccggctcaatgcacccactcaacaattcctcgcatccattgctgcggcagatatgcccatccctagtgttgaggatgattcgtccaatgccgaggaaacgataacttctctcgcggactgcgatacgggtggccccggcgcggaaccagtgaatcaacagggaacaccacaaatttcctcgcctccaaagacacccagccttgaaattgcgactttacagtctgccaccctccccgattggtaccttgattcaccatggagcgactccgatctggagtccagccccgattatgagctgagcaggccatcaactgctttttcaacacaaacaagttcgtcgttgttcagtatgtattcgcaaatcacagatgatgaaggtcgtgttcatccacaaacagaaatgaaggacgtccttgagccagatggagatatttaccggaccacgtcgccaaaaagcagaacccggaaagccccatggaccagagctatgagcgcacacttgtgggccacctacatgttatacctgtcggaccctcgagtgacgcctattcggcagggcaagagttgcataccaccccacggtgtttgtgcacgtgtggcgcgtcaagcccagagaagctggaaaggggccagaatgacagagagtgccgaagcaaggagtccatcaggcactcctacggcacagtcaagcaaaacatttatccaatggccacatacgccggcagcaacgcgcgctcatttaagggaactctgtagattaaagaccacgaacaagtcgggacatagcagctcagaaaatcctgctccctttaccaaagctgccagtcgacgctggaaccgtcgttatacaccagctcgatctgcatcagtcttctctgcacaagaaatggccatgtcgttaacccttagcacttcagacaccatgcagccccatggccctcttgcgcagctgactagctcgaaaccagagtgtgaacttgtcgacgcggttgagaaagcaacgacgccgtatcgcgacgtcgctgaaagtcgtccaatccgcgaggccgtggacattacctgcaataatcaagaactcgagacctccactattcaactcggatccccatttttcgctaaaagctatgggcctagctcttcagtatctcttgcggcaaagcttagcttacccaaacagtcaaatactatgggcgctcgcaagcttttgaaatcaccagtgcgtctcgctaattcgcgatccggaacacaaaaacggagatccgtcaaaggccatgaagagaagccttggaggcggccaagtttgacggcagcattcttccgagaaggttctcggaatgtagaacagctgctttcaaccccgtcgcgtgcggagtcagtaggacaacatcacatttccgccgttcaggagccttcagctccagtgcaaactaccatagtatactcatcggctagtaacctagatagcccccctgtccgatccacgacatcatttccaggaccctcatcacgtctcgggtcgccattctcagctattagttcaagccacagttttcccaacagactatcctcggcaagggacttcagtcttgccgctctgcgtcgacctttcgcgacagtgcagcaaccatcccacgtcaatgtagaaaacacgccgccgcgatcaagcttggcttctcgactggcttaccttgatcagcgcctcaaagacttccgcaatcgcggcagcgatcgtcgccgatctcagtcaccactgtga

SEQ ID NO: 5370 - protein, 638 aa, Muscodor strobelii
  misc_feature: SGI Peptide ID NO. 561503
  misc_feature (7)..(638): NCBI GI: 171696234 Blast Desc: protein product [Podospora anserina] gi|170948359|emb|CAP60523.1| protein product [Podospora anserina]
  misc_feature (23)..(638): NCBI GI: 256735186 Blast Desc: NECHADRAFT_98787 [Nectria haematococca mpVI 77-13-4]
  misc_feature (7)..(638): NCBI GI: 116181590 Blast Desc: CHGG_01423 [Chaetomium globosum CBS 148.51] gi|88185720|gb|EAQ93188.1| CHGG_01423 [Chaetomium globosum CBS 148.51]
  misc_feature (23)..(638): NCBI GI: 46108202 Blast Desc: FG00983.1 [Gibberella zeae PH-1]
  misc_feature (1)..(621): NCBI GI: 261357374 Blast Desc: conserved [Verticillium albo-atrum VaMs.102]
  misc_feature (4)..(632): NCBI GI: 156045323 Blast Desc: SS1G_09850 [Sclerotinia sclerotiorum 1980] gi|154694245|gb|EDN93983.1| SS1G_09850 [Sclerotinia sclerotiorum 1980]
  misc_feature (4)..(627): NCBI GI: 154305068 Blast Desc: BC1G_08624 [Botryotinia fuckeliana B05.10] gi|150853787|gb|EDN28979.1| BC1G_08624 [Botryotinia fuckeliana B05.10]
  misc_feature (11)..(630): NCBI GI: 145614592 Blast Desc: MGG_04526 [Magnaporthe grisea 70-15] gi|145021497|gb|EDK05626.1| MGG_04526 [Magnaporthe grisea 70-15]
  misc_feature (13)..(426): NCBI GI: 85115148 Blast Desc: NCU08610 [Neurospora crassa OR74A] gi|28926613|gb|EAA35582.1| NCU08610 [Neurospora crassa OR74A]
  misc_feature (13)..(462): NCBI GI: 238487928 Blast Desc: conserved [Aspergillus flavus NRRL3357] gi|220700081|gb|EED56420.1| conserved [Aspergillus flavus NRRL3357]
MASHLRGTTVVSRGFRYLDGSGPKTPEPCTQGVEEQYPPPPRPPRLRLKRRQVSRLNAPTQQFLASIAAADMPIPSVEDDSSNAEETITSLADCDTGGPGAEPVNQQGTPQISSPPKTPSLEIATLQSATLPDWYLDSPWSDSDLESSPDYELSRPSTAFSTQTSSSLFSMYSQITDDEGRVHPQTEMKDVLEPDGDIYRTTSPKSRTRKAPWTRAMSAHLWATYMLYLSDPRVTPIRQGKSCIPPHGVCARVARQAQRSWKGARMTESAEARSPSGTPTAQSSKTFIQWPHTPAATRAHLRELCRLKTTNKSGHSSSENPAPFTKAASRRWNRRYTPARSASVFSAQEMAMSLTLSTSDTMQPHGPLAQLTSSKPECELVDAVEKATTPYRDVAESRPIREAVDITCNNQELETSTIQLGSPFFAKSYGPSSSVSLAAKLSLPKQSNTMGARKLLKSPVRLANSRSGTQKRRSVKGHEEKPWRRPSLTAAFFREGSRNVEQLLSTPSRAESVGQHHISAVQEPSAPVQTTIVYSSASNLDSPPVRSTTSFPGPSSRLGSPFSAISSSHSFPNRLSSARDFSLAALRRPFATVQQPSHVNVENTPPRSSLASRLAYLDQRLKDFRNRGSDRRRSQSPL

SEQ ID NO: 5371 - DNA, 4250 bp, Muscodor strobelii
  misc_feature: SGI EST ID NO. CUFF.13640.0
  misc_feature: Variant of the nucleotide sequence at SEQ ID NO 5369
gcacgcttcgttggagtccaatcacttcaacccccacctcccgtcgcaatacccagaacgtcacaaacccagcttgtccacgttgcgtgcctcgtatccctattcccagcgctcgcagttgttagtcgaccactggatgcattggatacggcagtgtgggttcgtgactctccaactccatcgtccactcgcccacggcgacgcgtcccgggcagcacagtaagtcgttcaacgcctatcaagccaaccttggaatccatctcctccaagtccctctcgaagccatccttcccactcgccgccgatcgctgcatatgcacccggcactcatgcaagcctgtcgtggccgtctcctcgctggccacaagctgcatttcgagtgcatcagctttcgccgccgaccagacactcgactgtttccttgcctctcttcacactgcaccaggttgtgaccatccgcccccagtgcctctgtccctggacgcaggtcacaactgtccagtaacctacatgatccagcctccaccatttctgtctatctgcttcgaatctcctcctccctctggcgggagcgcctctggtccgacccttccagccctcatattattcaccctccagcagtctatcctcgcgttgatccccatcgttctaaactcgaatcagcgcgcccctggcggctcaccgtatgcacttgaccaggttccaactgaccgcttcatgttcccacagctgccactaggctcatccctatcactgtggggtaccagtcgagcttcggccccagcaagtctacttagcttgtgagctcctacagctacagtagtctaactaccgagccacggacttgccttaccgtgccgctcactgtgcaaacacgtcaactgagttcaaccactggcgagctggcactgcgccggctactatttgtcgctgccgccgttggacgctgggtttgcgctacccgctaggcgacgctgcccatgcccatgcacttgcgacttgacattctggtacgtgtactcactaggtaggaagcagcatgtgttcctcgcccccataccctgctctctgcaccgctacctcaatctatcacccttgacccccgtctgcctcctactttatccagcggccctctctctctccacgctcgccgttgcactcatctccttcagctttctgccagtcgctcattatctcgcctccctttccggagggcttttctatcagttcttagaaccggtagtttgcccttcgtgttgcatttgagctgcgttaacttcgcatcgccgccgcaaatgatttccatcctcgccatatcgctcccgtaatggtcctagagttgcgccatatctaaccggaactcagtgactaaacatcgctcaccaatacaagtctcatgttccaatctagcatcgcgatccgtcaacacaagttctcactatcgctgccttgagacatcattaatcgcacaagatacccggcaggacaattcgcgaagccattaatccatcagagtctcgcattcagttggccatgaacagtggaagctagataaagtcggcaattcgtgaaggtgattggaactcgtagagtcgtgtcaaccatctgtcggttccgatttttgggattgttctgtcgacttcaatcagcatcagtcgaaatggcttctcatttgcgaggcacgaccgtcgtatcaagagggtttcgatatttggatggatccggaccaaaaacccccgagccttgcacccaaggcgttgaggagcaatacccgccaccgccgcgaccaccacgcctgaggttaaagagacgtcaggtgtcccggctcaatgcacccactcaacaattcctcgcatccattgctgcggcagatatgcccatccctagtgttgaggatgattcgtccaatgccgaggaaacgataacttctctcgcggactgcgatacgggtggccccggcgcggaaccagtgaatcaacagggaacaccacaaatttcctcgcctccaaagacacccagccttgaaattgcgactttacagtctgccaccctccccgattggtaccttgattcaccatggagcgactccgatctggagtccagccccgattatgagctgagcaggccatcaactgctttttcaacacaaacaagttcgtcgttgttcagtatgtattcgcaaatcacagatgatgaaggtcgtgttcatccacaaacagaaatgaaggacgtccttgagccagatggagatatttaccggaccacgtcgccaaaaagcagaacccggaaagccccatggaccagagctatgagcgcacacttgtgggccacctacatgttatacctgtcggaccctcgagtgacgcctattcggcagggcaagagttgcataccaccccacggtgtttgtgcacgtgtggcgcgtcaagcccagagaagctggaaaggggccagaatgacagagagtgccgaagcaaggagtccatcaggcactcctacggcacagtcaagcaaaacatttatccaatggccacatacgccggcagcaacgcgcgctcatttaagggaactctgtagattaaagaccacgaacaagtcgggacatagcagctcagaaaatcctgctccctttaccaaagctgccagtcgacgctggaaccgtcgttatacaccagctcgatctgcatcagtcttctctgcacaagaaatggccatgtcgttaacccttagcacttcagacaccatgcagccccatggccctcttgcgcagctgactagctcgaaaccagagtgtgaacttgtcgacgcggttgagaaagcaacgacgccgtatcgcgacgtcgctgaaagtcgtccaatccgcgaggccgtggacattacctgcaataatcaagaactcgagacctccactattcaactcggatccccatttttcgctaaaagctatgggcctagctcttcagtatctcttgcggcaaagcttagcttacccaaacagtcaaatactatgggcgctcgcaagcttttgaaatcaccagtgcgtctcgctaattcgcgatccggaacacaaaaacggagatccgtcaaaggccatgaagagaagccttggaggcggccaagtttgacggcagcattcttccgagaaggttctcggaatgtagaacagctgctttcaaccccgtcgcgtgcggagtcagtaggacaacatcacatttccgccgttcaggagccttcagctccagtgcaaactaccatagtatactcatcggctagtaacctagatagcccccctgtccgatccacgacatcatttccaggaccctcatcacgtctcgggtcgccattctcagctattagttcaagccacagttttcccaacagactatcctcggcaagggacttcagtcttgccgctctgcgtcgacctttcgcgacagtgcagcaaccatcccacgtcaatgtagaaaacacgccgccgcgatcaagcttggcttctcgactggcttaccttgatcagcgcctcaaagacttccgcaatcgcggcagcgatcgtcgccgatctcagtcaccactgtgaagagcctccgacctgaggaatgtatcaggccgctaaaaccacgttcacgtcacagctgacttgatacgttgtatacctacgccaaatttctccagttctctcttacgacgtcaacgatttttctttctcacggcagatcaacatgcaccatgcacttgcctcacacgacgagccgaacatcttatgatttttgcaaaggatcgaggttctatggctacttcactcacctgatcttttccctttcttcgctctttcttgatgggttcgaaaaaataaattgatttcgcagctcgacaataatttgccacaaactttatgaatattttcttgacgattcgacgttttcagttgtctcgatacctcccggacgatcacttttttctgaacttacgagcattatgagaggatgactgataaaatgatatgagggttttggacgttcatgttcggatctacagtgacgacagatcaaacctccaaatagatgttggcgttctggccatgagggaggaaaagccatccatcttaaaaaaatacgaagacatgatatataggaatgaagacggccgaaaggcttaatcctaagaaaggataatttcgatgaaaatcgatcttctactggtacaattgtccagttgaagaatagtagaatgtcaactacgtataccacgat

SEQ ID NO: 5372 - DNA, 1218 bp, Muscodor strobelii
  misc_feature: SGI cDNA ID NO. 561504
  misc_feature: Reduced expression when VOC is produced
  misc_feature: Encodes the peptide sequence at SEQ ID NO 5373
atgtcgtcggctgagaacaaggcggccccaggtgccccttacttcacaccaagacaagacccccctgccggcagtgcactggatcttggaacagcaccaacactctttcaaccgttgcaaatccggggtatgaagctgcagaatcgctttgcggtggaagccaccgccgtgctgcaaaatgggcgcatatcgccagaagacagcggtctgtggaaggatagtcagatcccaccactgaagcgtatcggacatcgtgctgacctttttgtagtggacttttcccacgcacagggccagaaaattggcatccaactagcacatgctggacgcaaagcaagcaccgtcgcgccgtggctgcgccctaagggcagtcaagttgctcctacggagcatggcggatggccagacaatgtttgggccccgagtgcaatcaagttttccgaaacatatcccgaccctagggccatgactacagagaacattcacgaactcgtcttggcattcaaagatgcagcgagcagatcggttgcggctggcttcgattgcatcgaaattcatggggcgcatggctatctcataacagagttcctttcgccgattacaaatacacgaacggacacttatggcggtagtttcgagaatcgtacacgccttttattcgaggtaattgctgctgtgcgtgaagttattcccgatacgatgccactcttgctccgcctgtctgcgaccgagtggatggaatatgacaaatctaatcccgggtggacgattgaagacagtatcaagttagccaagctgttaccggcggcgggcattgatctactagatgtcagttcgggtgggaacaacgagaatcagaaaatcaaccttcattcttattatcaggttgacttagcgggtcgaatccgcgaggagttgcaaaacgacggtctcaagctattaataggcgcagtgggtatgatcaccaatgccgagatggcgcgttcgatcgttcaagctagtaagaacagtgcttcgtcaggtccaacgggaaatgactccgttgagattatcgaagatgtttcaggacagaccacaaaggccgacctggtgctcgctgctcgacagtttctccgcgagccagaattccctttgcgagttgctcatcagctaggtgtcgaggttcaatggccaatacagtaccatcgcgcaggctggccgagaaacgccaatatttag

SEQ ID NO: 5373 - protein, 405 aa, Muscodor strobelii
  misc_feature: SGI Peptide ID NO. 561504
  misc_feature (34)..(387): Pfam Id: PF00724 Pfam Desc: NADH:flavin oxidoreductase / NADH oxidase family
  misc_feature (53)..(280): Pfam Id: PF00724 Pfam Desc: NADH:flavin oxidoreductase / NADH oxidase family
  misc_feature (34)..(52): Pfam Id: PF00724 Pfam Desc: NADH:flavin oxidoreductase / NADH oxidase family
  misc_feature (6)..(405): NCBI GI: 39945174 Blast Desc: MGG_04569 [Magnaporthe grisea 70-15] gi|145021478|gb|EDK05607.1| MGG_04569 [Magnaporthe grisea 70-15]
  misc_feature (6)..(405): NCBI GI: 59802838 Blast Desc: NADH-dependent flavin oxidoreductase-like protein [Magnaporthe grisea]
  misc_feature (9)..(402): NCBI GI: 116180808 Blast Desc: CHGG_01032 [Chaetomium globosum CBS 148.51] gi|88185329|gb|EAQ92797.1| CHGG_01032 [Chaetomium globosum CBS 148.51]
  misc_feature (8)..(396): NCBI GI: 85114101 Blast Desc: NADPH dehydrogenase [Neurospora crassa OR74A] gi|28926428|gb|EAA35403.1| NADPH dehydrogenase [Neurospora crassa OR74A]
  misc_feature (9)..(405): NCBI GI: 171687397 Blast Desc: protein product [Podospora anserina] gi|170943660|emb|CAP69312.1| protein product [Podospora anserina]
  misc_feature (5)..(398): NCBI GI: 256734349 Blast Desc: [Nectria haematococca mpVI 77-13-4]
  misc_feature (2)..(402): NCBI GI: 46108728 Blast Desc: FG01246.1 [Gibberella zeae PH-1]
  misc_feature (17)..(398): NCBI GI: 256730049 Blast Desc: NECHADRAFT_45044 [Nectria haematococca mpVI 77-13-4]
  misc_feature (14)..(405): NCBI GI: 156059816 Blast Desc: SS1G_03921 [Sclerotinia sclerotiorum 1980] gi|154701707|gb|EDO01446.1| SS1G_03921 [Sclerotinia sclerotiorum 1980]
  misc_feature (6)..(401): NCBI GI: 169774157 Blast Desc: [Aspergillus oryzae RIB40] gi|83769409|dbj|BAE59544.1| protein product [Aspergillus oryzae]
  misc_feature (6)..(397): SWISSPROT Homolog: EC 1.6.99.1 NADPH dehydrogenase
  misc_feature: Useful for introducing or modulating the production of volatile compounds
MSSAENKAAPGAPYFTPRQDPPAGSALDLGTAPTLFQPLQIRGMKLQNRFAVEATAVLQNGRISPEDSGLWKDSQIPPLKRIGHRADLFVVDFSHAQGQKIGIQLAHAGRKASTVAPWLRPKGSQVAPTEHGGWPDNVWAPSAIKFSETYPDPRAMTTENIHELVLAFKDAASRSVAAGFDCIEIHGAHGYLITEFLSPITNTRTDTYGGSFENRTRLLFEVIAAVREVIPDTMPLLLRLSATEWMEYDKSNPGWTIEDSIKLAKLLPAAGIDLLDVSSGGNNENQKINLHSYYQVDLAGRIREELQNDGLKLLIGAVGMITNAEMARSIVQASKNSASSGPTGNDSVEIIEDVSGQTTKADLVLAARQFLREPEFPLRVAHQLGVEVQWPIQYHRAGWPRNANI

SEQ ID NO: 5374 - DNA, 1452 bp, Muscodor strobelii
  misc_feature: SGI EST ID NO. CUFF.13785.1
  misc_feature: Variant of the nucleotide sequence at SEQ ID NO 5372
ctgaactatcggatatcagaaaccagatcttttatcttaaagtcccgggccgcgcagcgaagtatcgtgaaaaataactaacgcgacacctttcgacctaccaggtggacttttcccacgcacagggccagaaaattggcatccaactagcacatgctggacgcaaagcaagcaccgtcgcgccgtggctgcgccctaagggcagtcaagttgctcctacggagcatggcggatggccagacaatgtttgggccccgagtgcaatcaagttttccgaaacatatcccgaccctagggccatgactacagagaacattcacgaactcgtcttggcattcaaagatgcagcgagcagatcggttgcggctggcttcgattgcatcgaaattcatggggcgcatggctatctcataacagagttcctttcgccgattacaaatacacgaacggacacttatggcggtagtttcgagaatcgtacacgccttttattcgaggtaattgctgctgtgcgtgaagttattcccgatacgatgccactcttgctccgcctgtctgcgaccgagtggatggaatatgacaaatctaatcccgggtggacgattgaagacagtatcaagttagccaagctgttaccggcggcgggcattgatctactagatgtcagttcgggtgggaacaacgagaatcagaaaatcaaccttcattcttattatcaggttgacttagcgggtcgaatccgcgaggagttgcaaaacgacggtctcaagctattaataggcgcagtgggtatgatcaccaatgccgagatggcgcgttcgatcgttcaagctagtaagaacagtgcttcgtcaggtccaacgggaaatgactccgttgagattatcgaagatgtttcaggacagaccacaaaggccgacctggtgctcgctgctcgacagtttctccgcgagccagaattccctttgcgagttgctcatcagctaggtgtcgaggttcaatggccaatacagtaccatcgcgcaggctggccgagaaacgccaatatttagatttgtcacctactttattccacgaagagtattcttgatagaggatcatttagaggggaaatcacacataccgtgcttagaataaactcacagctgcaaccctgctctagataatccttatagacataaatttactcataatgggctctcatttataattccttcagccttgcatggaactattatagtacaactcgctcgtcttccctcgagatgattcatgactcgactgagcatcctgagaccgatggaccaatcccatctgacactacttctctcgcattgtcgcaactacgcaagcaaaaagttcacgttcacttggcttttggcggatagcttttcccgtcgatttcaacctttggctcgcaggcctggtacccaagagcatcgcgttagtcac

SEQ ID NO: 5375 - DNA, 564 bp, Muscodor strobelii
  misc_feature: SGI cDNA ID NO. 561505
  misc_feature: Encodes the peptide sequence at SEQ ID NO 5376
atgacagtacccggaacggaaatccgacatgtgcagcaacttcatgtgaacacggtgagagtcgtggtggggacggaaagtgttgaatttctcataccaagacgaatcctagctgcgtgcatctattttcgcacccagatggacaaccgggaccaatgccgcctctccgatactcagacacacctcgtcctctatctcgaaggccagagtcctgacatgttcagattgtttgaatactggttgatggagcgcaagagtctcaataagcttattgacgatgccgaggctgacaggtcctgcgaggagttgcaatgggatttggtgaacctccacctctttgctgccagcattggcgaggaagccttgcaggacgtggcgatggacggaatccaggacgtgtatttgcgccgaaactggaatatcaaaccggagttagtccgctatgtgtatgcatgttgtcatacccaagagagttacaggctacgcaaatggatcgtcgcgatgcttgcatggacgctgggcagcgccgagacagatgagggcaaggtatgtttcttctcctaa

SEQ ID NO: 5376 - protein, 187 aa, Muscodor strobelii
  misc_feature: SGI Peptide ID NO. 561505
  misc_feature (18)..(177): NCBI GI: 171687399 Blast Desc: protein product [Podospora anserina] gi|170943661|emb|CAP69313.1| protein product [Podospora anserina]
  misc_feature (13)..(178): NCBI GI: 145614576 Blast Desc: MGG_04568 [Magnaporthe grisea 70-15] gi|145021479|gb|EDK05608.1| MGG_04568 [Magnaporthe grisea 70-15]
  misc_feature (19)..(181): NCBI GI: 116180810 Blast Desc: CHGG_01033 [Chaetomium globosum CBS 148.51] gi|88185330|gb|EAQ92798.1| CHGG_01033 [Chaetomium globosum CBS 148.51]
  misc_feature (17)..(186): NCBI GI: 261357373 Blast Desc: conserved [Verticillium albo-atrum VaMs.102]
  misc_feature (19)..(177): NCBI GI: 164424234 Blast Desc: NCU07450 [Neurospora crassa OR74A] gi|157070431|gb|EAA35401.2| [Neurospora crassa OR74A]
  misc_feature (1)..(173): NCBI GI: 46108204 Blast Desc: FG00984.1 [Gibberella zeae PH-1]
  misc_feature (21)..(173): NCBI GI: 256734472 Blast Desc: NECHADRAFT_98786 [Nectria haematococca mpVI 77-13-4]
MTVPGTEIRHVQQLHVNTVRVVVGTESVEFLIPRRILAACIYFRTQMDNRDQCRLSDTQTHLVLYLEGQSPDMFRLFEYWLMERKSLNKLIDDAEADRSCEELQWDLVNLHLFAASIGEEALQDVAMDGIQDVYLRRNWNIKPELVRYVYACCHTQESYRLRKWIVAMLAWTLGSAETDEGKVCFFS

SEQ ID NO: 5377 - DNA, 1901 bp, Muscodor strobelii
  misc_feature: SGI EST ID NO. CUFF.13650.0
  misc_feature: Variant of the nucleotide sequence at SEQ ID NO 5375
ggagatccctcgatggcaatgaagatgagtgcggcttggtctatcaatcgcactcggctgcgaagatggtgcctcaaaacgtcagcagctcgctatcgagtcttgaatgacttctaaagtaatttgctctcttgtcaattatttcattccacatactttcccactcacggactcattactacctggccttcgttgccttttattgtccccgtctgggtgaatgagtgagatttatgagccatgttcaaaaatgacagtacccggaacggaaatccgacatgtgcagcaacttccttagatgtgaacacggtgagagtcgtggtggggacggaaagtgttgaatttctcataccaagacgaatcctagctgcgtgcatctattttcgcacccagatggacaaccgggaccaatgccgcctctccgatactcagacacacctcgtcctctatctcgaaggccagagtcctgacatgttcagattgtttgaatactggttgatggagcgcaagagtctcaataagcttattgacgatgccgaggctgacaggtcctgcgaggagttgcaatgggatttggtgaacctccacctctttgctgccagcattggcgaggaagccttgcaggacgtggcgatggacggaatccaggacgtgtatttgcgccgaaactggaatatcaaaccggagttagtccgctatgtgtatgcatgttgtcatacccaagagagttacaggctacgcaaatggatcgtcgcgatgcttgcatggacgctgggcagcgccgagacagatgagggcaagtttcgagatttatttgacgattgcgccggattatgggaagaatacaacaaccacttgaacaaggtagcagcgagcaggctagaagttgatctaaaaaatccgcagctccggcttccatcgaaccagctgcggaacgaggagcgacagttcgggtatcggcagtgctcatttcattcgtaggtggttttttggggttgatagacaaacgcgacagtagccgagaggtactccatagcacgatgacatagaaaacagactaacgtacctttcacacactagacatcgatccaaggttggtcagggcgtgtgtcctcacagttattcgcacacaaccattctaccatcgcctttgacagatgagacaacggaaacagactcggaggacgaatcagcactggggttacaattaatttcgcctgtcgactggatctgatatcattttgacgtctctatccatcgggttgcatgcccgcagacagtggatattacgagcctgaaacaggcaagcgaggagaagaaaattaatcatggccaggtcctggacagtaaaggtctgttaatacctcgatttaagtaacattcaggcctacgtctaccagaccctgtcgaaaaggcaaccctgacgcagtttatggaggaggtacgcgccacaatgagaaagcgagtataatatatttccgacgcagtgatggcacggtcgataccaagtatcaaggtgtagccagctgctggtgttagtaataagttatttgctaatgataacataagccatgaaaacactacagacagaccagctcagagtgtattctaagctgtgaccatacataaactatatctttatacgagcttttagatgattattaaattactgaattcgcagtgccgcaacatgtgtacacgtaagcaactagtatcgcaatgcggataaaactgtacgatggcttcctaaactttctatatcgatcctggagagacgttaaggtttataccgcctttgaatacatccatgcaggctatattttactaccaacagcagaaaatgtcctcagggcaatcgcgttacttacttagcgatcagcgccaacctatggtagttttac

SEQ ID NO: 5378 - DNA, 348 bp, Muscodor strobelii
  misc_feature: SGI cDNA ID NO. 561506
  misc_feature: Reduced expression when VOC is produced
  misc_feature: Encodes the peptide sequence at SEQ ID NO 5379
atggaggagcacgacacaggtgaacctgccaacgacccggctctcgcgctccgccccatccacacccgtccgctcggctggcaagctgtgtctgcagatagcccagatacgccctcgcccaccatgttggccagatcgtgtctgcgctcggcccgcgccttcaatggccacgtcgcccaccgctccttcacctcgtcctcgtcctcgtcctcgcgcgccgccgagtcgcccttgaggctcaacctcgccgccgccgcctccaccgccctcgccctcggctccgtcgcctggtactaccatctctacgggccgaccgcccacgccatgacgcccgctgaggaagggtga

SEQ ID NO: 5379 - protein, 115 aa, Muscodor strobelii
  misc_feature: SGI Peptide ID NO. 561506
  misc_feature (42)..(115): NCBI GI: 117760 Blast Desc: CY1_NEUCR RecName: Full=Cytochrome c1, heme protein, mitochondrial; AltName: Full=Ubiquinol-cytochrome-c reductase complex cytochrome c1 subunit; Short=Cytochrome c-1; AltName: 4;
  misc_feature (42)..(115): NCBI GI: 85111062 Blast Desc: cytochrome c1, mitochondrial precursor [Neurospora crassa OR74A] gi|28925483|gb|EAA34520.1| cytochrome c1, mitochondrial precursor [Neurospora crassa OR74A]
  misc_feature (42)..(115): NCBI GI: 116180254 Blast Desc: cytochrome c1, heme protein, mitochondrial precursor [Chaetomium globosum CBS 148.51] gi|88185052|gb|EAQ92520.1| cytochrome c1, heme protein, mitochondrial precursor [Chaetomium
  misc_feature (42)..(115): NCBI GI: 225678193 Blast Desc: cytochrome c1 [Paracoccidioides brasiliensis Pb03]
  misc_feature (42)..(115): NCBI GI: 226279480 Blast Desc: cytochrome c1 [Paracoccidioides brasiliensis Pb01]
  misc_feature (42)..(115): NCBI GI: 226287691 Blast Desc: cytochrome c1 [Paracoccidioides brasiliensis Pb18]
  misc_feature (42)..(115): NCBI GI: 256734506 Blast Desc: [Nectria haematococca mpVI 77-13-4]
  misc_feature (42)..(115): NCBI GI: 156036208 Blast Desc: SS1G_12792 [Sclerotinia sclerotiorum 1980] gi|154698198|gb|EDN97936.1| SS1G_12792 [Sclerotinia sclerotiorum 1980]
  misc_feature (42)..(115): NCBI GI: 154314363 Blast Desc: cytochrome c1 haem protein [Botryotinia fuckeliana B05.10] gi|150848920|gb|EDN24113.1| cytochrome c1 haem protein [Botryotinia fuckeliana B05.10]
  misc_feature (65)..(115): NCBI GI: 240273365 Blast Desc: cytochrome c1 [Ajellomyces capsulatus H143]
  misc_feature: Useful for introducing or modulating the production of volatile compounds
MEEHDTGEPANDPALALRPIHTRPLGWQAVSADSPDTPSPTMLARSCLRSARAFNGHVAHRSFTSSSSSSSRAAESPLRLNLAAAASTALALGSVAWYYHLYGPTAHAMTPAEEG

SEQ ID NO: 5380 - DNA, 972 bp, Muscodor strobelii
  misc_feature: SGI cDNA ID NO. 561507
  misc_feature: Encodes the peptide sequence at SEQ ID NO 5381
atggtggcccgcggtgaggttatcggaagcaacctgcaattcagcaaactccattatgatgatgcaggaatcgttgcagtatttgccggcgcaactagcggtattggtgcgagaaccctcgagcggatggtgaaaatgtatcgtgctccgacgttctacgttctcggtcggtcaacttcgaaattcgagccccaacgccagaaactacaaaatctaaatcccgaatgtaagatcgtctttatcgaggttgatgtcgctttgatctcggctatcgacatggcctgtgcgcagatcaaggactccgagaacaaggtggactacttgtatatgagccagggtaggctgccgctgacgggtcctcaatacacgaaagagggccttgagtctggctttacattattctacgcctcacgcattcgccttctcttcaatctagtaccgctcttgaatctgtcagctcgcccgcgagtcctaactgtcctcaacggaggcagagaaacgtatatcaatgagagcgacattgggctggagagaacgtggtcttgggaagctgtcgtcaaccatgggaccttactgttgagtctcgccttggacaaggttgcacaagaaaatccaaatttcaccgtagtacataaccaacctggactcgtcaagtcagagaaccccagaccgccggtagagggggcttcgatcggtacaaagttgtacgctagcgttatccatggtatgctcgccgtgatgcgcctctttacgggacaatctccggcagaatctggagagcgacagacatatcacttaaccagtagccatttctcttctggttcgtttcgggttgataggttcagcgaggtcggcctagataatgctgcgctgaagcagtatcgagagagcaatttcatttccagggtctgggattttacgtctgcgacttgggcctcagctctcgctcatagccccggtatagcgcattag

SEQ ID NO: 5381 - protein, 323 aa, Muscodor strobelii
  misc_feature: SGI Peptide ID NO. 561507
  misc_feature (1)..(316): NCBI GI: 119501781 Blast Desc: NFIA_045700 [Neosartorya fischeri NRRL 181] gi|119415813|gb|EAW25750.1| conserved [Neosartorya fischeri NRRL 181]
  misc_feature (1)..(314): NCBI GI: 154292374 Blast Desc: BC1G_14676 [Botryotinia fuckeliana B05.10] gi|150846155|gb|EDN21348.1| BC1G_14676 [Botryotinia fuckeliana B05.10]
  misc_feature (23)..(272): NCBI GI: 238839983 Blast Desc: conserved [Microsporum canis CBS 113480]
  misc_feature (24)..(307): NCBI GI: 169779655 Blast Desc: [Aspergillus oryzae RIB40] gi|238500331|ref|XP_002381400.1| short-chain dehydrogenases/reductase, [Aspergillus flavus NRRL3357] protein
  misc_feature (24)..(315): NCBI GI: 67522278 Blast Desc: AN1596.2 [Aspergillus nidulans FGSC A4] gi|40745147|gb|EAA64303.1| AN1596.2 [Aspergillus nidulans FGSC A4] gi|259486927|tpe|CBF85184.1| TPA: conserved [Aspergillus FGSC
  misc_feature (1)..(316): NCBI GI: 115386890 Blast Desc: [Aspergillus terreus NIH2624] gi|114190984|gb|EAU32684.1| [Aspergillus terreus NIH2624]
  misc_feature (23)..(315): NCBI GI: 154290826 Blast Desc: BC1G_15452 [Botryotinia fuckeliana B05.10] gi|150847403|gb|EDN22596.1| BC1G_15452 [Botryotinia fuckeliana B05.10]
  misc_feature (1)..(315): NCBI GI: 115491029 Blast Desc: conserved [Aspergillus terreus NIH2624] gi|114197002|gb|EAU38702.1| conserved [Aspergillus terreus NIH2624]
  misc_feature (1)..(315): NCBI GI: 119494785 Blast Desc: NFIA_009810 [Neosartorya fischeri NRRL 181] gi|119412360|gb|EAW22301.1| conserved [Neosartorya fischeri NRRL 181]
  misc_feature (1)..(271): NCBI GI: 238506725 Blast Desc: short-chain dehydrogenases/reductase, [Aspergillus flavus NRRL3357] gi|220689277|gb|EED45628.1| short-chain dehydrogenases/reductase, [Aspergillus flavus NRRL3357]
MVARGEVIGSNLQFSKLHYDDAGIVAVFAGATSGIGARTLERMVKMYRAPTFYVLGRSTSKFEPQRQKLQNLNPECKIVFIEVDVALISAIDMACAQIKDSENKVDYLYMSQGRLPLTGPQYTKEGLESGFTLFYASRIRLLFNLVPLLNLSARPRVLTVLNGGRETYINESDIGLERTWSWEAVVNHGTLLLSLALDKVAQENPNFTVVHNQPGLVKSENPRPPVEGASIGTKLYASVIHGMLAVMRLFTGQSPAESGERQTYHLTSSHFSSGSFRVDRFSEVGLDNAALKQYRESNFISRVWDFTSATWASALAHSPGIAH

SEQ ID NO: 5382 - DNA, 546 bp, Muscodor strobelii
  misc_feature: SGI cDNA ID NO. 561508
  misc_feature: Encodes the peptide sequence at SEQ ID NO 5383
atgccggcctccacttctcctacaataccttgtatcggcagttacgatgatagacccggagtccgccgtcccagagcgctccggcgagagagaacgactccggccaggatgccggggtacttcacgccgccgttcccggcttatatggctcgctaccccgaatccaccaccaatctcgttatggcggtgtttggcaagcagttctctgctcgcagtaatgacaaccatatcagcgacgcattatcgaagctgacctcatttgtttcgtccgagttggccgacagttcaacccgtccccccttccatgagactgcttcctttgaagacgcaaggggctactataacgaaatgataattgcatactggtcaagcacggcggcttacaatcactggacacatgacaccggtttcaagcaatggtggggtgcgcttgaccctgaacaggagacaaatggttggcttatcgaaggcgttctcccttccatggaccgtgtcgagaccatatcctcccatgatagtgagccccaaggcgtcatacatctgtag

SEQ ID NO: 5383 - protein, 181 aa, Muscodor strobelii
  misc_feature: SGI Peptide ID NO. 561508
  misc_feature (24)..(181): NCBI GI: 226293713 Blast Desc: phenylacetaldoxime dehydratase [Paracoccidioides brasiliensis Pb18]
  misc_feature (24)..(181): NCBI GI: 226281534 Blast Desc: phenylacetaldoxime dehydratase [Paracoccidioides brasiliensis Pb01]
  misc_feature (24)..(181): NCBI GI: 116204105 Blast Desc: CHGG_09936 [Chaetomium globosum CBS 148.51] gi|88176064|gb|EAQ83532.1| CHGG_09936 [Chaetomium globosum CBS 148.51]
  misc_feature (24)..(181): NCBI GI: 261359769 Blast Desc: phenylacetaldoxime dehydratase [Verticillium albo-atrum VaMs.102]
  misc_feature (24)..(181): NCBI GI: 238838313 Blast Desc: phenylacetaldoxime dehydratase [Microsporum canis CBS 113480]
  misc_feature (24)..(181): NCBI GI: 261190142 Blast Desc: aldoxime dehydratase [Ajellomyces dermatitidis SLH14081] gi|239591309|gb|EEQ73890.1| aldoxime dehydratase [Ajellomyces dermatitidis SLH14081]
  misc_feature (24)..(181): NCBI GI: 239606370 Blast Desc: phenylacetaldoxime dehydratase [Ajellomyces dermatitidis ER-3]
  misc_feature (24)..(181): NCBI GI: 66043277 Blast Desc: phenylacetaldoxime dehydratase. [Pseudomonas syringae pv. syringae B728a] gi|63253984|gb|AAY35080.1| phenylacetaldoxime dehydratase [Pseudomonas syringae pv. syringae B728a]
  misc_feature (61)..(181): NCBI GI: 225678877 Blast Desc: phenylacetaldoxime dehydratase [Paracoccidioides brasiliensis Pb03]
  misc_feature (24)..(181): NCBI GI: 258635569 Blast Desc: phenylacetaldoxime dehydratase [Pantoea sp. At-9b] gi|258535199|gb|EEW03553.1| phenylacetaldoxime dehydratase [Pantoea sp. At-9b]
MPASTSPTIPCIGSYDDRPGVRRPRALRRERTTPARMPGYFTPPFPAYMARYPESTTNLVMAVFGKQFSARSNDNHISDALSKLTSFVSSELADSSTRPPFHETASFEDARGYYNEMIIAYWSSTAAYNHWTHDTGFKQWWGALDPEQETNGWLIEGVLPSMDRVETISSHDSEPQGVIHL

SEQ ID NO: 5384 - DNA, 549 bp, Muscodor strobelii
  misc_feature: SGI cDNA ID NO. 561509
  misc_feature: Encodes the peptide sequence at SEQ ID NO 5385
atggcggttctctctctgctgctttggtgttgcctgttgttgccaatggcagtagctttgcagacggcgcagcacttgtaccgaaactactgtatcgcgcgcaagattggtgtccgtttccatgttatccccatcagtcaccttaaccacttctggatgctcgtggaccgcgccgttctccgacacgtaaagaagatctttggcgaaagcactttcactcgatataattggatgggatgggaactacctgacaggtactcatcgcatcacgagctcggtgacgcttttatgcttgtgacgcccggtcgcaactggttatatctcggacatcctgacgtcgtggtcgatgtcgtccgcagaagagacgacttccctcggtgtgtcgaactcggacaggtcctcgacgtctttggaccttctgttggcagtgtcgaaggccagcgatgggcaaaccagagaaaaatcatgatgtcatgcttcaacgaacggtataacgagactgtctggtcggaaagtatcagtcaagcaaacgatatgatccgatactag

SEQ ID NO: 5385 - protein, 182 aa, Muscodor strobelii
  misc_feature: SGI Peptide ID NO. 561509
  misc_feature (1)..(182): NCBI GI: 171685276 Blast Desc: protein product [Podospora anserina] gi|170942599|emb|CAP68251.1| protein product [Podospora anserina]
  misc_feature (29)..(182): NCBI GI: 156031110 Blast Desc: SS1G_14163 [Sclerotinia sclerotiorum 1980] gi|154700554|gb|EDO00293.1| SS1G_14163 [Sclerotinia sclerotiorum 1980]
  misc_feature (1)..(182): NCBI GI: 154305693 Blast Desc: BC1G_07661 [Botryotinia fuckeliana B05.10] gi|150853180|gb|EDN28372.1| BC1G_07661 [Botryotinia fuckeliana B05.10]
  misc_feature (22)..(182): NCBI GI: 154314181 Blast Desc: BC1G_05184 [Botryotinia fuckeliana B05.10] gi|150848829|gb|EDN24022.1| BC1G_05184 [Botryotinia fuckeliana B05.10]
  misc_feature (12)..(180): NCBI GI: 238485360 Blast Desc: cytochrome P450, [Aspergillus flavus NRRL3357] gi|220698797|gb|EED55136.1| cytochrome P450, [Aspergillus flavus NRRL3357]
  misc_feature (12)..(180): NCBI GI: 169772033 Blast Desc: [Aspergillus oryzae RIB40] gi|83768345|dbj|BAE58484.1| protein product [Aspergillus oryzae]
  misc_feature (26)..(182): NCBI GI: 154310459 Blast Desc: BC1G_07150 [Botryotinia fuckeliana B05.10] gi|150851481|gb|EDN26674.1| BC1G_07150 [Botryotinia fuckeliana B05.10]
  misc_feature (72)..(182): NCBI GI: 169619481 Blast Desc: SNOG_12939 [Phaeosphaeria nodorum SN15] gi|160703834|gb|EAT79739.2| SNOG_12939 [Phaeosphaeria nodorum SN15]
  misc_feature (19)..(180): NCBI GI: 46110463 Blast Desc: FG02113.1 [Gibberella zeae PH-1]
  misc_feature (20)..(181): NCBI GI: 154310427 Blast Desc: BC1G_07134 [Botryotinia fuckeliana B05.10] gi|150851465|gb|EDN26658.1| BC1G_07134 [Botryotinia fuckeliana B05.10]
MAVLSLLLWCCLLLPMAVALQTAQHLYRNYCIARKIGVRFHVIPISHLNHFWMLVDRAVLRHVKKIFGESTFTRYNWMGWELPDRYSSHHELGDAFMLVTPGRNWLYLGHPDVVVDVVRRRDDFPRCVELGQVLDVFGPSVGSVEGQRWANQRKIMMSCFNERYNETVWSESISQANDMIRY

SEQ ID NO: 5386 - DNA, 177 bp, Muscodor strobelii
  misc_feature: SGI EST ID NO. CUFF.13668.0
  misc_feature: Variant of the nucleotide sequence at SEQ ID NO 5384
ctttggaccttctgttggcagtgtcgaaggccagcgatgggcaaaccagagaaaaatcatgatgtcatgcttcaacgaacggtataacgagactgtctggtcggaaagtatcagtcaagcaaacgatatgatccgatactagctggcccgaccatctattcgaactactgccgacga

SEQ ID NO: 5387 - DNA, 936 bp, Muscodor strobelii
  misc_feature: SGI cDNA ID NO. 561510
  misc_feature: Encodes the peptide sequence at SEQ ID NO 5388
atgtcttggcttcctcagaagtggcgtcaggtcggagaagccgtgacagcgttccgaaagttcatgaccgacatgtatgaagccgagaagaggagggtctcctctggcacatcatccgccgcaagcaatagtacattcttgtcgtctttagcgaaagcatcacttgatgcgaaatatggcgagggccttaccgaacaagagatctatggcaacatattcgttattaactttgctggccacgatacttcagcacacgttttcacattcgcggtatatttcctcgctgccaaccctcaagttcaagactggttgtctgaagagctgaaactagtactcgggaactcgtcaccagacaaatgggactacaaattgttccctcgtctcaagcgttgcctggccgtgctgtacgaaactattcgtctctatactcctgttcctgtcaccaagtggacaaaagacaagacacagacattgatagttggcgacaagactcttgttctgccaccaaacacaatgatgtgcctggcttattcatctttacaaactgaccctagatggtggggtgaagactccctgacctggcggccttctcgttttatccggtccaccgccaaatacagccaggaggtcggcaagcggtatccaggtgcctcgttctcggaagaggagttcatcgagccacggcgtggaacatttgtcggctggtctgaaggcacccgcgactgtcccgggcgtaaattttctcaggtcgagtttgtagcaactgtggcgtcactctttcgggactattctgtcgcccctgtgccattcgagggcgaaacagatgaggcgtcacggaaacgtgtgcttgatttgatcaagaacgattcaggcacggttttgttgcagcaaatgctgcatccggagcgagcaccacttgtctggagtaaaaggtaa

SEQ ID NO: 5388 - protein, 311 aa, Muscodor strobelii
  misc_feature: SGI Peptide ID NO. 561510
  misc_feature (1)..(146): Pfam Id: PF00067 Pfam Desc: Cytochrome P450
  misc_feature (3)..(311): NCBI GI: 171685276 Blast Desc: protein product [Podospora anserina] gi|170942599|emb|CAP68251.1| protein product [Podospora anserina]
  misc_feature (3)..(311): NCBI GI: 156031110 Blast Desc: SS1G_14163 [Sclerotinia sclerotiorum 1980] gi|154700554|gb|EDO00293.1| SS1G_14163 [Sclerotinia sclerotiorum 1980]
  misc_feature (3)..(311): NCBI GI: 154305693 Blast Desc: BC1G_07661 [Botryotinia fuckeliana B05.10] gi|150853180|gb|EDN28372.1| BC1G_07661 [Botryotinia fuckeliana B05.10]
  misc_feature (5)..(311): NCBI GI: 154310459 Blast Desc: BC1G_07150 [Botryotinia fuckeliana B05.10] gi|150851481|gb|EDN26674.1| BC1G_07150 [Botryotinia fuckeliana B05.10]
  misc_feature (1)..(301): NCBI GI: 156065225 Blast Desc: SS1G_00623 [Sclerotinia sclerotiorum 1980] gi|154691482|gb|EDN91220.1| SS1G_00623 [Sclerotinia sclerotiorum 1980]
  misc_feature (1)..(306): NCBI GI: 169785166 Blast Desc: [Aspergillus oryzae RIB40] gi|83775791|dbj|BAE65911.1| protein product [Aspergillus oryzae]
  misc_feature (1)..(306): NCBI GI: 238507582 Blast Desc: cytochrome P450, [Aspergillus flavus NRRL3357] gi|220688511|gb|EED44863.1| cytochrome P450, [Aspergillus flavus NRRL3357]
  misc_feature (4)..(310): NCBI GI: 238485360 Blast Desc: cytochrome P450, [Aspergillus flavus NRRL3357] gi|220698797|gb|EED55136.1| cytochrome P450, [Aspergillus flavus NRRL3357]
  misc_feature (12)..(308): NCBI GI: 154314181 Blast Desc: BC1G_05184 [Botryotinia fuckeliana B05.10] gi|150848829|gb|EDN24022.1| BC1G_05184 [Botryotinia fuckeliana B05.10]
  misc_feature (5)..(310): NCBI GI: 145246712 Blast Desc: An12g05360 [Aspergillus niger] gi|134080326|emb|CAK46248.1| protein product [Aspergillus niger]
  misc_feature (61)..(279): SWISSPROT Homolog: EC 1.14.13.15 Cholestanetriol 26-monooxygenase
MSWLPQKWRQVGEAVTAFRKFMTDMYEAEKRRVSSGTSSAASNSTFLSSLAKASLDAKYGEGLTEQEIYGNIFVINFAGHDTSAHVFTFAVYFLAANPQVQDWLSEELKLVLGNSSPDKWDYKLFPRLKRCLAVLYETIRLYTPVPVTKWTKDKTQTLIVGDKTLVLPPNTMMCLAYSSLQTDPRWWGEDSLTWRPSRFIRSTAKYSQEVGKRYPGASFSEEEFIEPRRGTFVGWSEGTRDCPGRKFSQVEFVATVASLFRDYSVAPVPFEGETDEASRKRVLDLIKNDSGTVLLQQMLHPERAPLVWSKR

SEQ ID NO: 5389 - DNA, 861 bp, Muscodor strobelii
  misc_feature: SGI EST ID NO. CUFF.13671.0
  misc_feature: Variant of the nucleotide sequence at SEQ ID NO 5387
tggcgagggccttaccgaacaagagatctatggcaacatattcgttattaactttgctggccacgatacttcagcacacgttttcacattcgcggtatatttcctcgctgccaaccctcaagttcaagactggttgtctgaagagctgaaactagtactcgggaactcgtcaccagacaaatgggactacaaattgttccctcgtctcaagcgttgcctggccgtgctgtacgaaactattcgtctctatactcctgttcctgtcaccaagtggacaaaagacaagacacagacattgatagttggcgacaagactcttgttctgccaccaaacacaatgatgtgcctggcttattcatctttacaaactgaccctagatggtggggtgaagactccctgacctggcggccttctcgttttatccggtccaccgccaaatacagccaggaggtcggcaagcggtatccaggtgcctcgttctcggaagaggagttcatcgagccacggcgtggaacatttgtcggctggtctgaaggcacccgcgactgtcccgggcgtaaattttctcaggtcgagtttgtagcaactgtggcgtcactctttcgggactattctgtcgcccctgtgccattcgagggcgaaacagatgaggcgtcacggaaacgtgtgcttgatttgatcaagaacgattcaggcacggttttgttgcagcaaatgctgcatccggagcgagcaccacttgtctggagtaaaaggtaatcagctgtgacatcgatagtagacttcgtccacttgggacaaggaaaggcagcgctcgtcggacccttggtttctctgcgtataatcacgctccagtgggg

SEQ ID NO: 5390 - DNA, 1527 bp, Muscodor strobelii
  misc_feature: SGI cDNA ID NO. 561511
  misc_feature: Encodes the peptide sequence at SEQ ID NO 5391
atgccgtctgtcgttactctctcgtgtggtcttattgctgctacctattgtttcttgcgtattctgttgcgcgccacacagaatgcccaggaaccgccggcaatcttgacggggattcccttcgctagtcccttcttgcacatggtcaaacacaaaacacgattgcatctccaactgagcgagaaacatcgacttccaatttacacgcttcgcatgccattcgtccggctttatgtcgtcaatgataccaatctaataccactcttgactcggcaatggcggacgattagtttcgccgccataacagccaatgcgggggctgtttgtggcatgagcaagcgggctctccagattatgacacatgatctagccaatgaaaaggggttcagcatcagctggcctaaatacattgcgccgtctttggcgccgggacccgaactcgatgccgtcaaccgaagatcagcagaggtcttatccgccgagatgagtaggcagcggagtcaaggcactgtgaggtccggcttgagagcatggtctcaacatatgatgatcaccgcgacgagcgaagctatatatggccccaaaaatccgtatcgcgatccagcgatattgacagcttggaaaacgttcgagacggattttctgacatttgttctatttccatgggcccttagattttctccttccggttatcgtgctcgtgaagctgttgcagcagctatgaaaagatacctccagcaaaatggccacgagcaagcgtccggacttgtccgtggacgctatgagcaccacactcaacggggacttgacctcgacgacctgagcagaggcgaaattggcaataccttcgccattcttgggaattccaccccctgcgcattttgggtgttgtatcaggtcttttcgcatgataaagttctgtcagatgtccgaggcgagataatggctctagcccgtcccgacaaagatggaaaaggccgctcctttgacctggctagcattcgcacggaatgccccatattgctgagcaccttccaagaaacgcttcgctaccgctctgttcttgcaggtccacgggtggttcttgaagatgccaatcttgacggcagatttttactcaagaaaggcagcattcttctgatcccatctgttgtgcaacactatagcattccagcgtggggtgaagatgcggataagtccaagcacacgcgctttatctctcaaccagggcgagaaaagcaaaatagagcggcatattgcccttttggaagtggtcataccctttgccccgggcgccatttcgcctctattgagatcatgatggtggttgcaatatgtattttgaattttgacgttgtaccggtcggtgggaagtggaccgagcctacgtgggagcgatcaccgtccggtgctagctttccaattccggacgaagatatatctgttgatttcgtcccaaggaaatgggatcacgcatggcggatctactattcggcctcagacgaacccatagagatgtggaaatga

SEQ ID NO: 5391 - protein, 508 aa, Muscodor strobelii
  misc_feature: SGI Peptide ID NO. 561511
  misc_feature (33)..(482): Pfam Id: PF00067 Pfam Desc: Cytochrome P450
  misc_feature (347)..(482): Pfam Id: PF00067 Pfam Desc: Cytochrome P450
  misc_feature (1)..(506): NCBI GI: 116214421 Blast Desc: CHGG_11051 [Chaetomium globosum CBS 148.51] gi|88175406|gb|EAQ82875.1| CHGG_11051 [Chaetomium globosum CBS 148.51]
  misc_feature (77)..(506): NCBI GI: 169624150 Blast Desc: SNOG_15328 [Phaeosphaeria nodorum SN15] gi|160705119|gb|EAT77261.2| SNOG_15328 [Phaeosphaeria nodorum SN15]
  misc_feature (1)..(488): NCBI GI: 225558023 Blast Desc: conserved [Ajellomyces capsulatus G186AR]
  misc_feature (1)..(492): NCBI GI: 225681045 Blast Desc: conserved [Paracoccidioides brasiliensis Pb03] gi|226292259|gb|EEH47679.1| conserved [Paracoccidioides brasiliensis Pb18]
  misc_feature (1)..(455): NCBI GI: 240273269 Blast Desc: cytochrome P450 oxidoreductase [Ajellomyces capsulatus H143]
  misc_feature (1)..(455): NCBI GI: 154280549 Blast Desc: [Ajellomyces capsulatus NAm1] gi|150411266|gb|EDN06654.1| [Ajellomyces capsulatus NAm1]
  misc_feature (1)..(490): NCBI GI: 145252772 Blast Desc: An16g05910 [Aspergillus niger] gi|134083453|emb|CAK46931.1| protein product [Aspergillus niger]
  misc_feature (49)..(506): NCBI GI: 169608169 Blast Desc: SNOG_07153 [Phaeosphaeria nodorum SN15] gi|160701581|gb|EAT85804.2| SNOG_07153 [Phaeosphaeria nodorum SN15]
  misc_feature (27)..(502): NCBI GI: 169609679 Blast Desc: SNOG_07932 [Phaeosphaeria nodorum SN15] gi|160701894|gb|EAT84208.2| SNOG_07932 [Phaeosphaeria nodorum SN15]
  misc_feature (31)..(500): NCBI GI: 154303094 Blast Desc: BC1G_09567 [Botryotinia fuckeliana B05.10] gi|150855030|gb|EDN30222.1| BC1G_09567 [Botryotinia fuckeliana B05.10]
  misc_feature (23)..(477): SWISSPROT Homolog: EC 1.14.13.100 25-hydroxycholesterol 7-alpha-hydroxylase
MPSVVTLSCGLIAATYCFLRILLRATQNAQEPPAILTGIPFASPFLHMVKHKTRLHLQLSEKHRLPIYTLRMPFVRLYVVNDTNLIPLLTRQWRTISFAAITANAGAVCGMSKRALQIMTHDLANEKGFSISWPKYIAPSLAPGPELDAVNRRSAEVLSAEMSRQRSQGTVRSGLRAWSQHMMITATSEAIYGPKNPYRDPAILTAWKTFETDFLTFVLFPWALRFSPSGYRAREAVAAAMKRYLQQNGHEQASGLVRGRYEHHTQRGLDLDDLSRGEIGNTFAILGNSTPCAFWVLYQVFSHDKVLSDVRGEIMALARPDKDGKGRSFDLASIRTECPILLSTFQETLRYRSVLAGPRVVLEDANLDGRFLLKKGSILLIPSVVQHYSIPAWGEDADKSKHTRFISQPGREKQNRAAYCPFGSGHTLCPGRHFASIEIMMVVAICILNFDVVPVGGKWTEPTWERSPSGASFPIPDEDISVDFVPRKWDHAWRIYYSASDEPIEMWK

SEQ ID NO: 5392 - DNA, 1808 bp, Muscodor strobelii
  misc_feature: SGI EST ID NO. CUFF.13678.0
  misc_feature: Variant of the nucleotide sequence at SEQ ID NO 5390
tgttgacgttggagaggggctgagaaggcaatgtcgtctctccggatccgtgcaggctgcgcagtcaatcttttctcctcggctttgatcgtttgctcttcttccttgagacctcaaacgaggagttcgtcggcctgtggacgtttcttagtgtcgttgacccacggtttcaaagcacaatgccgtctgtcgttactctctcgtgtggtcttattgctgctacctattgtttcttgcgtattctgttgcgcgccacacagaatgcccaggaaccgccggcaatcttgacggggattcccttcgctagtcccttcttgcacatggtcaaacacaaaacacgattgcatctccaactgagcgagaaacatcgacttccaatttacacgcttcgcatgccattcgtccggctttatgtcgtcaatgataccaatctaataccactcttgactcggcaatggcggacgattagtttcgccgccataacagccaatgcgggggctgtttgtggcatgagcaagcgggctctccagattatgacacatgatctagccaatgaaaaggggttcagcatcagctggcctaaatacattgcgccgtctttggcgccgggacccgaactcgatgccgtcaaccgaagatcagcagaggtcttatccgccgagatgagtaggcagcggagtcaaggcactgtgaggtccggcttgagagcatggtctcaacatatgatgatcaccgcgacgagcgaagctatatatggccccaaaaatccgtatcgcgatccagcgatattgacagcttggaaaacgttcgagacggattttctgacatttgttctatttccatgggcccttagattttctccttccggttatcgtgctcgtgaagctgttgcagcagctatgaaaagatacctccagcaaaatggccacgagcaagcgtccggacttgtccgtggacgctatgagcaccacactcaacggggacttgacctcgacgacctgagcagaggcgaaattggcaataccttcgccattcttgggaattccaccccctgcgcattttgggtgttgtatcaggtcttttcgcatgataaagttctgtcagatgtccgaggcgagataatggctctagcccgtcccgacaaagatggaaaaggccgctcctttgacctggctagcattcgcacggaatgccccatattgctgagcaccttccaagaaacgcttcgctaccgctctgttcttgcaggtccacgggtggttcttgaagatgccaatcttgacggcagatttttactcaagaaaggcagcattcttctgatcccatctgttgtgcaacactatagcattccagcgtggggtgaagatgcggataagtccaagcacacgcgctttatctctcaaccagggcgagaaaagcaaaatagagcggcatattgcccttttggaagtggtcataccctttgccccgggcgccatttcgcctctattgagatcatgatggtggttgcaatatgtattttgaattttgacgttgtaccggtcggtgggaagtggaccgagcctacgtgggagcgatcaccgtccggtgctagctttccaattccggacgaagatatatctgttgatttcgtcccaaggaaatgggatcacgcatggcggatctactattcggcctcagacgaacccatagagatgtggaaatgagtaacgcataactcctggattggataggaagctagtaaggtcctaagataggatattttatatgcatagtgaaacaatcccgagctttatgaagcgtcctca

SEQ ID NO: 5393 - DNA, 936 bp, Muscodor strobelii
  misc_feature: SGI cDNA ID NO. 561512
  misc_feature: Encodes the peptide sequence at SEQ ID NO 5394
atgacgcacaacaaggtcgtcatcatcggctctgggcccgctgcccacaccgccgccatctacctcgcccgtgccgagctcaagcccgtcctctatgagggcttcatggccaacggcatcgctgccggcggtcagctgacaacgaccaccgacatcgagaacttcccggaagacatgaagaaacaatccgagcgcttcggcaccaaggtcatatccgagaccatctccaagctcgacctctccgagcgccccttcaaattcgagaccgagtgggcccccggtgaggtccacaccgccgatgctattattttggccactggagcttctgccaaacgccttggtctctctggcgaggagaaatactggcaggctggtgttagcgcctgtgctgtctgcgatggtgccgtgcctatcttccgcaacaagcacctggtagtcatcggcggtggtgacagtgccgccgaggaagctacgttcctgacgaaatacggtagccacgtgaccgtcttggtgcggagagaccagctacgcgccagcaacatcatggccacgcgactattgaaccaccccaaggtcactgtacggttcaactccaagggcgtggagatcaagggcgacggcaagatcatgacgcagctcgtcgtcgaagacaccgtcacaggtgcgcaggagacgctggacgcaaacggcctattctacgccattggacacgatcccgctacaaatctcgtcaagggccagttggacactgactccgagggctacgttattactaagcccggtactccctgcactagtatcgaaggtgtgttcgctgctggtgatgtgcaagacaagagatatagacaggctatcacgagcgctggtacgggatgtatggcggccatggacgcagagaagttcattgctgagatggaggatggcgctaagctatag

SEQ ID NO: 5394 - protein, 311 aa, Muscodor strobelii
  misc_feature: SGI Peptide ID NO. 561512
  misc_feature (143)..(236): Pfam Id: PF00070 Pfam Desc: Pyridine nucleotide-disulphide oxidoreductase
  misc_feature (5)..(281): Pfam Id: PF07992 Pfam Desc: Pyridine nucleotide-disulphide oxidoreductase
  misc_feature (3)..(307): NCBI GI: 85117428 Blast Desc: thioredoxin reductase [Neurospora crassa OR74A] gi|1717779|sp|P51978.1|TRXB_NEUCR RecName: Full=Thioredoxin reductase gi|757510|dbj|BAA08090.1| NADPH thioredoxin reductase
  misc_feature (3)..(307): NCBI GI: 145613890 Blast Desc: MGG_01284 [Magnaporthe grisea 70-15] gi|145020904|gb|EDK05033.1| MGG_01284 [Magnaporthe grisea 70-15]
  misc_feature (3)..(307): NCBI GI: 256735432 Blast Desc: [Nectria haematococca mpVI 77-13-4]
  misc_feature (3)..(307): NCBI GI: 154321435 Blast Desc: thioredoxin reductase [Botryotinia fuckeliana B05.10] gi|150852130|gb|EDN27322.1| thioredoxin reductase [Botryotinia fuckeliana B05.10]
  misc_feature (1)..(306): NCBI GI: 115389708 Blast Desc: thioredoxin reductase [Aspergillus terreus NIH2624] gi|114194755|gb|EAU36455.1| thioredoxin reductase [Aspergillus terreus NIH2624]
  misc_feature (3)..(307): NCBI GI: 46107978 Blast Desc: FG00871.1 [Gibberella zeae PH-1]
  misc_feature (1)..(306): NCBI GI: 169764597 Blast Desc: [Aspergillus oryzae RIB40] gi|238504142|ref|XP_002383303.1| thioredoxin reductase Trr1/Trr2, [Aspergillus flavus NRRL3357] gi|83764624|dbj|BAE54768.1| protein
  misc_feature (1)..(308): NCBI GI: 145229941 Blast Desc: An01g08570 [Aspergillus niger] gi|134055392|emb|CAK43946.1| protein product [Aspergillus niger]
  misc_feature (1)..(308): NCBI GI: 242770128 Blast Desc: thioredoxin reductase Trr1/Trr2, [Talaromyces stipitatus ATCC 10500] gi|218725110|gb|EED24527.1| thioredoxin reductase Trr1/Trr2, [Talaromyces stipitatus ATCC 10500]
  misc_feature (1)..(307): NCBI GI: 119192500 Blast Desc: thioredoxin reductase [Coccidioides immitis RS] gi|240106065|gb|EER24258.1| Thioredoxin-disulfide reductase, [Coccidioides posadasii C735 delta SOWgp] thioredoxin reductase
  misc_feature (3)..(307): SWISSPROT Homolog: EC 1.8.1.9 Thioredoxin-disulfide reductase
MTHNKVVIIGSGPAAHTAAIYLARAELKPVLYEGFMANGIAAGGQLTTTTDIENFPEDMKKQSERFGTKVISETISKLDLSERPFKFETEWAPGEVHTADAIILATGASAKRLGLSGEEKYWQAGVSACAVCDGAVPIFRNKHLVVIGGGDSAAEEATFLTKYGSHVTVLVRRDQLRASNIMATRLLNHPKVTVRFNSKGVEIKGDGKIMTQLVVEDTVTGAQETLDANGLFYAIGHDPATNLVKGQLDTDSEGYVITKPGTPCTSIEGVFAAGDVQDKRYRQAITSAGTGCMAAMDAEKFIAEMEDGAKL

SEQ ID NO: 5395 - DNA, 1692 bp, Muscodor strobelii
  misc_feature: SGI EST ID NO. CUFF.14021.1
  misc_feature: Variant of the nucleotide sequence at SEQ ID NO 5393
ctcgcgcgagataattgtcagaaagattcccaaccgcagattcgctccttactgtatttcaaattcgaaccgcgctgttagatgcacattgtagagacagctcttgagaaaggatagatttgcatttgcgctcgagttattgctgcattgaaaatcttcatttgctgaaccaatcctccacacaacctgcagtttgctgtgtgtttgtaatagcttctcgaatcccacagtccattttcttcgcctcttccgaggtctacctacactacctacatatacctacataaccacacacatagtcgcataattcttcgtctcacggcctcggtcgacccacccgcatccatccatccatccatccatccatcgcacaccggcatccggcctccatccccccggttgcctcccctcctcgtacataagctcctgcctcccccaccgccgccaagctgttttcctcagccttccgacgattccctctccgcgcaggcgcatccggcttctctgtcgccgccctgtctgccgctaccattcattccaacacgagacaaaccgcaaatatctcccagaaagcgacaaaaggcatgacgcacaacaaggtcgtcatcatcggctctgggcccgctgcccacaccgccgccatctacctcgcccgtgccgagctcaagcccgtcctctatgagggcttcatggccaacggcatcgctgccggcggtcagctgacaacgaccaccgacatcgagaacttcccggtttccccaagggcatcatgggcggagagttgatggaagacatgaagaaacaatccgagcgcttcggcaccaaggtcatatccgagaccatctccaagctcgacctctccgagcgccccttcaaattcgagaccgagtgggcccccggtgaggtccacaccgccgatgctattattttggccactggagcttctgccaaacgccttggtctctctggcgaggagaaatactggcaggctggtgttagcgcctgtgctgtctgcgatggtgccgtgcctatcttccgcaacaagcacctggtagtcatcggcggtggtgacagtgccgccgaggaagctacgttcctgacgaaatacggtagccacgtgaccgtcttggtgcggagagaccagctacgcgccagcaacatcatggccacgcgactattgaaccaccccaaggtcactgtacggttcaactccaagggcgtggagatcaagggcgacggcaagatcatgacgcagctcgtcgtcgaagacaccgtcacaggtgcgcaggagacgctggacgcaaacggcctattctacgccattggacacgatcccgctacaaatctcgtcaagggccagttggacactgactccgagggctacgttattactaagcccggtactccctgcactagtatcgaaggtgtgttcgctgctggtgatgtgcaagacaagagatatagacaggctatcacgagcgctggtacgggatgtatggcggccatggacgcagagaagttcattgctgagatggaggatggcgctaagctatagatataaagtgatagaatcagaaagatatcattggtatagagcattgcgaaaagcatggataggcatgggcaatcaatagaatctttgcagagccatcgttgacgaattatgtgattgctacaggatcttaagttgca

SEQ ID NO: 5396 - DNA, 1077 bp, Muscodor strobelii
  misc_feature: SGI cDNA ID NO. 561513
  misc_feature: Reduced expression when VOC is produced
  misc_feature: Encodes the peptide sequence at SEQ ID NO 5397
atgaaggcttctagctggtctctcttctcgagctttgctctactcgctagcgccgcaccctatctcaagaacagagcgtccggcctgacagcagcccaattcgaggtcttccagtactacgctcaatatgccggagcagcatactgcaacagcgtgagcgccgtcggttccgctgtgacatgttccagccacgtctgcgatgatgtgcacgccaacggcgctaccatcctcgctacattcaaaggtagctcgaccgatattgagggtttcctcgcaagagatccgtgggaggaggtcttggtcgtttcattgagaggttcatcgaatctcaacaacttcatcacagatttctccttcttccaaaagacaagcgacctagtatcaggcggaaaaatacacacaggcttcgcactagcctggagcgaaatctccagctccgtcctctccgccctctcagcagcacacaagaaatacccgagctacgaaatagtcttcacagggcactctctaggcgcagcagtcgccacgatcggcggagcctacgcgcgcaaagccgggtacgccgtagacatggtgaactacgggtcacctcgcttcggcaaccaagccctagcgacctacgtttcgcaacaagcaggcgacacctggcgcatgacgcacctcaacgatcccgtaccacgcctcccgccaattctattcgggtacgcgcacacgtctcccgaattctggctctcggacggcgggtcaagtacgactgcgtatagcgtcggtgacgtagtgcagtgcaccgggtacacgagtacggcttgtaatggacataccctgggcctggatattattagtcatttgaattatctcgagtctatatcggggtgtaattcgcttaagttcatcttctcgaagcgggagttggatgtgctgaatttggcgaattatgatgagagcggaaggattttggaggagagggatacgagttatcagtggtacctcgctacagctcctgcgcacaatgttacgacggatcaacttacgacgcaggttaatcagtgggctagtcaggatgctgctggtaggtaa

SEQ ID NO: 5397 - protein, 358 aa, Muscodor strobelii
  misc_feature: SGI Peptide ID NO. 561513
  misc_feature (101)..(233): Pfam Id: PF01764 Pfam Desc: Lipase (class 3)
  misc_feature (22)..(326): NCBI GI: 1000397 Blast Desc: lipase [Fusarium heterosporum]
  misc_feature (7)..(326): NCBI GI: 39978263 Blast Desc: MGG_07016 [Magnaporthe grisea 70-15] gi|145013401|gb|EDJ98042.1| MGG_07016 [Magnaporthe grisea 70-15]
  misc_feature (22)..(297): NCBI GI: 148791375 Blast Desc: lipase [Fusarium oxysporum]
  misc_feature (22)..(285): NCBI GI: 261355494 Blast Desc: lipase [Verticillium albo-atrum VaMs.102]
  misc_feature (19)..(303): NCBI GI: 46123057 Blast Desc: FG05906.1 [Gibberella zeae PH-1]
  misc_feature (19)..(303): NCBI GI: 33621223 Blast Desc: extracellular lipase [Gibberella zeae]
  misc_feature (11)..(294): NCBI GI: 256731543 Blast Desc: NECHADRAFT_49364 [Nectria haematococca mpVI 77-13-4]
  misc_feature (22)..(314): NCBI GI: 11990253 Blast Desc: extracellular lipase [Nectria haematococca] gi|256721220|gb|EEU34629.1| [Nectria haematococca mpVI 77-13-4]
  misc_feature (11)..(294): NCBI GI: 116206442 Blast Desc: CHGG_02514 [Chaetomium globosum CBS 148.51] gi|88183111|gb|EAQ90579.1| CHGG_02514 [Chaetomium globosum CBS 148.51]
  misc_feature (1)..(322): NCBI GI: 85102605 Blast Desc: NCU03639 [Neurospora crassa OR74A] gi|12718379|emb|CAC28687.1| triacylglycerol lipase precursor [Neurospora crassa] gi|28922910|gb|EAA32130.1| NCU03639 crassa
  misc_feature (50)..(292): SWISSPROT Homolog: EC 3.1.1.3 Triacylglycerol lipase
  misc_feature: Useful for introducing or modulating the production of volatile compounds
MKASSWSLFSSFALLASAAPYLKNRASGLTAAQFEVFQYYAQYAGAAYCNSVSAVGSAVTCSSHVCDDVHANGATILATFKGSSTDIEGFLARDPWEEVLVVSLRGSSNLNNFITDFSFFQKTSDLVSGGKIHTGFALAWSEISSSVLSALSAAHKKYPSYEIVFTGHSLGAAVATIGGAYARKAGYAVDMVNYGSPRFGNQALATYVSQQAGDTWRMTHLNDPVPRLPPILFGYAHTSPEFWLSDGGSSTTAYSVGDVVQCTGYTSTACNGHTLGLDIISHLNYLESISGCNSLKFIFSKRELDVLNLANYDESGRILEERDTSYQWYLATAPAHNVTTDQLTTQVNQWASQDAAGR

SEQ ID NO: 5398 - DNA, 2604 bp, Muscodor strobelii
  misc_feature: SGI EST ID NO. CUFF.14343.1
  misc_feature: Variant of the nucleotide sequence at SEQ ID NO 5396
cagatcaaaggcttattctaactcccggtataaagtcgaaaagccttggcatccgatctccaatgtcttgtcctgcatggaagcgcgggccacatgtcttcctgcggggccacatcgtggggtttgagcttgataacaggtcaatccatcaattctggtcatgcgttttctaaattcttcttagtctatcacggaagaggcgtccaatcgaaagatgcaacaaaggggacagctcaaattaggcgccttgccgcttgagatgcgccatcggatgagccaatgctattccgacagactattggaaaactcgaaacaccagaacagcaggtcgcgacacaacatgtcacgctcaccgctgcgttggccattcttttcatcagattcggtgaactcaccaagcccaagcctccgggtcttgagacttagtcagatgagctagctcaataaagctgcacaactctaaatgttgacctgtcatgagtgcagtgcataaactcaaaagtcatttgactatgacgttgtcagcttattctcaacaatcaaagcaaacagtcattctaaaacgcgacgagtcgcctctcacgactcacgaattatttcaagtcagtgtactgccaggattccccgcacgaaggagcccgtcagagctctagaccacataagccagcgggattgacgatgccgaataaggcaggcaatctggggacattcaaggtacaatgccgaaagaagataaccattcgtcgactaagcgacagtcgaagtcgtgaaaacaatcttgcttaccttaacgatggtacccatggtagtgtagaaggacaaaaggcccgagaattggcgccttgaaattcgttaactatgctctttcgagtgcggacggccgcgttccaagccctccgtcggacgctctgcatcaacgccaacagggctcattgcagcatcgtgagcatcatggggttctaccacggatttccaacctcgctctatagcaaactcaaatctttgcatgtgagagctaatcgaacgcgatcatgggtgagacatcgtcggagctccggaatatatataagatgaagtctcacatcctttctctgcgagactgaaggagtcttcagcggccactctcgcattgggaagccgtgtcaatctcatagataggcccaacgtcaatatgaaggcttctagctggtctctcttctcgagctttgctctactcgctagcgccgcaccctatctcaagaacagagcgtccggcctgacagcagcccaattcgaggtcttccagtactacgctcaatatgccggagcagcatactgcaacagcgtgagcgccgtcggttccgctgtgacatgttccagccacgtctgcgatgatgtgcacgccaacggcgctaccatcctcgctacattcaaaggtagctcgaccgatattgagggtttcctcgcaagagatccgtgggaggaggtcttggtcgtttcattgagaggttcatcgaatctcaacaacttcatcacagatttctccttcttccaaaagacaagcgacctagtatcaggcggaaaaatacacacaggcttcgcactagcctggagcgaaatctccagctccgtcctctccgccctctcagcagcacacaagaaatacccgagctacgaaatagtcttcacagggcactctctaggcgcagcagtcgccacgatcggcggagcctacgcgcgcaaagccgggtacgccgtagacatggtgaactacgggtcacctcgcttcggcaaccaagccctagcgacctacgtttcgcaacaagcaggcgacacctggcgcatgacgcacctcaacgatcccgtaccacgcctcccgccaattctattcgggtacgcgcacacgtctcccgaattctggctctcggacggcgggtcaagtacgactgcgtatagcgtcggtgacgtagtgcagtgcaccgggtacacgagtacggcttgtaatggacataccctgggcctggatattattagtcatttgaattatctcgagtctatatcggggtgtaattcgcttaagttcatcttctcgaagcgggagttggatgtgctgaatttggcgaattatgatgagagcggaaggattttggaggagagggatacgagttatcagtggtacctcgctacagctcctgcgcacaatgttacgacggatcaacttacgacgcaggttaatcagtgggctagtcaggatgctgctggtaggtaagcggcattggatagatgtggtgcttgattattcgggctagcgaggagttatgatgattgagtcgggagttttatgattgacgacgatcatgactagagatagcgttgaagtcttgagctgtgtttctgggcgtggcggttttccgccattatgaatgtgcatggccagcaggcaaaattgagaatggcgatcaagagtctacctactttcttggggttgtgacattattcaaggcaggacatccgcgactacaaatcataagtagcataacacggtgtattatgtagaatattcttcggagcaaatgagacaggcaacgaatcttgagattaatggcagtaagtaaatatcacgac

SEQ ID NO: 5399 - DNA, 840 bp, Muscodor strobelii
  misc_feature: SGI cDNA ID NO. 561514
  misc_feature: Reduced expression when VOC is produced
  misc_feature: Encodes the peptide sequence at SEQ ID NO 5400
atggcgcctcagagcgaaatacccgtttctgccaatgtgcttgggacaataggaacgatcctctggttcacgcagttactcccgcaaatatggacaaattggcgcacaaaatccaccgaggggctacctgccagcatgatgttcctctgggctattagcggtgtgccatttggtatatatgctatcgtccagaacttcaatatcccgctgcagtgtcttttctacggtcgcgaacggtctctatggaaagtcatcctgacttgcggcgctacgggtgcaacatttgcaggggtagaagcggctctgattttgactatccggcctatctatagggccggcaatagcgtccctatcctcatcatcggcatcatcgccgctatcctcctcggcgcaggccttgttcccccgtacggcgaagcctggaagcggaagggtagaatcattggcattaacttcttattcttgacggttgactcgctaggcgcgttattcagtttattgagcttggtggtgcagaggacctttgatatacttgggggtgtgcagtatagtgttgtgatcttactagagctaggaatctttgcatcacacatcgtatggctactgagaacgcggacgataagaaaagaggcgaaggccgacggaaagactttcgatgatgtagcggcagatttcgaaagaagagggcagcatttcaagttcgctgagcggaatccgttgtcttggagacaatccgggaaagagaaatctgcgggcgatgttgaaatgggcagtggaagtggaagtgcgagcgagagggctggcgagaagggcggtagtaaggtgctagatgaaggatga

SEQ ID NO: 5400 - protein, 279 aa, Muscodor strobelii
  misc_feature: SGI Peptide ID NO. 561514
  misc_feature (10)..(73): Pfam Id: PF04193 Pfam Desc: PQ loop repeat
  misc_feature (1)..(238): NCBI GI: 164429749 Blast Desc: NCU02168 [Neurospora crassa OR74A] gi|157073603|gb|EAA35291.2| conserved [Neurospora crassa OR74A]
  misc_feature (5)..(271): NCBI GI: 242790625 Blast Desc: PQ loop repeat protein [Talaromyces stipitatus ATCC 10500] gi|218718178|gb|EED17598.1| PQ loop repeat protein [Talaromyces stipitatus ATCC 10500]
  misc_feature (5)..(273): NCBI GI: 212534600 Blast Desc: PQ loop repeat protein [Penicillium marneffei ATCC 18224] gi|210069855|gb|EEA23945.1| PQ loop repeat protein [Penicillium marneffei ATCC 18224]
  misc_feature (1)..(220): NCBI GI: 225683354 Blast Desc: [Paracoccidioides brasiliensis Pb03]
  misc_feature (1)..(227): NCBI GI: 119183842 Blast Desc: [Coccidioides immitis RS]
  misc_feature (1)..(270): NCBI GI: 189192416 Blast Desc: PQ loop repeat protein [Pyrenophora tritici-repentis Pt-1C-BFP] gi|187974153|gb|EDU41652.1| PQ loop repeat protein [Pyrenophora tritici-repentis Pt-1C-BFP]
  misc_feature (1)..(239): NCBI GI: 119479633 Blast Desc: PQ loop repeat protein [Neosartorya fischeri NRRL 181] gi|119407999|gb|EAW17948.1| PQ loop repeat protein [Neosartorya fischeri NRRL 181]
  misc_feature (9)..(230): NCBI GI: 68472047 Blast Desc: CaO19.6720 [Candida albicans SC5314] gi|68472282|ref|XP_719702.1| CaO19.14012 [Candida albicans SC5314] gi|46441531|gb|EAL00827.1| CaO19.14012 [Candida albicans
  misc_feature (9)..(230): NCBI GI: 241953867 Blast Desc: uncharacterized membrane protein ydr090c homologue, [Candida dubliniensis CD36] gi|223642995|emb|CAX43251.1| uncharacterized membrane protein ydr090c homologue, [Candida
  misc_feature (6)..(252): NCBI GI: 50547971 Blast Desc: YALI0C04884p [Yarrowia lipolytica] gi|49647322|emb|CAG81756.1| YALI0C04884p [Yarrowia lipolytica]
  misc_feature: Useful for introducing or modulating the production of volatile compounds
MAPQSEIPVSANVLGTIGTILWFTQLLPQIWTNWRTKSTEGLPASMMFLWAISGVPFGIYAIVQNFNIPLQCLFYGRERSLWKVILTCGATGATFAGVEAALILTIRPIYRAGNSVPILIIGIIAAILLGAGLVPPYGEAWKRKGRIIGINFLFLTVDSLGALFSLLSLVVQRTFDILGGVQYSVVILLELGIFASHIVWLLRTRTIRKEAKADGKTFDDVAADFERRGQHFKFAERNPLSWRQSGKEKSAGDVEMGSGSGSASERAGEKGGSKVLDEG

SEQ ID NO: 5401 - DNA, 2623 bp, Muscodor strobelii
  misc_feature: SGI EST ID NO. CUFF.14486.0
  misc_feature: Variant of the nucleotide sequence at SEQ ID NO 5399
cgataatggagaatttctgtatttgttagcgagcttaacagattgaatctgagcagtttcgcctcttgctttgaatttctcttggcgctgcgtacaatcggtgatcgacaaatgcggactgagctcctcgacgattgaggcttttgcgcgtatgtcgcggtcgagaaacgagaagatttcagtcttttcgggaggaaaataacatggcgcctcagagcgaaatacccgtttctgccaatgtgcttgggacaataggaacgatcctctggttcacgcagttactcccgcaaatatggacaaattggcgcacaaaatccaccgaggggctacctgccagcatgatgttcctctgggctattagcggtgtgccatttggtatatatgctatcgtccagaacttcaatatcccgctgcaggtccaaccccaggctttcatgttgctttgtctcgtcagttggtgacagtgtcttttctacggtcgcgaacggtctctatggaaagtcatcctgacttgcggcgctacgggtgcaacatttgcaggggtagaagcggctctgattttgactatccggcctatctatagggccggcaatagcgtccctatcctcatcatcggcatcatcgccgctatcctcctcggcgcaggccttgttcccccgtacggcgaagcctggaagcggaagggtagaatcattggcattaacttcttattcttgacggttgactcgctaggcgcgttattcagtttattgagcttggtggtgcagaggacctttgatatacttgggggtgtgcagtatagtgttgtgatcttactagagctaggaatctttgcatcacacatcgtatggctactgagaacgcggacgataagaaaagaggcgaaggccgacggaaagactttcgatgatgtagcggcagatttcgaaagaagagggcagcatttcaagttcgctgagcggaatccgttgtcttggagacaatccgggaaagagaaatctgcgggcgatgttgaaatgggcagtggaagtggaagtgcgagcgagagggctggcgagaagggcggtagtaaggtgctagatgaaggatgacgagaagacagaggtcgaataattcgatagtattagaagtagagtgtgtattaatctaaatcatgtaaaacttgctcttattgctggggtatacctatgggctcgtgggctttgcacggcgtcatcatgccaaaacggattctcgcttcatatcttcgaatagaaaacgcaatctctttccttatgacaagacaagagtgattgctctactcgatcagtggctcggttccttgggtctttaagtcctgaccctttccgccgtattcagccggcagttgagcaccgataggtaacttgctgccacagaagtcctccttggcgagacttcctccgttggacatgggatggaacttcttctataagactgtcagttgtgtcgcccaaaaaaaagtcgaatcacaaaagggagcatgaggatgtaacatacgatggtgcgggcagcgacgaaaagcttcatgaatccgtacataaaacccatcacagccggtacgttgacgaagaacttctccttgaggagctcagggtaagcagtggcaaagacgcggatagtttctgtgcttgccgctttcacggcaggggcttggcgtaagaacgatacgcccttgtagtcgtgtacttggaacatcttgtatggatctgtgtcgggatccgatgtgataggcttggtggcgctggagagattgagctcttgtacggcttgctccatcagggcaacacgccagcggatgaacctgttgcgtgtcagtaacttttgaggttgggtgattgggatgatgggtgagcgcactcgtccaaatcaccgaaagtgatgtcaatagatttcacatttccgtagatgttccatgtgaagatctctctagccgcagggtccgccttgtcgccgccctcactcgagtgcgtggtgacatatcccagagttccgaacttctccttagagtacttctgcttgaccagctcgagtggctgcatcttcttccgccaatccaaggtcttggtcaactgttccctggctttcacaagatctccatcgttggcgttgagatacttctgcagcacgatctgagaaggaatatgtgtggcaggatcagcaagagtcacaccccagatctccttgtactcgtgagctttggcgcatgcccatagctcttggattgatgacgtcggctcctccggaagtgaggctatcttgacccccttggtccctgaggtaggtccagtctcatccttgttctcaacgcctgtctctgctctggtgtcttcgggtttgtcatcagctggtgcaggtgcctctttggctttctcatctgcgattggcgcaggtgtagattgggctggctccgttggcgctaccaccggaaccacagcaggtgccggcgcggcgggggcagttggggttgtctctggttcacccatgttacgagctgaatgacgatgaagtggagtatgagagaacgcgaaagcgtgagtctaagtctagttcataagtcgctttaagagattgacgaaataaaatggacgagaggaggtcgtag

SEQ ID NO: 5402 - DNA, 1080 bp, Muscodor strobelii
  misc_feature: SGI cDNA ID NO. 561515
  misc_feature: Encodes the peptide sequence at SEQ ID NO 5403
atgggtgaaccagagacaaccccaactgcccccgccgcgccggcacctgctgtggttccggtggtagcgccaacggagccagcccaatctacacctgcgccaatcgcagatgagaaagccaaagaggcacctgcaccagctgatgacaaacccgaagacaccagagcagagacaggcgttgagaacaaggatgagactggacctacctcagggaccaagggggtcaagatagcctcacttccggaggagccgacgtcatcaatccaagagctatgggcatgcgccaaagctcacgagtacaaggagatctggggtgtgactcttgctgatcctgccacacatattccttctcagatcgtgctgcagaagtatctcaacgccaacgatggagatcttgtgaaagccagggaacagttgaccaagaccttggattggcggaagaagatgcagccactcgagctggtcaagcagaagtactctaaggagaagttcggaactctgggatatgtcaccacgcactcgagtgagggcggcgacaaggcggaccctgcggctagagagatcttcacatggaacatctacggaaatgtgaaatctattgacatcactttcggtgatttggacgagttcatccgctggcgtgttgccctgatggagcaagccgtacaagagctcaatctctccagcgccaccaagcctatcacatcggatcccgacacagatccatacaagatgttccaagtacacgactacaagggcgtatcgttcttacgccaagcccctgccgtgaaagcggcaagcacagaaactatccgcgtctttgccactgcttaccctgagctcctcaaggagaagttcttcgtcaacgtaccggctgtgatgggttttatgtacggattcatgaagcttttcgtcgctgcccgcaccatcaagaagttccatcccatgtccaacggaggaagtctcgccaaggaggacttctgtggcagcaagttacctatcggtgctcaactgccggctgaatacggcggaaagggtcaggacttaaagacccaaggaaccgagccactgatcgagtag

SEQ ID NO: 5403 - protein, 359 aa, Muscodor strobelii
  misc_feature: SGI Peptide ID NO. 561515
  misc_feature (247)..(314): Pfam Id: PF00650 Pfam Desc: CRAL/TRIO domain
  misc_feature (82)..(358): NCBI GI: 171679709 Blast Desc: protein product [Podospora anserina] gi|170939480|emb|CAP64708.1| protein product [Podospora anserina]
  misc_feature (86)..(359): NCBI GI: 39965900 Blast Desc: MGG_09991 [Magnaporthe grisea 70-15] gi|172044425|sp|A4R6K8.1|SFH5_MAGGR RecName: Full=Phosphatidylinositol transfer protein SFH5; Short=PITP SFH5
  misc_feature (28)..(359): NCBI GI: 116214475 Blast Desc: CHGG_11078 [Chaetomium globosum CBS 148.51] gi|121775492|sp|Q2GLX8.1|SFH5_CHAGB RecName: Full=Phosphatidylinositol transfer protein SFH5; Short=PITP SFH5
  misc_feature (5)..(358): NCBI GI: 85092929 Blast Desc: NCU02200 [Neurospora crassa OR74A] gi|74615589|sp|Q7S4C1.1|SFH5_NEUCR RecName: Full=Phosphatidylinositol transfer protein sfh-5; Short=PITP
  misc_feature (47)..(353): NCBI GI: 261361510 Blast Desc: patellin-4 [Verticillium albo-atrum VaMs.102]
  misc_feature (7)..(350): NCBI GI: 261202440 Blast Desc: phosphatidylinositol transfer protein SFH5 [Ajellomyces dermatitidis SLH14081] gi|239590531|gb|EEQ73112.1| phosphatidylinositol transfer protein SFH5 [Ajellomyces SLH14081]
  misc_feature (100)..(359): NCBI GI: 242792552 Blast Desc: CRAL/TRIO domain protein [Talaromyces stipitatus ATCC 10500] gi|242792557|ref|XP_002481978.1| CRAL/TRIO domain protein [Talaromyces stipitatus ATCC 10500] gi|218718565|gb|EED17985.1|
  misc_feature (7)..(350): NCBI GI: 239612257 Blast Desc: phosphatidylinositol transfer protein SFH5 [Ajellomyces dermatitidis ER-3]
  misc_feature (90)..(351): NCBI GI: 154309467 Blast Desc: BC1G_07204 [Botryotinia fuckeliana B05.10] gi|172052493|sp|A6S3N2.1|SFH5_BOTFB RecName: Full=Phosphatidylinositol transfer protein sfh5; Short=PITP sfh5
  misc_feature (12)..(350): NCBI GI: 145242780 Blast Desc: An09g06480 [Aspergillus niger] gi|171769784|sp|A2QUR1.1|SFH5_ASPNC RecName: Full=Phosphatidylinositol transfer protein sfh5; Short=PITP sfh5
MGEPETTPTAPAAPAPAVVPVVAPTEPAQSTPAPIADEKAKEAPAPADDKPEDTRAETGVENKDETGPTSGTKGVKIASLPEEPTSSIQELWACAKAHEYKEIWGVTLADPATHIPSQIVLQKYLNANDGDLVKAREQLTKTLDWRKKMQPLELVKQKYSKEKFGTLGYVTTHSSEGGDKADPAAREIFTWNIYGNVKSIDITFGDLDEFIRWRVALMEQAVQELNLSSATKPITSDPDTDPYKMFQVHDYKGVSFLRQAPAVKAASTETIRVFATAYPELLKEKFFVNVPAVMGFMYGFMKLFVAARTIKKFHPMSNGGSLAKEDFCGSKLPIGAQLPAEYGGKGQDLKTQGTEPLIE

SEQ ID NO: 5404 - DNA, 2530 bp, Muscodor strobelii
  misc_feature: SGI EST ID NO. CUFF.14487.1
  misc_feature: Variant of the nucleotide sequence at SEQ ID NO 5402
cctatattttccgacattcagtgacactgtctgtttcgccaacttttctcttcgaatctacgacctcctctcgtccattttatttcgtcaatctcttaaagcgacttatgaactagacttagactcacgctttcgcgttctctcatactccacttcatcgtcattcagctcgtaacatgggtgaaccagagacaaccccaactgcccccgccgcgccggcacctgctgtggttccggtggtagcgccaacggagccagcccaatctacacctgcgccaatcgcagatgagaaagccaaagaggcacctgcaccagctgatgacaaacccgaagacaccagagcagagacaggcgttgagaacaaggatgagactggacctacctcagggaccaagggggtcaagatagcctcacttccggaggagccgacgtcatcaatccaagagctatgggcatgcgccaaagctcacgagtacaaggagatctggggtgtgactcttgctgatcctgccacacatattccttctcagatcgtgctgcagaagtatctcaacgccaacgatggagatcttgtgaaagccagggaacagttgaccaagaccttggattggcggaagaagatgcagccactcgagctggtcaagcagaagtactctaaggagaagttcggaactctgggatatgtcaccacgcactcgagtgagggcggcgacaaggcggaccctgcggctagagagatcttcacatggaacatctacggaaatgtgaaatctattgacatcactttcggtgatttggacgagttcatccgctggcgtgttgccctgatggagcaagccgtacaagagctcaatctctccagcgccaccaagcctatcacatcggatcccgacacagatccatacaagatgttccaagtacacgactacaagggcgtatcgttcttacgccaagcccctgccgtgaaagcggcaagcacagaaactatccgcgtctttgccactgcttaccctgagctcctcaaggagaagttcttcgtcaacgtaccggctgtgatgggttttatgtacggattcatgaagcttttcgtcgctgcccgcaccatcaagaagttccatcccatgtccaacggaggaagtctcgccaaggaggacttctgtggcagcaagttacctatcggtgctcaactgccggctgaatacggcggaaagggtcaggacttaaagacccaaggaaccgagccactgatcgagtagagcaatcactcttgtcttgtcataaggaaagagattgcgttttctattcgaagatatgaagcgagaatccgttttggcatgatgacgccgtgcaaagcccacgagcccataggtataccccagcaataagagcaagttttacatgatttagattaatacacactctacttctaatactatcgaattattcgacctctgtcttctcgtcatccttcatctagcaccttactaccgcccttctcgccagccctctcgctcgcacttccacttccactgcccatttcaacatcgcccgcagatttctctttcccggattgtctccaagacaacggattccgctcagcgaacttgaaatgctgccctcttctttcgaaatctgccgctacatcatcgaaagtctttccgtcggccttcgcctcttttcttatcgtccgcgttctcagtagccatacgatgtgtgatgcaaagattcctagctctagtaagatcctacacacgtcgttagtacatctcccataatcttgatcgtgatacagtccgaacaggatcagtgatatcgtaagacctacacaacactatactgcacacccccaagtatatcaaaggtcctctgcaccaccaagctcaataaactgaataacgcgcctagcgagtcaaccgtcaagaataagaagttaatgccaatgattctacccttccgcttccaggcttcgccgtacgggggaacaaggcctgcgccgaggaggatagcggcgatgatgccgatgatgaggatagggacgctattgccggccctatagataggctaggtcgtgctatcgtcagatctaagagtcggcaacatcggcgagagaaacagaatgttggagatgacctacccggatagtcaaaatcagagccgcttctacccctgcaaatgttgcacccgtagcgccgcaagtcaggatgactttccatagagaccgttcgctatcatcacatctcatcagctattcgcaccttaaatccggccctcaccacctacaggttcgaacataccgaccgtagaaaagacactgtcaccaactgacgagacaaagcaacatgaaagcctggggttggacctgcagcgggatattgaagttctggacgatagcatatataccaaatggcacaccgctaatagcccagaggaacatcatgctggcaggtagcccctcggtggattttgtgcgccaatttgtccatatttgcgggagtaactgcgtgaaccagaggatcgttcctattgtcta

SEQ ID NO: 5405 - DNA, 1596 bp, Muscodor strobelii
  misc_feature: SGI cDNA ID NO. 561516
  misc_feature: Encodes the peptide sequence at SEQ ID NO 5406
atgatccaaggcatcttctacgcaagatttcttccgcaagaaggaactaagatcgtagcgcagtcacccccaggctgcattgtagctacagagtatgccccagatcttaagccaccactagtagacttcgatatcgtgcaggaatacataattcctcgcaaagctttcttcaatcggttcgtgacggttaacacgcctgaagggaaacatagcatcctcgggtttcccgtctcaatacctcatgagcggtatcatcgaaatgagttcatattcaatttcggattagtcattgaatccgatgtagaccaaatcccctacgaacgccttgtgcgccgtctcgccgttacgttcgcagagatggagcgtcagaatgggtatttgagtagcgagggccatgtcgacgatgggcggcgcccgattgcaagcttgctggaaatcgtgaaagaggacttgaataactacggagaatgcatgattccgatcgatgaggcaaacacaatcaacatgaagctcttcccttaccacgctccgccccccaatattcacggctggcatgttccagtgcctaaggcgaaactggcggacatagtagatccgacatgggacctgacactgcaacggatcataccacatgtcgatggcgtgaatgacacgcggcgtattgcatggctagctgacgtttcgctaccgttgacccagtgtgctttgcagcatcttctttactatgacacgatcttactcctcgatatgttcttcttcggaacatgctacgccccacgccccgggatacacgatttcgttgcaaaccgtagtggtatgatcgacgaatgcgcggcgtacgtcagtatctcaaacctcgtgtcgacgcgcgagaatcagacagcgagtggtagcggaaacaatgacgtgacatcagaccatttatctcttcccatcccaccctcaatatccatctcctccgcgacaccacgggcgcatatcactatcccagccccaacgccttctcgccccacatcttcatcgcagcaaagctcaacggacgccgtctcacattatcagctcatcaaactaatgaccactttctgcgtcggccgaagtgttatggagtgggtgcgtcttcataatgagtcaggatttgacgttcttcgacatgtagatgtgagacgtctagtgcaattcggcatcgtaaagggcctactatatcgcgtgcataagtacgctgtgtcaaagtcatacctaacttctcttgcgactggacgaaggctaggagatctcagtcgagctgcgagtaaaagccggaggagcagaccagaagatgatggacttgagatgaagatctcccgcagaacgggagtttctgcacctatggagagcaacggagaagcaaacggggacatggtgcccgatggaatcgcagaacctgatgctgacgacgacgacgacgacgaagcaaggataaggagaaagatgagacgatatgccgatgggacacattgctttgatcagattatcacggagcaaaacttgacggatgcggagattctaacgaagctcaagtcctttgatcaaggcgatgtcgcaattttatatcgatag

SEQ ID NO: 5406 - protein, 531 aa, Muscodor strobelii
  misc_feature: SGI Peptide ID NO. 561516
  misc_feature (2)..(457): Pfam Id: PF06218 Pfam Desc: Nitrogen permease regulator 2
  misc_feature (2)..(283): Pfam Id: PF06218 Pfam Desc: Nitrogen permease regulator 2
  misc_feature (382)..(406): Pfam Id: PF06218 Pfam Desc: Nitrogen permease regulator 2
  misc_feature (1)..(531): NCBI GI: 39974379 Blast Desc: MGG_00664 [Magnaporthe grisea 70-15] gi|145018421|gb|EDK02700.1| MGG_00664 [Magnaporthe grisea 70-15]
  misc_feature (1)..(531): NCBI GI: 171695208 Blast Desc: protein product [Podospora anserina] gi|170947846|emb|CAP60010.1| protein product [Podospora anserina]
  misc_feature (1)..(531): NCBI GI: 38566965 Blast Desc: related to nitrogen permease regulator [Neurospora crassa]
  misc_feature (1)..(420): NCBI GI: 256735487 Blast Desc: [Nectria haematococca mpVI 77-13-4]
  misc_feature (1)..(420): NCBI GI: 46107724 Blast Desc: FG00745.1 [Gibberella zeae PH-1]
  misc_feature (1)..(420): NCBI GI: 261355148 Blast Desc: tumor suppressor candidate 4 [Verticillium albo-atrum VaMs.102]
  misc_feature (27)..(284): NCBI GI: 116182240 Blast Desc: CHGG_01748 [Chaetomium globosum CBS 148.51] gi|88186045|gb|EAQ93513.1| CHGG_01748 [Chaetomium globosum CBS 148.51]
  misc_feature (16)..(298): NCBI GI: 156054020 Blast Desc: SS1G_05858 [Sclerotinia sclerotiorum 1980] gi|154703638|gb|EDO03377.1| SS1G_05858 [Sclerotinia sclerotiorum 1980]
  misc_feature (1)..(521): NCBI GI: 226282474 Blast Desc: conserved [Paracoccidioides brasiliensis Pb01]
  misc_feature (1)..(521): NCBI GI: 225680681 Blast Desc: candidate tumor suppressor gene 21 protein [Paracoccidioides brasiliensis Pb03]
MIQGIFYARFLPQEGTKIVAQSPPGCIVATEYAPDLKPPLVDFDIVQEYIIPRKAFFNRFVTVNTPEGKHSILGFPVSIPHERYHRNEFIFNFGLVIESDVDQIPYERLVRRLAVTFAEMERQNGYLSSEGHVDDGRRPIASLLEIVKEDLNNYGECMIPIDEANTINMKLFPYHAPPPNIHGWHVPVPKAKLADIVDPTWDLTLQRIIPHVDGVNDTRRIAWLADVSLPLTQCALQHLLYYDTILLLDMFFFGTCYAPRPGIHDFVANRSGMIDECAAYVSISNLVSTRENQTASGSGNNDVTSDHLSLPIPPSISISSATPRAHITIPAPTPSRPTSSSQQSSTDAVSHYQLIKLMTTFCVGRSVMEWVRLHNESGFDVLRHVDVRRLVQFGIVKGLLYRVHKYAVSKSYLTSLATGRRLGDLSRAASKSRRSRPEDDGLEMKISRRTGVSAPMESNGEANGDMVPDGIAEPDADDDDDDEARIRRKMRRYADGTHCFDQIITEQNLTDAEILTKLKSFDQGDVAILYR

SEQ ID NO: 5407 - DNA, 2463 bp, Muscodor strobelii
  misc_feature: SGI EST ID NO. CUFF.13771.0
  misc_feature: Variant of the nucleotide sequence at SEQ ID NO 5405
cctctcatcaccctcgtctcgtagctcattaagctgataatcaatcactcaggaactaagatcgtagcgcagtcacccccaggctgcattgtagctacagagtatgccccagatcttaagccaccactagtagacttcgatatcgtgcaggaatacataattcctcgcaaagctttcttcaatcggttcgtgacggttaacacgcctgaagggaaacatagcatcctcgggtttcccgtctcaatacctcatgagcggtatcatcgaaatgagttcatattcaatttcggattagtcattgaatccgatgtagaccaaatcccctacgaacgccttgtgcgccgtctcgccgttacgttcgcagagatggagcgtcagaatgggtatttgagtagcgagggccatgtcgacgatgggcggcgcccgattgcaagcttgctggaaatcgtgaaagaggacttgaataactacggagaatgcatgattccgatcgatgaggcaaacacaatcaacatgaagctcttcccttaccacgctccgccccccaatattcacggctggcatgttccagtgcctaaggcgaaactggcggacatagtagatccgacatgggacctgacactgcaacggatcataccacatgtcgatggcgtgaatgacacgcggcgtattgcatggctagctgacgtttcgctaccgttgacccagtgtgctttgcagcatcttctttactatgacacgatcttactcctcgatatgttcttcttcggaacatgctacgccccacgccccgggatacacgatttcgttgcaaaccgtagtggtatgatcgacgaatgcgcggcgtacgtcagtatctcaaacctcgtgtcgacgcgcgagaatcagacagcgagtggtagcggaaacaatgacgtgacatcagaccatttatctcttcccatcccaccctcaatatccatctcctccgcgacaccacgggcgcatatcactatcccagccccaacgccttctcgccccacatcttcatcgcagcaaagctcaacggacgccgtctcacattatcagctcatcaaactaatgaccactttctgcgtcggccgaagtgttatggagtgggtgcgtcttcataatgagtcaggatttgacgttcttcgacatgtagatgtgagacgtctagtgcaattcggcatcgtaaagggcctactatatcgcgtgcataagtacgctgtgtcaaagtcatacctaacttctcttgcgactggacgaaggctaggagatctcagtcgagctgcgagtaaaagccggaggagcagaccagaagatgatggacttgagatgaagatctcccgcagaacgggagtttctgcacctatggagagcaacggagaagcaaacggggacatggtgcccgatggaatcgcagaacctgatgctgacgacgacgacgacgacgaagcaaggataaggagaaagatgagacgatatgccgatgggacacattgctttgatcagattatcacggagcaaaacttgacggatgcggagattctaacgaagctcaagtcctttgatcaaggcgatgtcgcaattttatatcgatagaaacgtcaattgtgctcgaatgattttacgttctctatcagcatagctagatatttcccgttgcaataccctcccgaacaggactcaattcctccacttcatagcctgtttttactccgctttcttgaacacattaccgaagtagtcgaaagcaccaacaggcacaccctgctgcctgagcagacaataggcagtcgacgtgtgaaagtggatattggggatgacgaaatacatcatgtactctcttgttgtctcccaattgaatttccccatcttcagcgtgctcatcacaaatggcttttcggccttagcatcgaaagcttccttgtcgatcttggcgttctcgacataggaaactgtgcgcgcgatgcgagcatatagttgctcgaatgtctcctcgttgtcctcgatgctaacgtgttctagctcaccgacacggtccatgaaccagactatggcgttgcagacggcttgtacttgatatgtgatcctgggtgacggagtcagtcctgtgatcgctcgcgcgtgatatttgaatgctagtctgccgacttacgatgccatgtcaggagccatgcggtacttcagcatgtcctcatgtttgatacctttttcgtcggcgtaggtctctcctttcttcacgataaaatcgagctgcttaagagtgtggagcatcaccgggatggcgccggttaatgtgcctggtgctgccattttcgctagactgtggtattgataacaacaataatagttgagtgcttgagatgtcttggctgcactgagcaaatttttcttcgtcgctcaatgtttataaacagctcaggtctatcaagcagcgatttgtctatgcaaagttcc

SEQ ID NO: 5408 - DNA, 537 bp, Muscodor strobelii
  misc_feature: SGI cDNA ID NO. 561517
  misc_feature: Elevated expression when VOC is produced
  misc_feature: Encodes the peptide sequence at SEQ ID NO 5409
atggcagcaccaggcacattaaccggcgccatcccggtgatgctccacactcttaagcagctcgattttatcgtgaagaaaggagagacctacgccgacgaaaaaggtatcaaacatgaggacatgctgaagtaccgcatggctcctgacatggcatcgatcacatatcaagtacaagccgtctgcaacgccatagtctggttcatggaccgtgtcggtgagctagaacacgttagcatcgaggacaacgaggagacattcgagcaactatatgctcgcatcgcgcgcacagtttcctatgtcgagaacgccaagatcgacaaggaagctttcgatgctaaggccgaaaagccatttgtgatgagcacgctgaagatggggaaattcaattgggagacaacaagagagtacatgatgtatttcgtcatccccaatatccactttcacacgtcgactgcctattgtctgctcaggcagcagggtgtgcctgttggtgctttcgactacttcggtaatgtgttcaagaaagcggagtaa

SEQ ID NO: 5409 - protein, 178 aa, Muscodor strobelii
  misc_feature: SGI Peptide ID NO. 561517
  misc_feature (8)..(173): Pfam Id: PF09351 Pfam Desc: Domain of function (DUF1993)
  misc_feature (11)..(174): NCBI GI: 39975465 Blast Desc: MGG_00121 [Magnaporthe grisea 70-15] gi|145019033|gb|EDK03312.1| MGG_00121 [Magnaporthe grisea 70-15]
  misc_feature (10)..(177): NCBI GI: 46124289 Blast Desc: FG06522.1 [Gibberella zeae PH-1]
  misc_feature (11)..(178): NCBI GI: 256726559 Blast Desc: NECHADRAFT_104273 [Nectria haematococca mpVI 77-13-4]
  misc_feature (4)..(176): NCBI GI: 242812581 Blast Desc: conserved [Talaromyces stipitatus ATCC 10500] gi|218714326|gb|EED13749.1| conserved [Talaromyces stipitatus ATCC 10500]
  misc_feature (10)..(171): NCBI GI: 110632423 Blast Desc: Meso_0061 [Mesorhizobium sp. BNC1] gi|110283407|gb|ABG61466.1| conserved [Chelativorans sp. BNC1]
  misc_feature (10)..(170): NCBI GI: 121712397 Blast Desc: conserved [Aspergillus clavatus NRRL 1] gi|119401962|gb|EAW12384.1| conserved [Aspergillus clavatus NRRL 1]
  misc_feature (8)..(170): NCBI GI: 119473705 Blast Desc: NFIA_001800 [Neosartorya fischeri NRRL 181] gi|119406881|gb|EAW16831.1| conserved [Neosartorya fischeri NRRL 181]
  misc_feature (8)..(169): NCBI GI: 70985823 Blast Desc: conserved [Aspergillus fumigatus Af293] gi|66846046|gb|EAL86379.1| conserved [Aspergillus fumigatus Af293] gi|159128447|gb|EDP53562.1| conserved [Aspergillus A1163]
  misc_feature (9)..(174): NCBI GI: 145616312 Blast Desc: MGG_13563 [Magnaporthe grisea 70-15] gi|145010041|gb|EDJ94697.1| MGG_13563 [Magnaporthe grisea 70-15]
  misc_feature (5)..(176): NCBI GI: 212544496 Blast Desc: conserved [Penicillium marneffei ATCC 18224] gi|210065371|gb|EEA19465.1| conserved [Penicillium marneffei ATCC 18224]
  misc_feature: Useful for introducing or modulating the production of volatile compounds
MAAPGTLTGAIPVMLHTLKQLDFIVKKGETYADEKGIKHEDMLKYRMAPDMASITYQVQAVCNAIVWFMDRVGELEHVSIEDNEETFEQLYARIARTVSYVENAKIDKEAFDAKAEKPFVMSTLKMGKFNWETTREYMMYFVIPNIHFHTSTAYCLLRQQGVPVGAFDYFGNVFKKAE

SEQ ID NO: 5410 - DNA, 2482 bp, Muscodor strobelii
  misc_feature: SGI EST ID NO. CUFF.13772.1
  misc_feature: Variant of the nucleotide sequence at SEQ ID NO 5408
gggaactttgcatagacaaatcgctgcttgatagacctgagctgtttataaacattgagcgacgaagaaaaatttgctcagtgcagccaagacatctcaagcactcaactattattgttgttatcaataccacagtctagcgaaaatggcagcaccaggcacattaaccggcgccatcccggtgatgctccacactcttaagcagctcgattttatcgtgaagaaaggagagacctacgccgacgaaaaaggtatcaaacatgaggacatgctgaagtaccgcatggctcctgacatggcatcgatcacatatcaagtacaagccgtctgcaacgccatagtctggttcatggaccgtgtcggtgagctagaacacgttagcatcgaggacaacgaggagacattcgagcaactatatgctcgcatcgcgcgcacagtttcctatgtcgagaacgccaagatcgacaaggaagctttcgatgctaaggccgaaaagccatttgtgatgagcacgctgaagatggggaaattcaattgggagacaacaagagagtacatgatgtatttcgtcatccccaatatccactttcacacgtcgactgcctattgtctgctcaggcagcagggtgtgcctgttggtgctttcgactacttcggtaatgtgttcaagaaagcggagtaaaaacaggctatgaagtggaggaattgagtcctgttcgggagggtattgcaacgggaaatatctagctatgctgatagagaacgtaaaatcattcgagcacaattgacgtttctatcgatataaaattgcgacatcgccttgatcaaaggacttgagcttcgttagaatctccgcatccgtcaagttttgctccgtgataatctgatcaaagcaatgtgtcccatcggcatatcgtctcatctttctccttatccttgcttcgtcgtcgtcgtcgtcgtcagcatcaggttctgcgattccatcgggcaccatgtccccgtttgcttctccgttgctctccataggtgcagaaactcccgttctgcgggagatcttcatctcaagtccatcatcttctggtctgctcctccggcttttactcgcagctcgactgagatctcctagccttcgtccagtcgcaagagaagttaggtatgactttgacacagcgtacttatgcacgcgatatagtaggccctttacgatgccgaattgcactagacgtctcacatctacatgtcgaagaacgtcaaatcctgactcattatgaagacgcacccactccataacacttcggccgacgcagaaagtggtcattagtttgatgagctgataatgtgagacggcgtccgttgagctttgctgcgatgaagatgtggggcgagaaggcgttggggctgggatagtgatatgcgcccgtggtgtcgcggaggagatggatattgagggtgggatgggaagagataaatggtctgatgtcacgtcattgtttccgctaccactcgctgtctgattctcgcgcgtcgacacgaggtttgagatactgacgtacgccgcgcattcgtcgatcataccactacggtttgcaacgaaatcgtgtatcccggggcgtggggcgtagcatgttccgaagaagaacatatcgaggagtaagatcgtgtcatagtaaagaagatgctgcaaagcacactgggtcaacggtagcgaaacgtcagctagccatgcaatacgccgcgtgtcattcacgccatcgacatgtggtatgatccgttgcagtgtcaggtcccatgtcggatctactatgtccgccagtttcgccttaggcactggaacatgccagccgtgaatattggggggcggagcgtggtaagggaagagcttcatgttgattgtgtttgcctcatctgttgagacataagtcagactgttgaatgcgaagagcgcgatgaattgatcagaacagtggggtgtgttaggaagtcacagaccgatcggaatcatgcattctccgtagttattcaagtcctctttcacgatttccagcaagcttgcaatcgggcgccgcccatcgtcgacatggccctcgctactcaaatacccattctgacgctccatctctgcgaacgtaacggcgagacggcgcacaaggcgttcgtaggggatttggtctacatcggattcaatgactaatccgaaattgaatatgaactcatttcgatgataccgctcatgaggtattgagacgggaaacccgaggatgctatgtttcccttcaggcgtgttaaccgtcacgaaccgattgaagaaagctttgcgaggaattatgtattcctgcacgatatcgaagtctactagtggtggcttaagatctggggcatactctgtagctacaatgcagcctgggggtgactgcgctacgatcttagttcctgagtgattgattatcagcttaatgagctacgagacgagggtgatgagagg

SEQ ID NO: 5411 - DNA, 2589 bp, Muscodor strobelii
  misc_feature: SGI cDNA ID NO. 561518
  misc_feature: Encodes the peptide sequence at SEQ ID NO 5412
atgaatgatagaccaaagggcgaggatcccgttgttgatcttgaaaaggatgaggaggtcggcttttggtttgaagatcaggtctttgggggaagagtatcgttgcagttccccgcacaatatggtgggagaggaatcccactagaaatgagacaacacgcacctccatcttcagggtctgatagatggatcataacctcattacagacttcgaagctactgtccgagtccttctggacggatccttcgataccaagaaagagcgataatttcttccactggaataaaatcttcagggcaggtctcaatactttgcgaagaagacctcgtctttcgcaagatctggatgtgcagaaaacgagggaatatgagatgttagcgcccgcatataatgacagagactggatttggacagcctttcgggccggatggtatcaagtcaacgccagtatgtgggaagggacactgtggtcagactccaaagcccggagactcatagcagcgattccgttttggctcaacagacaggacgaagtaagctgtgcagatattgccaataaactaatttcgaccatgaactggaaaagctacacggcttttgtcagcgagcttccacaaacagatgccttaatagggaaatggtatcttcatgctctgggtttgcttttaatggctgcgatgccaatccgttatctaaggaagacaaaaatgcttccttcctggactttcgaactgacgcccagcggcggcaactcgttgggcgctgccggaacggcaatcaagttgactacgaccctagacccggattcgctctgggcacaaaccgatgtagctgaggcaagtgaactatacgaccctctcgcaggccgcagtagcggacgcaaaactgtacgcaatcagttaaattacctcagcgtactgcagaagctcatcaggcgcgttaaacacgacaaagctctggttgaagagcagtggattaaaaatcttattcgtgcgacgacagtgatccatcaaaagcgaacatcagggaaatttccgttccatgcttggattgatagatggccgtttgtcataccacctgtgtccaattggcgcatgtactttttgatcatgaagagccatactttaacccttctcttcttgtcatggctgcccatcattacaagtcaagaaaccctcatctggagtgattgcccgcaagggcccagtccgatcgtccagtgtgccgacgctcttgtccccttagactacgaccagcctgatggcacacaaattcaactcaaacttgctcgtataagaaccaacagctcgcgactagcaattaaagggactgttttcttcaatcctggggggcccggaggctccgcggttcagaacctgttccaaatctcaagtctgccgtcttcctccctctttcaagtcacagagggctatgatctaataggaattgatcctcggggcgcgggctacagtacaccaatgcgctgcgatccgcgactatggaaccagcgtgtcgtaaccgctgtgacgaacgaggaggagtttgatcaacttgttcaacactatagaactgtagggcaaagctgtatcagtatgaccggcccactcatcgaccatcttgataccgtcagcgttgccaatgatcatgagacgatccgccaattgattggggctgaccaattcaacttcatcggtctttcatggggtagtcaaatcggatacacgtatgcagagatgtaccctgctcgagttggacgtatggtaattgagggtattgtcgatcattctgaagctgcgacaacagctgtgcaaacaatggcgacaagctatgaagcaacgatgctgaaattctttgactggtgtcaatctaatagcacttgcgctcttcatggccaagatgctcgcgccatgcttgatagcgtggtggctacggcgcataaaaatcctattccggctcctgggtgctcacaaaccggatctggagcgtgttcgcctgatgtcagtgacgaagagcttcttaccaatgctcaaatacttgtagcggctgcgccaccactgagaggctgggcactcctagctcaagccatattatccgcttcacagggcgacgcgacactgttttcaaacccttacttcacagctgacacagatgtcgacttgacggcagcctggtcaaacctaggaacaggctgtcaagactgggctcacccagcaaagtcgtatcaagacgtgctaaacctcgtatatcaagcaacagcactgtcgccagtcacgaggggattcagtcaagctttccaatggtacaccatgtgcataggatggccgacgggcctaaccaacccgccacgcagaatatcggatagtatctcgcaggcgcctgagatactgatggtcagctcctactgggatcccgagaccagtatacagtgggcggttggagttgaagagcagataccaaattcgaggctgatatttcgcaatggaagtggacatcccacatacgccctgggtggcgagaccgcaactgcgatcaatcgcttcattttggagggcgtgctgccggttgacggaacagtttacgcgtcttga

SEQ ID NO: 5412 - protein, 862 aa, Muscodor strobelii
  misc_feature: SGI Peptide ID NO. 561518
  misc_feature (478)..(750): Pfam Id: PF00561 Pfam Desc: alpha/beta hydrolase fold
  misc_feature (755)..(860): Pfam Id: PF08386 Pfam Desc: TAP-like protein
  misc_feature (478)..(622): Pfam Id: PF00561 Pfam Desc: alpha/beta hydrolase fold
  misc_feature (369)..(860): NCBI GI: 256728785 Blast Desc: NECHADRAFT_72599 [Nectria haematococca mpVI 77-13-4]
  misc_feature (393)..(862): NCBI GI: 46110451 Blast Desc: FG02107.1 [Gibberella zeae PH-1]
  misc_feature (401)..(862): NCBI GI: 67903568 Blast Desc: AN8771.2 [Aspergillus nidulans FGSC A4] gi|40741374|gb|EAA60564.1| AN8771.2 [Aspergillus nidulans FGSC A4]
  misc_feature (401)..(862): NCBI GI: 259483025 Blast Desc: TPA: conserved [Aspergillus nidulans FGSC A4]
  misc_feature (427)..(862): NCBI GI: 169619802 Blast Desc: SNOG_13098 [Phaeosphaeria nodorum SN15] gi|160703905|gb|EAT79425.2| SNOG_13098 [Phaeosphaeria nodorum SN15]
  misc_feature (399)..(859): NCBI GI: 229864051 Blast Desc: hydrolase or acyltransferase of alpha/beta superfamily [Stackebrandtia nassauensis DSM 44728] gi|229749367|gb|EEP07161.1| hydrolase or acyltransferase of DSM
  misc_feature (395)..(857): NCBI GI: 134102207 Blast Desc: proteinase (secreted protein) [Saccharopolyspora erythraea NRRL 2338] gi|133914830|emb|CAM04943.1| proteinase (secreted protein) [Saccharopolyspora erythraea NRRL 2338]
  misc_feature (392)..(856): NCBI GI: 229863370 Blast Desc: hydrolase or acyltransferase of alpha/beta superfamily [Stackebrandtia nassauensis DSM 44728] gi|229748686|gb|EEP06480.1| hydrolase or acyltransferase of DSM
  misc_feature (393)..(857): NCBI GI: 229861446 Blast Desc: alpha/beta hydrolase family protein [Stackebrandtia nassauensis DSM 44728] gi|229750097|gb|EEP07889.1| alpha/beta hydrolase family protein [Stackebrandtia nassauensis DSM 44728]
  misc_feature (393)..(861): NCBI GI: 256379929 Blast Desc: TAP domain protein [Actinosynnema mirum DSM 43827] gi|255924232|gb|ACU39743.1| TAP domain protein [Actinosynnema mirum DSM 43827]
MNDRPKGEDPVVDLEKDEEVGFWFEDQVFGGRVSLQFPAQYGGRGIPLEMRQHAPPSSGSDRWIITSLQTSKLLSESFWTDPSIPRKSDNFFHWNKIFRAGLNTLRRRPRLSQDLDVQKTREYEMLAPAYNDRDWIWTAFRAGWYQVNASMWEGTLWSDSKARRLIAAIPFWLNRQDEVSCADIANKLISTMNWKSYTAFVSELPQTDALIGKWYLHALGLLLMAAMPIRYLRKTKMLPSWTFELTPSGGNSLGAAGTAIKLTTTLDPDSLWAQTDVAEASELYDPLAGRSSGRKTVRNQLNYLSVLQKLIRRVKHDKALVEEQWIKNLIRATTVIHQKRTSGKFPFHAWIDRWPFVIPPVSNWRMYFLIMKSHTLTLLFLSWLPIITSQETLIWSDCPQGPSPIVQCADALVPLDYDQPDGTQIQLKLARIRTNSSRLAIKGTVFFNPGGPGGSAVQNLFQISSLPSSSLFQVTEGYDLIGIDPRGAGYSTPMRCDPRLWNQRVVTAVTNEEEFDQLVQHYRTVGQSCISMTGPLIDHLDTVSVANDHETIRQLIGADQFNFIGLSWGSQIGYTYAEMYPARVGRMVIEGIVDHSEAATTAVQTMATSYEATMLKFFDWCQSNSTCALHGQDARAMLDSVVATAHKNPIPAPGCSQTGSGACSPDVSDEELLTNAQILVAAAPPLRGWALLAQAILSASQGDATLFSNPYFTADTDVDLTAAWSNLGTGCQDWAHPAKSYQDVLNLVYQATALSPVTRGFSQAFQWYTMCIGWPTGLTNPPRRISDSISQAPEILMVSSYWDPETSIQWAVGVEEQIPNSRLIFRNGSGHPTYALGGETATAINRFILEGVLPVDGTVYAS

SEQ ID NO: 5413 - DNA, 472 bp, Muscodor strobelii
  misc_feature: SGI EST ID NO. CUFF.13702.0
  misc_feature: Variant of the nucleotide sequence at SEQ ID NO 5411
cagacttcgaagctactgtccgagtccttctggacggatccttcgataccaagaaagagcgataatttcttccactggaataaaatcttcagggcaggtctcaatactttgcgaagaagacctcgtctttcgcaagatctggatgtgcagaaaacgagggaatatgagatgttagcgcccgcatataatgacagagactggatttggacagcctttcgggccggatggtatcaagtcaacgccagtatgtgggaagggacactgtggtcagactccaaagcccggagactcatagcagcgattccgttttggctcaacagacaggacgaagtaagctgtgcagatattgccaataaactaatttcgaccatgaactggaaaagctacacggcttttgtcagcgagcttccacaaacagatgccttaatagggaaatggtatcttcatgctctgggtaattcctccaccactc

SEQ ID NO: 5414 - DNA, 411 bp, Muscodor strobelii
  misc_feature: SGI cDNA ID NO. 561519
  misc_feature: Encodes the peptide sequence at SEQ ID NO 5415
atgtttgaccactttcgaccacgccatatccctgcactcattgctgcgacgacgatgacattcggtggcatgtggcccatgatcgaccctcggggcgcaatgcgagactttggattcccaaatcgcatcgccaccagccctgaagccgcaactgtaatgatcaccggaaatgtgcgaactacgattttgggagcccttatgcttctcttctactcgcgcggacaattgaagattcttgacacgttcatggcagtgactggagcctatgctggcttagttgacagctatattgtatggcgtgaaggcaatcgccgccatgctatctttcgacttgtcagctctggattgatttctgcctggggaatgatggggtggacagaaggggtgaccaattcaaggatgaccgattga

SEQ ID NO: 5415 - protein, 136 aa, Muscodor strobelii
  misc_feature: SGI Peptide ID NO. 561519
  misc_feature (1)..(128): NCBI GI: 226293180 Blast Desc: conserved [Paracoccidioides brasiliensis Pb18]
  misc_feature (5)..(126): NCBI GI: 171679928 Blast Desc: protein product [Podospora anserina] gi|170939590|emb|CAP64817.1| protein product [Podospora anserina]
  misc_feature (1)..(127): NCBI GI: 238840893 Blast Desc: conserved [Microsporum canis CBS 113480]
  misc_feature (1)..(127): NCBI GI: 238842459 Blast Desc: conserved [Microsporum canis CBS 113480]
  misc_feature (1)..(121): NCBI GI: 242766628 Blast Desc: efflux pump antibiotic resistance protein, [Talaromyces stipitatus ATCC 10500] gi|218724405|gb|EED23822.1| efflux pump antibiotic resistance protein, [Talaromyces ATCC
  misc_feature (2)..(127): NCBI GI: 256734198 Blast Desc: NECHADRAFT_35144 [Nectria haematococca mpVI 77-13-4]
  misc_feature (1)..(128): NCBI GI: 154305874 Blast Desc: [Botryotinia fuckeliana B05.10] gi|150853053|gb|EDN28245.1| [Botryotinia fuckeliana B05.10]
  misc_feature (1)..(98): NCBI GI: 226277902 Blast Desc: conserved [Paracoccidioides brasiliensis Pb01]
  misc_feature (33)..(128): NCBI GI: 239614688 Blast Desc: conserved [Ajellomyces dermatitidis ER-3]
  misc_feature (1)..(127): NCBI GI: 256724891 Blast Desc: NECHADRAFT_77047 [Nectria haematococca mpVI 77-13-4]
MFDHFRPRHIPALIAATTMTFGGMWPMIDPRGAMRDFGFPNRIATSPEAATVMITGNVRTTILGALMLLFYSRGQLKILDTFMAVTGAYAGLVDSYIVWREGNRRHAIFRLVSSGLISAWGMMGWTEGVTNSRMTD

SEQ ID NO: 5416 - DNA, 714 bp, Muscodor strobelii
  misc_feature: SGI EST ID NO. CUFF.13714.0
  misc_feature: Variant of the nucleotide sequence at SEQ ID NO 5414
cagtacacctcttcaggcatttcttaattatcgcgacgacatcgtcgagtgtcattcagccgctgcatcgcaatcgtgatccttgcttctcaatcatcgagtatcactctctattattcatcagtcatgtttgaccactttcgaccacgccatatccctgcactcattgctgcgacgacgatgacattcggtggcatgtggcccatgatcgaccctcggggcgcaatgcgagactttggattcccaaatcgcatcgccaccagccctgaagccgcaactgtaatgatcaccggaaatgtgcgaactacgattttgggagcccttatgcttctcttctactcgcgcggacaattgaagattcttgacacgttcatggcagtgactggagcctatgctggcttagttgacagctatattgtatggcgtgaaggcaatcgccgccatgctatctttcgacttgtcagctctggattgatttctgcctggggaatgatggggtggacagaaggggtgaccaattcaaggatgaccgattgagcgggttcggtcggcagatgggttctaatctatgtctaattacctacaaatactgcatgcagtctcatttataagccacataattatacatcatttcaacacagatcctattacggatagcacatttgattgctgatttctcagcagatcatttggcagcgcatacgacaaaaccaa

SEQ ID NO: 5417 - DNA, 990 bp, Muscodor strobelii
  misc_feature: SGI cDNA ID NO. 561520
  misc_feature: Encodes the peptide sequence at SEQ ID NO 5418
atgggccaagcgccgattcccccaactcccacgggcacagatctttctggaaagaccgttatagtgactggaggtaatgctggaatgggactcgaggcttctcgacagtttctgaccctcaaagcatctcgcgttatcctcgccgtgcgctccctagtcaaggggagagaagccatcgcggagctcaggcaagatcctacagtacagaaaattaaccccaatgcgaccattgaggcttttcccctagatctcgaagacttcgagtcaggtgctgcattcgtgcgcaagatcagagcagaggtcccagagctggacatcctgctgaacaatggtggtaccaacgtcctcaaataccacaagaccccaagtggacacgagcgcgtcatacaagtcaatacttacactcatttcctgatatcccttgggctcctcccgctgctcatatcgactgctgagaagcggggtgctccaacacatctgagttgggtcggctcttcgatgcaaaacgcccactcgttgaccaagaagccactggcccccaatgaaacggtcattcagcactgggatgaccagaagacctacaatcccatgacccggtaccaggacagcaagttcatggtcaacgtgcttgtgcgcggcctggcgaagatagtgggtgaggagaaccccaaggtcattgtcaaccagatgtgccccggtctcgtacaaacgggcttcgacaaagatctccccgtctgggtgaagcccatcatgtatgtctaccgtaagatctcggcgcgccccgtgtctgaaggtgcccgcacgttgatctacgcctccgcggtcgaaggacccaattcgcacggcaaattcttggaaaacaacaaggtcaaaacgggcgaggtcccttttcttgacgaggcggctggcaagtcgttccaagagaaagcatgggaggaactcgtgacggaatgcgtaaagtacctgccggaggtcagtcagtatgcgtaa

SEQ ID NO: 5418 - protein, 329 aa, Muscodor strobelii
  misc_feature: SGI Peptide ID NO. 561520
  misc_feature (18)..(159): Pfam Id: PF00106 Pfam Desc: short chain dehydrogenase
  misc_feature (18)..(113): Pfam Id: PF00106 Pfam Desc: short chain dehydrogenase
  misc_feature (3)..(328): NCBI GI: 242798320 Blast Desc: carbonyl reductase, [Talaromyces stipitatus ATCC 10500] gi|218716490|gb|EED15911.1| carbonyl reductase, [Talaromyces stipitatus ATCC 10500]
  misc_feature (3)..(329): NCBI GI: 212541566 Blast Desc: short-chain dehydrogenase, [Penicillium marneffei ATCC 18224] gi|210068237|gb|EEA22329.1| short-chain dehydrogenase, [Penicillium marneffei ATCC 18224]
  misc_feature (3)..(328): NCBI GI: 255939376 Blast Desc: Pc16g00340 [Penicillium chrysogenum Wisconsin 54-1255] gi|211585080|emb|CAP92704.1| Pc16g00340 [Penicillium chrysogenum Wisconsin 54-1255]
  misc_feature (3)..(317): NCBI GI: 242792691 Blast Desc: short-chain dehydrogenase/reductase family protein, [Talaromyces stipitatus ATCC 10500] gi|218718594|gb|EED18014.1| short-chain dehydrogenase/reductase family protein, [Talaromyces
  misc_feature (12)..(317): NCBI GI: 212535288 Blast Desc: short-chain dehydrogenase/reductase family protein, [Penicillium marneffei ATCC 18224] gi|210070199|gb|EEA24289.1| short-chain dehydrogenase/reductase family protein, [Penicillium
  misc_feature (1)..(325): NCBI GI: 115386132 Blast Desc: [Aspergillus terreus NIH2624] gi|114190605|gb|EAU32305.1| [Aspergillus terreus NIH2624]
  misc_feature (3)..(317): NCBI GI: 121705336 Blast Desc: conserved [Aspergillus clavatus NRRL 1] gi|119399077|gb|EAW09505.1| conserved [Aspergillus clavatus NRRL 1]
  misc_feature (3)..(320): NCBI GI: 145256057 Blast Desc: An10g00170 [Aspergillus niger CBS 513.88] gi|134078580|emb|CAK49108.1| protein product [Aspergillus niger]
  misc_feature (3)..(317): NCBI GI: 256722212 Blast Desc: NECHADRAFT_52355 [Nectria haematococca mpVI 77-13-4]
  misc_feature (3)..(317): NCBI GI: 256726758 Blast Desc: NECHADRAFT_33990 [Nectria haematococca mpVI 77-13-4]
  misc_feature (21)..(291): SWISSPROT Homolog: EC 1.1.1.189 Prostaglandin-E(2) 9-reductase
  misc_feature (21)..(291): SWISSPROT Homolog: EC 1.1.1.197 15-hydroxyprostaglandin dehydrogenase (NADP(+))
  misc_feature (21)..(291): SWISSPROT Homolog: EC 1.1.1.184 Carbonyl reductase (NADPH)
MGQAPIPPTPTGTDLSGKTVIVTGGNAGMGLEASRQFLTLKASRVILAVRSLVKGREAIAELRQDPTVQKINPNATIEAFPLDLEDFESGAAFVRKIRAEVPELDILLNNGGTNVLKYHKTPSGHERVIQVNTYTHFLISLGLLPLLISTAEKRGAPTHLSWVGSSMQNAHSLTKKPLAPNETVIQHWDDQKTYNPMTRYQDSKFMVNVLVRGLAKIVGEENPKVIVNQMCPGLVQTGFDKDLPVWVKPIMYVYRKISARPVSEGARTLIYASAVEGPNSHGKFLENNKVKTGEVPFLDEAAGKSFQEKAWEELVTECVKYLPEVSQYA

SEQ ID NO: 5419 - DNA, 624 bp, Muscodor strobelii
  misc_feature: SGI cDNA ID NO. 561521
  misc_feature: Encodes the peptide sequence at SEQ ID NO 5420
atggaaatctactctagacctgccctcctggctgaggtcaggcgcgatttggaagcatatgccatcagtgggtcccgggagaatggattcgtgctcgacgtcgcggcgctcaaggccaagtgtgcgctcatcatttctgtgatcaacgagacgcagaggacgcgacagatcaattccagcttccgcaaggtcctggacgacaccctgctcgatgggaaatacctcctgaagaaagggaatttcatccaagtccctggcgatgtgatccatcaggagcgggcgttctggggcgactcggccgctcacttcgacccgcatcgatttgtggccaagcgcgaagcgggcctaccatcggccgctagcggattcatagcatttggattcgcgccgtacacatgccctgcacgcaatttcgccaccacggagctgttgatcttggtagctctcatggtggtgcgggctgaaatgtccctcgtgaagggcaagtggagcaattatatgaaggcccccgtcaacactactgagctttctaccgtaccatctcctaagactgatgtcgagatgcacgtccaagtaagagaagaatgggctggcgagtggagcttgacgaagggcgggagctaa

SEQ ID NO: 5420 - protein, 207 aa, Muscodor strobelii
  misc_feature: SGI Peptide ID NO. 561521
  misc_feature (47)..(151): Pfam Id: PF00067 Pfam Desc: Cytochrome P450
  misc_feature (2)..(207): NCBI GI: 46115312 Blast Desc: FG03498.1 [Gibberella zeae PH-1]
  misc_feature (3)..(202): NCBI GI: 154303094 Blast Desc: BC1G_09567 [Botryotinia fuckeliana B05.10] gi|150855030|gb|EDN30222.1| BC1G_09567 [Botryotinia fuckeliana B05.10]
  misc_feature (2)..(205): NCBI GI: 171692061 Blast Desc: protein product [Podospora anserina] gi|170945979|emb|CAP72780.1| protein product [Podospora anserina]
  misc_feature (1)..(202): NCBI GI: 119467107 Blast Desc: cytochrome P450, [Neosartorya fischeri NRRL 181] gi|119405512|gb|EAW15463.1| cytochrome P450, [Neosartorya fischeri NRRL 181]
  misc_feature (2)..(202): NCBI GI: 121704194 Blast Desc: cytochrome P450, [Aspergillus clavatus NRRL 1] gi|119398505|gb|EAW08935.1| cytochrome P450, [Aspergillus clavatus NRRL 1]
  misc_feature (3)..(202): NCBI GI: 159122680 Blast Desc: cytochrome P450, [Aspergillus fumigatus A1163]
  misc_feature (3)..(202): NCBI GI: 70984779 Blast Desc: cytochrome P450 oxidoreductase [Aspergillus fumigatus Af293] gi|66845523|gb|EAL85858.1| cytochrome P450 oxidoreductase, [Aspergillus fumigatus Af293]
  misc_feature (3)..(194): NCBI GI: 212542749 Blast Desc: cytochrome P450, [Penicillium marneffei ATCC 18224] gi|210066436|gb|EEA20529.1| cytochrome P450, [Penicillium marneffei ATCC 18224]
  misc_feature (1)..(205): NCBI GI: 238500455 Blast Desc: cytochrome P450, [Aspergillus flavus NRRL3357] gi|220693215|gb|EED49561.1| cytochrome P450, [Aspergillus flavus NRRL3357]
  misc_feature (1)..(205): NCBI GI: 169779775 Blast Desc: [Aspergillus oryzae RIB40] gi|83773091|dbj|BAE63219.1| protein product [Aspergillus oryzae]
MEIYSRPALLAEVRRDLEAYAISGSRENGFVLDVAALKAKCALIISVINETQRTRQINSSFRKVLDDTLLDGKYLLKKGNFIQVPGDVIHQERAFWGDSAAHFDPHRFVAKREAGLPSAASGFIAFGFAPYTCPARNFATTELLILVALMVVRAEMSLVKGKWSNYMKAPVNTTELSTVPSPKTDVEMHVQVREEWAGEWSLTKGGS

SEQ ID NO: 5421 - DNA, 1868 bp, Muscodor strobelii
  misc_feature: SGI EST ID NO. CUFF.13723.0
  misc_feature: Variant of the nucleotide sequence at SEQ ID NO 5419
tttattttcagtttctgggacgatccaagagaacctccacgactacggccaaggattccggtagtcggacatgtcgtaggcttgatgcgacatggaccatcttactccagaataacgaggtaaatggaaactatttctttatatgcaacgtccattcttacccctttgagtatctatgaaaatgatccgtatcactaaaggcaaaaccctttggggtttgacacagcgaggccgctggcactgagatctatatgctgggattcctccactacaaagtttacatgagcgcttcatcgcgcctgcttccgtctttccagaaaatggcgaagaccttgtcttttcggccatttatcgagcttaccgctcacaagtttggtgatgcgacaccggaaacccatagcctctatcgtggaacacttccggacgacctgggacgctcgttgagatctagtctctctccgggcccgcatttggatcacttgaatcatcaaatggggactagggcgctagttgaacttgatagcttgctgaatgaagctcaaatcactggacgaaaggaaatcccccttttagaatggtcgcgctacactgtcgtagaggctacgagttacgccgtctacggggagaaacacccatttgtgaagcgcgaaaccgtagacgcattttggcaatggcaacattatctggtagcgcaccttatgggcttggacatcaccggcagagggtacgcgctgagagagaaggtattcaaagagtacatcaagtactgcgcaaagctgcctgacgacgcttctcacctaatgtcggagcatcagcgcgtactgaagagtgccggtgtctcggacacggacaaagccaaacaggcggcaatctttaccatcgcttcgttcgccaactcggcgccgacgctgtattggaccctgatggaaatctactctagacctgccctcctggctgaggtcaggcgcgatttggaagcatatgccatcagtgggtcccgggagaatggattcgtgctcgacgtcgcggcgctcaaggccaagtgtgcgctcatcatttctgtgatcaacgagacgcagaggacgcgacagatcaattccagcttccgcaaggtcctggacgacaccctgctcgatgggaaatacctcctgaagaaagggaatttcatccaagtccctggcgatgtgatccatcaggagcgggcgttctggggcgactcggccgctcacttcgacccgcatcgatttgtggccaagcgcgaagcgggcctaccatcggccgctagcggattcatagcatttggattcgcgccgtacacatgccctgcacgcaatttcgccaccacggagctgttgatcttggtagctctcatggtggtgcgggctgaaatgtccctcgtgaagggcaagtggagcaattatatgaaggcccccgtcaacactactgagctttctaccgtaccatctcctaagactgatgtcgagatgcacgtccaagtaagagaagaatgggctggcgagtggagcttgacgaagggcgggagctaatggtaagagccgagagccgagagcttgggagcagctagcgtagcatggtgatctcgctgggctaggtaggcaaggactagcgctaataagtacatatgtagacatcacactgactgtaccgaggatcggggttttatgtatatcgataatcgaaattcgagtcctgggattgctgccaacatccatattgcctccacactgagctcttgaacttttgcaaggtgatcattaaactgtcagaattgtggagctgtgctacgaagagccgaggtcaggattactcggggtatggtaccgctcgtagactccttagatggcgag

SEQ ID NO: 5422 - DNA, 1500 bp, Muscodor strobelii
  misc_feature: SGI cDNA ID NO. 561522
  misc_feature: Encodes the peptide sequence at SEQ ID NO 5423
atgcttgcgaagctcacgatcagtgccgcggcgctttttgtgctagggctcatcttagattttattttcagtttctgggacgatccaagagaacctccacgactacggccaaggattccggtagtcggacatgtcgtaggcttgatgcgacatggaccatcttactccagaataacgagcgaggccgctggcactgagatctatatgctgggattcctccactacaaagtttacatgagcgcttcatcgcgcctgcttccgtctttccagaaaatggcgaagaccttgtcttttcggccatttatcgagcttaccgctcacaagtttggtgatgcgacaccggaaacccatagcctctatcgtggaacacttccggacgacctgggacgctcgttgagatctagtctctctccgggcccgcatttggatcacttgaatcatcaaatggggactagggcgctagttgaacttgatagcttgctgaatgaagctcaaatcactggacgaaaggaaatcccccttttagaatggtcgcgctacactgtcgtagaggctacgagttacgccgtctacggggagaaacacccatttgtgaagcgcgaaaccgtagacgcattttggcaatggcaacattatctggtagcgcaccttatgggcttggacatcaccggcagagggtacgcgctgagagagaaggtattcaaagagtacatcaagtactgcgcaaagctgcctgacgacgcttctcacctaatgtcggagcatcagcgcgtactgaagagtgccggtgtctcggacacggacaaagccaaacaggcggcaatctttaccatcgcttcgttcgccaactcggcgccgacgctgtattggaccctgatggaaatctactctagacctgccctcctggctgaggtcaggcgcgatttggaagcatatgccatcagtgggtcccgggagaatggattcgtgctcgacgtcgcggcgctcaaggccaagtgtgcgctcatcatttctgtgatcaacgagacgcagaggacgcgacagatcaattccagcttccgcaaggtcctggacgacaccctgctcgatgggaaatacctcctgaagaaagggaatttcatccaagtccctggcgatgtgatccatcaggagcgggcgttctggggcgactcggccgctcacttcgacccgcatcgatttgtggccaagcgcgaagcgggcctaccatcggccgctagcggattcatagcatttggattcgcgccgtacacatgccctgcacgcaatttcgccaccacggagctgttgatcttggtagctctcatggtggtgcgggctgaaatgtccctcgtgaagggcaagtggagcaattatatgaaggcccccgtcaacactactgagctttctaccgtaccatctcctaagactgatgtcgagatgcacgtccaagtaagagaagaatgggctggcgagtggagcttgacgaagggcgggagctaa

SEQ ID NO: 5423 - protein, 499 aa, Muscodor strobelii
  misc_feature: SGI Peptide ID NO. 561522
  misc_feature (33)..(480): Pfam Id: PF00067 Pfam Desc: Cytochrome P450
  misc_feature (339)..(443): Pfam Id: PF00067 Pfam Desc: Cytochrome P450
  misc_feature (1)..(499): NCBI GI: 46115312 Blast Desc: FG03498.1 [Gibberella zeae PH-1]
  misc_feature (1)..(497): NCBI GI: 171692061 Blast Desc: protein product [Podospora anserina] gi|170945979|emb|CAP72780.1| protein product [Podospora anserina]
  misc_feature (12)..(491): NCBI GI: 67527680 Blast Desc: AN4117.2 [Aspergillus nidulans FGSC A4] gi|40740188|gb|EAA59378.1| AN4117.2 [Aspergillus nidulans FGSC A4] gi|259481291|tpe|CBF74671.1| TPA: cytochrome P450, (Eurofung)
  misc_feature (28)..(494): NCBI GI: 154303094 Blast Desc: BC1G_09567 [Botryotinia fuckeliana B05.10] gi|150855030|gb|EDN30222.1| BC1G_09567 [Botryotinia fuckeliana B05.10]
  misc_feature (5)..(494): NCBI GI: 121704194 Blast Desc: cytochrome P450, [Aspergillus clavatus NRRL 1] gi|119398505|gb|EAW08935.1| cytochrome P450, [Aspergillus clavatus NRRL 1]
  misc_feature (10)..(486): NCBI GI: 212542749 Blast Desc: cytochrome P450, [Penicillium marneffei ATCC 18224] gi|210066436|gb|EEA20529.1| cytochrome P450, [Penicillium marneffei ATCC 18224]
  misc_feature (11)..(494): NCBI GI: 119467107 Blast Desc: cytochrome P450, [Neosartorya fischeri NRRL 181] gi|119405512|gb|EAW15463.1| cytochrome P450, [Neosartorya fischeri NRRL 181]
  misc_feature (28)..(494): NCBI GI: 159122680 Blast Desc: cytochrome P450, [Aspergillus fumigatus A1163]
  misc_feature (28)..(494): NCBI GI: 70984779 Blast Desc: cytochrome P450 oxidoreductase [Aspergillus fumigatus Af293] gi|66845523|gb|EAL85858.1| cytochrome P450 oxidoreductase, [Aspergillus fumigatus Af293]
  misc_feature (12)..(455): NCBI GI: 145259357 Blast Desc: An04g09870 [Aspergillus niger] gi|134074966|emb|CAK39046.1| protein product [Aspergillus niger]
  misc_feature (182)..(485): SWISSPROT Homolog: EC 1.14.13.100 25-hydroxycholesterol 7-alpha-hydroxylase
MLAKLTISAAALFVLGLILDFIFSFWDDPREPPRLRPRIPVVGHVVGLMRHGPSYSRITSEAAGTEIYMLGFLHYKVYMSASSRLLPSFQKMAKTLSFRPFIELTAHKFGDATPETHSLYRGTLPDDLGRSLRSSLSPGPHLDHLNHQMGTRALVELDSLLNEAQITGRKEIPLLEWSRYTVVEATSYAVYGEKHPFVKRETVDAFWQWQHYLVAHLMGLDITGRGYALREKVFKEYIKYCAKLPDDASHLMSEHQRVLKSAGVSDTDKAKQAAIFTIASFANSAPTLYWTLMEIYSRPALLAEVRRDLEAYAISGSRENGFVLDVAALKAKCALIISVINETQRTRQINSSFRKVLDDTLLDGKYLLKKGNFIQVPGDVIHQERAFWGDSAAHFDPHRFVAKREAGLPSAASGFIAFGFAPYTCPARNFATTELLILVALMVVRAEMSLVKGKWSNYMKAPVNTTELSTVPSPKTDVEMHVQVREEWAGEWSLTKGGS

SEQ ID NO: 5424 - DNA, 1868 bp, Muscodor strobelii; identical to SEQ ID NO: 5421
  misc_feature: SGI EST ID NO. CUFF.13723.0
  misc_feature: Variant of the nucleotide sequence at SEQ ID NO 5422

SEQ ID NO: 5425 - DNA, 2730 bp, Muscodor strobelii
  misc_feature: SGI cDNA ID NO. 561523
  misc_feature: Encodes the peptide sequence at SEQ ID NO 5426
atgacctcgggcaacaatgcctgcaccatcacccgcttgagaccctccttcacctgtgtgccatgcaagcggaggaaggtcaaatgcgacaagcgaaagccaggctgccagcattgcgccaaaaccgacgttgtctgcttctatgataccatcacaacggggacggcaaactcctcccgggagaatgcattgccaacacctgtagcaccgtctgcggccccgtcgtcgacctcgtcgaaaagacgacgtcatgtccaggaagaagaagaagccacaggccgcgccaatcatagcccaaccaagagccgtgagatggagaatcctgccggcactcctccctcgacggattttggagggaatgatgtgcctacggccacagacagtgtgaaccactttcaggccacgccaaggttgtacgacgactctgactacatgatggacaagacggtgtggaatgatattcatgaagtcgacgctctcacgacttatccggggtttgatgcacatgcagccaacctgctgcctatgccgcccctgtccatgtccatgggcaactttcaaaacacggcttgggtggagggttctgcagacattggttggttattcaaccacaaacccggtatctcaggtccgtcacctaatgcgtgttctccgccgccatttgtggcggccccgcagcccgttgaacctgtgacgagtattttgggctccagcgtcccgcaaccgcgactttccggaagccgacccccggggccaggcgcccccgccggcctcgccttctgggcgtctctcggtagtgggagcggcggcagggacagtcataatgatgttgagcgtttccggcaggcccagcaaagaacatatttggaccgaaaactcagcgcgcgccgcctctcgaagcttcaccaaatagcacgcaacatccccccaaaatcactgtgcgacgccttattgcaggcttttctcatcgtcgtgcacccgctgctgcctctggccgatgttgggacgttgcgtgcccgctacgacgatttttggagccagcgtagccaggaacggtccctggcccgtgacgagtacgactctacccgaatcccatttgtaggtctcctgtgggccattctgtactgtggagcagtagcgacccctagcactgtccaggacaagacttctgctctccgcactcccgtgtccgaagccttcgtagctcgcttaaagtccatgttggacaaaacgctgtcactgtcgtgttatcacgaggttgcgactcttgatggcctagttgcttccgtgctcgtcttcgagtgcgaccccaccatggatggactgataggcggaccttcaagtctttcgcgactggtccaggcagctatatccctggggctcaactgcgaagaaacttggaaggcaagcgctaggagcgatgtggaacgtgatacagggcgacgggtctggaaacacatcgttcatctccagatcatgagcgcctttacatcgggagggccattgccatcacatcttggccagctagacacagatcaaggcgatacatacgacgtgaccgacgacatgtcgtctacggccttaatcctcgccgcgggacgttataaaatgactcggactctacaacacgtggtagagaagtgctcaggcactcaaaatgggataacgacggagacggctgaggccctaggacggtacgtcgcgaggtttcacgacaagatcgatgacttgatatctcggctatcggcgcgcggccatccagagcttggccaaataccatcgcagttatttgaagcgagttctctcagcaatccacgattgtacggcgattatcctgggcagcagaccgtactaaattcgtttgcacgaatcttgctatctatgatgaaacatcatatatcgatcgtctcaggtcgcttgttggggtccccatggaatagcttaataccgagctgcatactcttcctgcataattatctccacgtttctcagctccctgctttctacccttatcgctggctctttccgggaaagtggcagccactgcacgagtgcttcgtagtgctcgaatacctaaaagaacccagccaagaccacgacgcccagcttctgcactatctgttaaatgaggtcttcgacatcttcaagccccgagaggctagtgatgagattgatacccttgagccttggcagcgggctgcctatgagttcgctggcccggtgacccctccaccaacacttcagccaacgacctctctgcagagacagagccgcatagacttcgccgtgccgcatcatggtaacaacaacttccatgctctgcctcgccaaggtattggagtccgagacgttacggccgcgacccatgttgccaaatggacgaacctgccgagggtggaaaacggccgcggtcacacaacatgccgaaattccaccgcttctacaaatcctcgagctccaagtaaagagctcgacgagcgtatgtgtaaaggagagcgagacgcgattggggggccgacagcctctggccggcccgttaccagaaacgcacagatacggatggttggacctgttggcgttgcttctccgccggaccgacagccccttaaccagggcggagatggtatggacgatgatgatagttacggagatgactctcaagatagtggaggtgagatggaagatttatggagtgatttcatagttctcgaccaaggttttcgtcactga

SEQ ID NO: 5426 - protein, 909 aa, Muscodor strobelii
  misc_feature: SGI Peptide ID NO. 561523
  misc_feature (17)..(55): Pfam Id: PF00172 Pfam Desc: Fungal Zn(2)-Cys(6) binuclear cluster domain
  misc_feature (301)..(713): NCBI GI: 212535286 Blast Desc: conserved [Penicillium marneffei ATCC 18224] gi|210070198|gb|EEA24288.1| conserved [Penicillium marneffei ATCC 18224]
  misc_feature (301)..(636): NCBI GI: 242792686 Blast Desc: TSTA_117850 [Talaromyces stipitatus ATCC 10500] gi|218718593|gb|EED18013.1| TSTA_117850 [Talaromyces stipitatus ATCC 10500]
  misc_feature (257)..(636): NCBI GI: 145256034 Blast Desc: An10g00100 [Aspergillus niger CBS 513.88] gi|134078573|emb|CAK49101.1| protein product [Aspergillus niger]
  misc_feature (304)..(716): NCBI GI: 121705338 Blast Desc: C6 zinc finger domain protein [Aspergillus clavatus NRRL 1] gi|119399078|gb|EAW09506.1| C6 zinc finger domain protein [Aspergillus clavatus NRRL 1]
  misc_feature (297)..(717): NCBI GI: 134115953 Blast Desc: CNBI3020 [Cryptococcus neoformans var. neoformans B-3501A] gi|50255987|gb|EAL18716.1| CNBI3020 [Cryptococcus neoformans var. neoformans B-3501A]
  misc_feature (303)..(717): NCBI GI: 238838907 Blast Desc: conserved [Microsporum canis CBS 113480]
  misc_feature (287)..(717): NCBI GI: 242778741 Blast Desc: C6 transcription factor, [Talaromyces stipitatus ATCC 10500] gi|218722919|gb|EED22337.1| C6 transcription factor, [Talaromyces stipitatus ATCC 10500]
  misc_feature (303)..(717): NCBI GI: 145230233 Blast Desc: An01g10060 [Aspergillus niger] gi|134055542|emb|CAK37188.1| protein product [Aspergillus niger]
  misc_feature (303)..(775): NCBI GI: 115397397 Blast Desc: conserved [Aspergillus terreus NIH2624] gi|114192481|gb|EAU34181.1| conserved [Aspergillus terreus NIH2624]
  misc_feature (261)..(717): NCBI GI: 238483857 Blast Desc: C6 transcription factor, [Aspergillus flavus NRRL3357] gi|220701217|gb|EED57555.1| C6 transcription factor, [Aspergillus flavus NRRL3357]
MTSGNNACTITRLRPSFTCVPCKRRKVKCDKRKPGCQHCAKTDVVCFYDTITTGTANSSRENALPTPVAPSAAPSSTSSKRRRHVQEEEEATGRANHSPTKSREMENPAGTPPSTDFGGNDVPTATDSVNHFQATPRLYDDSDYMMDKTVWNDIHEVDALTTYPGFDAHAANLLPMPPLSMSMGNFQNTAWVEGSADIGWLFNHKPGISGPSPNACSPPPFVAAPQPVEPVTSILGSSVPQPRLSGSRPPGPGAPAGLAFWASLGSGSGGRDSHNDVERFRQAQQRTYLDRKLSARRLSKLHQIARNIPPKSLCDALLQAFLIVVHPLLPLADVGTLRARYDDFWSQRSQERSLARDEYDSTRIPFVGLLWAILYCGAVATPSTVQDKTSALRTPVSEAFVARLKSMLDKTLSLSCYHEVATLDGLVASVLVFECDPTMDGLIGGPSSLSRLVQAAISLGLNCEETWKASARSDVERDTGRRVWKHIVHLQIMSAFTSGGPLPSHLGQLDTDQGDTYDVTDDMSSTALILAAGRYKMTRTLQHVVEKCSGTQNGITTETAEALGRYVARFHDKIDDLISRLSARGHPELGQIPSQLFEASSLSNPRLYGDYPGQQTVLNSFARILLSMMKHHISIVSGRLLGSPWNSLIPSCILFLHNYLHVSQLPAFYPYRWLFPGKWQPLHECFVVLEYLKEPSQDHDAQLLHYLLNEVFDIFKPREASDEIDTLEPWQRAAYEFAGPVTPPPTLQPTTSLQRQSRIDFAVPHHGNNNFHALPRQGIGVRDVTAATHVAKWTNLPRVENGRGHTTCRNSTASTNPRAPSKELDERMCKGERDAIGGPTASGRPVTRNAQIRMVGPVGVASPPDRQPLNQGGDGMDDDDSYGDDSQDSGGEMEDLWSDFIVLDQGFRH

SEQ ID NO: 5427 - DNA, 6816 bp, Muscodor strobelii
  misc_feature: SGI EST ID NO. CUFF.13923.0
  misc_feature: Variant of the nucleotide sequence at SEQ ID NO 5425
gcggcgttcagagactctacctataagcttaactgtgcccggccgcattacgtgagccgccgtatcgttggctgcttatacgtaggtgtgccgagtctgacaggcctacattatggacctagcacaggaaggaccaagaggtcggtgatattcatctgcggtgtgatatccaatagagcagaatgacggaatatggcagaattggggtggcctcagcactaacattgagccctgagggatgccaaagggcgaaactacctacctaagggtgcttcatcccaaataagcagtatccttaatgctttagaagaaaatttttcgaaagacataattaattaaaagactactagccgacttaaatcctctttttcccctttcctatcctaatcttttacctattcgcacgccatagccgataaccccgaacagaccaccatcataaagatctccaccacaccctacataaatacaagggattatatggtaggtatgtttcccggctcacccgggtctccaactttgtgatgtcgattaaccacaaaatcgcatggacaatcaaacggatttcctgtcaaagccgtaactatattccacaaaacatactccacgccatagcgattgaccgcatattctcgcatttacggtcttatgtaattgtcgggttgtgttcctggcatgacattggctaacccctcttgtgcccatcgccgttccgtaggactgtactaatgactattgagatggcgttttttcttttactgggggtgaagatgtatcactaatacataagtactatacgcattctttccaatcgcgactttactcataccaagccattcacgacttagcttcaatgttgattatgtgcgtcgtaaacatgcgcctaccctggtctggtgcgcaacttgccatgctgacatggtatacccatgcccaccagtggcactcggttcggactcggtacgcactggagccgagctggagcggctggtaagaggcacgcacgcacgcagagtgtcgcctcgccaagatgtggccctcagaacttgacaaatacaggtaccaactacctcaaaattggatttcgacatccctgacatttccgcccatttccatccctaatcgcgtttgcccatgctctgcccatgtggctttaggttgactggagggcatgtcccgtacagatgcctattcttagcccataatcagcagcattcccctcacaaggctaccagcatgcagagcgtcaagccaaagcatacttgggctacgcgttgaaataagcctcgttcgtcgttcacctttgcctctttgatggttcggcttggtcgcatgtccactcagctcgataacacaccttaatcatgacctcgggcaacaatgcctgcaccatcacccgcttgagaccctccttcacctgtgtgccatgcaagcggaggaaggtaagctgcggagccgcaacccgccgatggattgcatgctaatcttccatcctcgccaggtcaaatgcgacaagcgaaagccaggctgccagcattgcgccaaaaccgacgttgtctgcttctatgataccatcacaacggggacggcaaactcctcccgggagaatgcattgccaacacctgtagcaccgtctgcggccccgtcgtcgacctcgtcgaaaagacgacgtcatgtccaggaagaagaagaagccacaggccgcgccaatcatagcccaaccaagagccgtgagatggagaatcctgccggcactcctccctcgacggattttggagggaatgatgtgcctacggccacagacagtgtgaaccactttcaggccacgccaaggttgtacgacgactctgactacatgatggacaagacggtgtggaatgatattcatgaagtcgacgctctcacgacttatccggggtttgatgcacatgcagccaacctgctgcctatgccgcccctgtccatgtccatgggcaactttcaaaacacggcttgggtggagggttctgcagacattggttggttattcaaccacaaacccggtatctcaggtccgtcacctaatgcgtgttctccgccgccatttgtggcggccccgcagcccgttgaacctgtgacgagtattttgggctccagcgtcccgcaaccgcgactttccggaagccgacccccggggccaggcgcccccgccggcctcgccttctgggcgtctctcggtagtgggagcggcggcagggacagtcataatgatgttgagcgtttccggcaggcccagcaaagaacatatttggaccgaaaactcagcgcgcgccgcctctcgaagcttcaccaaatagcacgcaacatccccccaaaatcactgtgcgacgccttattgcaggcttttctcatcgtcgtgcacccgctgctgcctctggccgatgttgggacgttgcgtgcccgctacgacgatttttggagccagcgtagccaggaacggtccctggcccgtgacgagtacgactctacccgaatcccatttgtaggtctcctgtgggccattctgtactgtggagcagtagcgacccctagcactgtccaggacaagacttctgctctccgcactcccgtgtccgaagccttcgtagctcgcttaaagtccatgttggacaaaacgctgtcactgtcgtgttatcacgaggttgcgactcttgatggcctagttgcttccgtgctcgtcttcgagtgcgaccccaccatggatggactgataggcggaccttcaagtctttcgcgactggtccaggcagctatatccctggggctcaactgcgaagaaacttggaaggcaagcgctaggagcgatgtggaacgtgatacagggcgacgggtctggaaacacatcgttcatctccagatcatgagcgcctttacatcgggagggccattgccatcacatcttggccagctagacacagatcaaggcgatacatacgacgtgaccgacgacatgtcgtctacggccttaatcctcgccgcgggacgttataaaatgactcggactctacaacacgtggtagagaagtgctcaggcactcaaaatgggataacgacggagacggctgaggccctaggacggtacgtcgcgaggtttcacgacaagatcgatgacttgatatctcggctatcggcgcgcggccatccagagcttggccaaataccatcgcagttatttgaagcgagttctctcagcaatccacgattgtacggcgattatcctgggcagcagaccgtactaaattcgtttgcacgaatcttgctatctatgatgaaacatcatatatcgatcgtctcaggtcgcttgttggggtccccatggaatagcttaataccgagctgcatactcttcctgcataattatctccacgtttctcagctccctgctttctacccttatcgctggctctttccgggaaagtggcagccactgcacgagtgcttcgtagtgctcgaatacctaaaagaacccagccaagaccacgacgcccagcttctgcactatctgttaaatgaggtcttcgacatcttcaagccccgagaggctagtgatgagattgatacccttgagccttggcagcgggctgcctatgagttgtatgcagcgccatgggccatactgcggcaagctcacgatgatatagagggaagagaatcttaagacagcgctggcccggtgacccctccaccaacacttcagccaacgacctctctgcagagacagagccgcatagacttcgccgtgccgcatcatggtaacaacaacttccatgctctgcctcgccaaggtattggagtccgagacgttacggccgcgacccatgttgccaaatggacgaacctgccgagggtggaaaacggccgcggtcacacaacatgccgaaattccaccgcttctacaaatcctcgagctccaagtaaagagctcgacgagcgtatgtgtaaaggagagcgagacgcgattggggggccgacagcctctggccggcccgttaccagaaacgcacagatacggatggttggacctgttggcgttgcttctccgccggaccgacagccccttaaccagggcggagatggtatggacgatgatgatagttacggagatgactctcaagatagtggaggtgagatggaagatttatggagtgatttcatagttctcgaccaaggttttcgtcactgattggaatgcggagtttttgaaacgctttctaatggttccttgtgcctctttggtggcagatagccgctctaagatggataaaagcagataattagtgcgacgaatatcctggacagtggagcgacagcgacatgcctacccttatctgatctgtcttccctcactatctttttcggcagagataaaatgacatcaggatagactcacaattataccctctacattacttagattcctttgcatgactatctgtctatatctacaaaatacttcgagccagtgtttcctacctctacctgtaaagctatgaaatatgtcgccatgcacagccaacatcaacaataaatacaatgaaacgtccattcaccgcgctagatttcgttatcacactttccaagttcgtccacaaagtgcttcacaagatgattcaccgttgggcacttccacaccagggtaggcgcgatacggacaccgaccaaagcatgctgcatctcaactcggaagtgtaccgtcatgactgagtccatgcccatctcagccaaagccacggccgcatcgacctcttctccgctggacaagcctagcacagatgccacgcacccccgaatggtcgccatgagatgggcctcgagctcttggcccgtcatctgtttcttctcgccgttactcagctccccatcaacaacagcgacggatgctctagtagcttgacgccggcggggcgcaatgtctctcagaactgggtgtggaacttcttcatgagggtctagttcaagtgctctcagcacaacggccgaggccgcagtgatgtagcttcctcggctcccaaagtcgcttccaccgccctgactgttgtcaagcgtggcatcgatgagatcccaggccttaaaagcctcctttaccgtgacatcgccgatgccccgagcagatagctcggcatcaatgtactcggtactggcggccatgccaagaccacgccaactagtccacaagatagccatgaccttttcttgtgccttttgcgcattcttcttggcctcgtggcgcacggccgccaggcgctgctcagcaagttgatccaggaaagaattagcactggcgtaggaagcttggccagggaaacctagaagctgaccacatgaggaaaagagtgtgaagaaatcaagggtacctgcagggaaagctgcgttcaggttcagagcccccgacaccttggggtccaagacgtggtcaaaggcgtcggtggttatttggctgaccagttgatcatgaagaacaccagcggcatgaactactcccttgactgccggcaagtccaaattggcaatggcgtcctttaggcgagcatcggcacctgcttcgccgatgtccagggccaacacgcggatcgtggcacctagctcctcgaggcttactatgcggcggatcgccaagctatcaggaagctttgaccatgtcgaccgtggaggcaagccacggcgagaaatgagcactaggcgacgagcaccgcgctggaccatccatgtcgcgatctcgagacccagagccccaagaccgccggtgatgagataggtgccccccggcgagaaatgcacaagcttcttactgtctccgtcatcgtcacgtctctgtttaccggtactcctttcacgctgttcacccgctagcggccgcaacacagcagaccgggggataccgtcattgtccaacctgatcacatctacaccctgcacgtgacggagtgccccgagcgggaagatggcctgttcgttctcgatctccaaaagacctccgaagatttcggggtgctcagatatgacgatccgggccaatccgtaaagtggagcaaagctcaaggcgcgcaaggtattctgtgcttcaccctcatccgctcgtgtcactagggaaaagactttgcagagcctgctcctgttgcccgagttgcataatagttgaattgctgatatcaacgtcgagcaggagcgtgatgccgctgtcttgatcatacctggactgttggcgacctgcggaacgtgaacaatgactggactgggttggtaagacaccgcggctccaagatcacttgttttggtgacgaagctgctcttcaggcctttggccgtcaattgagccatgtatagcccaacggccaatgcgttagattgcatcttaggctcgctgtcactgtctgactcggcggaaaagaaaatgacgtgattgaaggccaacggcctctcggcaaggactgccgggatccaagtgagttgatggcacatgctagcggcactctgttgtcgtcgcgcgccgacgccaccatccaatggggcgaaaaccatggcctcgaacttgaccagaacctcgcctttctgtgaacagaccaagacatcggcggcagtgggagcagaggaggtgggctcaagctttttgcaatagatcaagccaaggcgaagatcttgttctcgctcaccggacaggataccgggaacggcgacgacgcgactgaccgaggttggcatgcgcagctcgggtttggcgtagaatagggtcgacgcaatcgaagtggcagagtctagcatagatgtaaggtagctgcg

SEQ ID NO: 5428 - DNA, 5697 bp, Muscodor strobelii
  misc_feature: SGI cDNA ID NO. 561524
  misc_feature: Encodes the peptide sequence at SEQ ID NO 5429
atgacaagtctcctatccagcatgatgaagacatcatcatcgagcacaacatcatctgaaagcattaggtcccccgaaaccacagggttgcccacatcagcacatggaacgccgctgtcgaccagtgttgacggcaacagctcggcggagcactctgacgcgggcgaagatgaacacgatatcgccatcatagggatcgcgtgccgcgtacctggcggcaacgattcacccgccgcgctctgggactacctcatgaggcgaggcgatgccgccggagacatgccatctttccggtgggagccctacaaggctcgacacccagacaacgccaatacactggcatccacaacaaacaagggatactttgttaacaacatcactgatttcgacgctagcttcttcgccgtctcgccgcgcgaggctgagcagatggacccgcaacaacgcatcgctcttgaggtggcttgggaagcactggaggacgctggaatcgcgcctcagaaactctcgggcagtgacacgtccgtttatatgggcgtcaactcggacgactatgccaagctggtgcttgaggatctatcacatgtcggtgctcatatgggtgtgggcacggcctactgcggcatacctagccgtatctcctatttgttgaatctgatgggacccagcattgccattgacgccgcctgtgccgcctcccttgtcgcggtgcaccatgcccgccaggccattctagctggcgaaacacagctcgccctagcgggcggtgtcaacgccctcctaggtccgggactgacccgggtcttggacgaagccggcgccatttccgccgatggtcggtgccgctcctttgacgactcagctagcggctacggccgcggagagggtgctggacttgtcgtcttgaagcgccttagccaagccctggccgatggcgaccgcattcatgcggtgctcaagggcagcgctgtggccgcagacggaaagacgctcggcatcatggcacctaacccagtcgcacagcagatggtggcggaaaaggcacttaaagaggctcgagtatcggctgaatcagtcgtctatgttgaggcgcatgccacttcgacgccgataggcgatcccaacgagatggaggctctagcccgcgtatacggtaatggatcaaaaccgtccagggctgagccttgcctggttggatctatcaagtctaacataggccatctcgaggctggtgcaggagtcatggggctgataaaggcagtgatggttttgaaaaagggcatggtgccgccacaggccaacttgtacacgcctaaccgtaagatcccttgggacactaatatgctaaaagtttgtcgtgagcccacagctctaccccggctccacgaggggatgagaccacgggctgctgttgcttcttatggctacagcggtactgtgtctcacgccatcctcgaagccgctcctcccttctatgctacccgtattaatcaaaataccacacatgaacacacggacggggctgagactgttgtgaacatcttcctttccgcacctcaagaaaaccgcctctccgccacagcagcttccctggcccagtggctcgaggcggaaggctccaatgcacccatggacgaagtggcgacgacattagccagtcgccgaagtcatcataagttccgcgctgctatcactgccgcatcaaagtctgaggcaatccaacttcttcaaaagctttcacaaggtcgtgatgacccctttatttctcggggtagctcgactggaagcggagtcgtatgggtcttctctggccacggatcccactggcccgagatgggaagtgagctatacatgacggaatgcgctttcgctgccgtcttcaaagagctcgatcccattgtgatgtccgagatgggattctcgcccatccagtccttgatgtcaggatcctttgttgaccgttccgaccaaatccaggttatgacattcatcatgcacgtcgggctggccacgcttctaatgaaaagggctgggcccccggatgctgtcgtaggccactcactgggcgaggccgccgcggctgtggcggtcggcgcattgcgtatggatgaaggcatgcgcgtcgtttgccggcgagctcgcctctaccagcaggtcatggggacaggagccatggtcctagtcagcgtccctgtcgacgatgggccgctcggtgccgtcttagctgactacccagatgtcgtcatcgccattgacacctcaccatcgtcgtgtgtactttccggcccgaaagcctcgatcgagacgctgaccagggagttggtgaagcgcgaaatccgccacttctctgttcgctccgacatcgcatttcacagtcccatgttgcatgagcttgatgaacccttgcggaaagcgttggcggatgcgctctgcccccagtctcccaagatgactctgtactcaacttcgtcaccagacccccgtgtcccgggtccttgcggcgtggactactggatacgcaacatgatcgagcccgtgttcctgcgaggcgcaatcaaggcagctgccaccgacggattcaaggctttcgtggaagtatcaagccaccccattgtggcccattctattaccgagaccctaggcgatgctggcttcgacgattgcatcgttgtacctaccatgcttcgcaacaagccggccgccaaacagcttatggcctgcgtcggcaagctgcactcattcggctgctctgtcgcctatacagagcttaacaaccgcgcgtggtccgtcgatgtgccgaagacagaatggatacataagagttactggcgagaggttgccaagtttcccacagtgaccgcaacacacgatgccagctccaacagtctgctcggatcgcgtcatgatatctggggccgtagggagactctattcatcacgcgcctagatgagaagaacaagcccttccccggcagccatcccctacacggttctgagattgtgcctgctgctgtgttgatccatactttcctccaggctgccaagtccagagggtcgcagagcgatcccgacttttgcccgagcttgaagaatatgagtctcaaggttccagtttctgtctcgccgccgcgcgacgtccagatcctcatggacaaccgcagacagacgattactatagcgtcaaggctagtgcccagcgacgacgagggtgatggcgcgtggctcgcgaacacgacaaccgaagttgtcgaggatggccaagacgataatacggctttggccaagtctcgactcgacatagacgagactaggaagagactgtcaaacgcgctcccgatcgacttttctatcgcttacctagcgggagttggtgtcccagatatgggcttcccttggcttgtcgtcgaccacatcgccaatgacgacgagatgttggccacagtcgaagcaaacccgaatgacattagaggcatgcgcagctaccttacatctatgctagactctgccacttcgattgcgtcgaccctattctacgccaaacccgagctgcgcatgccaacctcggtcagtcgcgtcgtcgccgttcccggtatcctgtccggtgagcgagaacaagatcttcgccttggcttgatctattgcaaaaagcttgagcccacctcctctgctcccactgccgccgatgtcttggtctgttcacagaaaggcgaggttctggtcaagttcgaggccatggttttcgccccattggatggtggcgtcggcgcgcgacgacaacagagtgccgctagcatgtgccatcaactcacttggatcccggcagtccttgccgagaggccgttggccttcaatcacgtcattttcttttccgccgagtcagacagtgacagcgagcctaagatgcaatctaacgcattggccgttgggctatacatggctcaattgacggccaaaggcctgaagagcagcttcgtcaccaaaacaagtgatcttggagccgcggtgtcttaccaacccagtccagtcattgttcacgttccgcaggtcgccaacagtccaggtatgatcaagacagcggcatcacgctcctgctcgacgttgatatcagcaattcaactattatgcaactcgggcaacaggagcaggctctgcaaagtcttttccctagtgacacgagcggatgagggtgaagcacagaataccttgcgcgccttgagctttgctccactttacggattggcccggatcgtcatatctgagcaccccgaaatcttcggaggtcttttggagatcgagaacgaacaggccatcttcccgctcggggcactccgtcacgtgcagggtgtagatgtgatcaggttggacaatgacggtatcccccggtctgctgtgttgcggccgctagcgggtgaacagcgtgaaaggagtaccggtaaacagagacgtgacgatgacggagacagtaagaagcttgtgcatttctcgccggggggcacctatctcatcaccggcggtcttggggctctgggtctcgagatcgcgacatggatggtccagcgcggtgctcgtcgcctagtgctcatttctcgccgtggcttgcctccacggtcgacatggtcaaagcttcctgatagcttggcgatccgccgcatagtaagcctcgaggagctaggtgccacgatccgcgtgttggccctggacatcggcgaagcaggtgccgatgctcgcctaaaggacgccattgccaatttggacttgccggcagtcaagggagtagttcatgccgctggtgttcttcatgatcaactggtcagccaaataaccaccgacgcctttgaccacgtcttggaccccaaggtgtcgggggctctgaacctgaacgcagctttccctgcaggtacccttgatttcttcacactcttttcctcatgtggtcagcttctaggtttccctggccaagcttcctacgccagtgctaattctttcctggatcaacttgctgagcagcgcctggcggccgtgcgccacgaggccaagaagaatgcgcaaaaggcacaagaaaaggtcatggctatcttgtggactagttggcgtggtcttggcatggccgccagtaccgagtacattgatgccgagctatctgctcggggcatcggcgatgtcacggtaaaggaggcttttaaggcctgggatctcatcgatgccacgcttgacaacagtcagggcggtggaagcgactttgggagccgaggaagctacatcactgcggcctcggccgttgtgctgagagcacttgaactagaccctcatgaagaagttccacacccagttctgagagacattgcgccccgccggcgtcaagctactagagcatccgtcgctgttgttgatggggagctgagtaacggcgagaagaaacagatgacgggccaagagctcgaggcccatctcatggcgaccattcgggggtgcgtggcatctgtgctaggcttgtccagcggagaagaggtcgatgcggccgtggctttggctgagatgggcatggactcagtcatgacggtacacttccgagttgagatgcagcatgctttggtcggtgtccgtatcgcgcctaccctggtgtggaagtgcccaacggtgaatcatcttgtgaagcactttgtggacgaacttggaaagtgtgataacgaaatctag

SEQ ID NO: 5429 - protein, 1898 aa, Muscodor strobelii
  misc_feature: SGI Peptide ID NO. 561524
  misc_feature (599)..(918): Pfam Id: PF00698 Pfam Desc: Acyl transferase domain
  misc_feature (1498)..(1675): Pfam Id: PF00106 Pfam Desc: short chain dehydrogenase
  misc_feature (59)..(308): Pfam Id: PF00109 Pfam Desc: Beta-ketoacyl synthase, N-terminal domain
  misc_feature (316)..(436): Pfam Id: PF02801 Pfam Desc: Beta-ketoacyl synthase, C-terminal domain
  misc_feature (1498)..(1700): Pfam Id: PF08659 Pfam Desc: KR domain
  misc_feature (1819)..(1887): Pfam Id: PF00550 Pfam Desc: Phosphopantetheine attachment site
  misc_feature (1498)..(1670): Pfam Id: PF08659 Pfam Desc: KR domain
  misc_feature (61)..(1192): NCBI GI: 15077467 Blast Desc: polyketide synthase [Streptomyces viridochromogenes]
  misc_feature (61)..(1247): NCBI GI: 159037637 Blast Desc: Beta-ketoacyl synthase [Salinispora arenicola CNS-205] gi|157916472|gb|ABV97899.1| Beta-ketoacyl synthase [Salinispora arenicola CNS-205]
  misc_feature (58)..(810): NCBI GI: 39655051 Blast Desc: ochratoxin A polyketide synthase [Penicillium nordicum]
  misc_feature (61)..(1891): NCBI GI: 223940943 Blast Desc: polyketide synthase [Chondromyces crocatus]
  misc_feature (61)..(962): NCBI GI: 238062678 Blast Desc: polyketide synthase [Micromonospora sp. ATCC 39149] gi|237884489|gb|EEP73317.1| polyketide synthase [Micromonospora sp. ATCC 39149]
  misc_feature (15)..(1893): NCBI GI: 255939382 Blast Desc: Pc16g00370 [Penicillium chrysogenum Wisconsin 54-1255] gi|211585083|emb|CAP92707.1| Pc16g00370 [Penicillium chrysogenum Wisconsin 54-1255]
  misc_feature (14)..(1891): NCBI GI: 1888549 Blast Desc: polyketide synthase [Penicillium griseofulvum]
  misc_feature (40)..(1891): NCBI GI: 145256049 Blast Desc: An10g00140 [Aspergillus niger CBS 513.88] gi|134078577|emb|CAK49105.1| protein product [Aspergillus niger]
  misc_feature (38)..(1893): NCBI GI: 13899024 Blast Desc: AF360398_1 6-methylsalicylic acid synthase [Byssochlamys nivea]
  misc_feature (58)..(1893): NCBI GI: 114213489 Blast Desc: 6-methylsalicylic acid synthase [Aspergillus terreus]
  misc_feature (45)..(1893): SWISSPROT Homolog: EC 2.3.1.165 6-methylsalicylic acid synthase
  misc_feature: Useful for fungicidal and/or biocontrol applications
MTSLLSSMMKTSSSSTTSSESIRSPETTGLPTSAHGTPLSTSVDGNSSAEHSDAGEDEHDIAIIGIACRVPGGNDSPAALWDYLMRRGDAAGDMPSFRWEPYKARHPDNANTLASTTNKGYFVNNITDFDASFFAVSPREAEQMDPQQRIALEVAWEALEDAGIAPQKLSGSDTSVYMGVNSDDYAKLVLEDLSHVGAHMGVGTAYCGIPSRISYLLNLMGPSIAIDAACAASLVAVHHARQAILAGETQLALAGGVNALLGPGLTRVLDEAGAISADGRCRSFDDSASGYGRGEGAGLVVLKRLSQALADGDRIHAVLKGSAVAADGKTLGIMAPNPVAQQMVAEKALKEARVSAESVVYVEAHATSTPIGDPNEMEALARVYGNGSKPSRAEPCLVGSIKSNIGHLEAGAGVMGLIKAVMVLKKGMVPPQANLYTPNRKIPWDTNMLKVCREPTALPRLHEGMRPRAAVASYGYSGTVSHAILEAAPPFYATRINQNTTHEHTDGAETVVNIFLSAPQENRLSATAASLAQWLEAEGSNAPMDEVATTLASRRSHHKFRAAITAASKSEAIQLLQKLSQGRDDPFISRGSSTGSGVVWVFSGHGSHWPEMGSELYMTECAFAAVFKELDPIVMSEMGFSPIQSLMSGSFVDRSDQIQVMTFIMHVGLATLLMKRAGPPDAVVGHSLGEAAAAVAVGALRMDEGMRVVCRRARLYQQVMGTGAMVLVSVPVDDGPLGAVLADYPDVVIAIDTSPSSCVLSGPKASIETLTRELVKREIRHFSVRSDIAFHSPMLHELDEPLRKALADALCPQSPKMTLYSTSSPDPRVPGPCGVDYWIRNMIEPVFLRGAIKAAATDGFKAFVEVSSHPIVAHSITETLGDAGFDDCIVVPTMLRNKPAAKQLMACVGKLHSFGCSVAYTELNNRAWSVDVPKTEWIHKSYWREVAKFPTVTATHDASSNSLLGSRHDIWGRRETLFITRLDEKNKPFPGSHPLHGSEIVPAAVLIHTFLQAAKSRGSQSDPDFCPSLKNMSLKVPVSVSPPRDVQILMDNRRQTITIASRLVPSDDEGDGAWLANTTTEVVEDGQDDNTALAKSRLDIDETRKRLSNALPIDFSIAYLAGVGVPDMGFPWLVVDHIANDDEMLATVEANPNDIRGMRSYLTSMLDSATSIASTLFYAKPELRMPTSVSRVVAVPGILSGEREQDLRLGLIYCKKLEPTSSAPTAADVLVCSQKGEVLVKFEAMVFAPLDGGVGARRQQSAASMCHQLTWIPAVLAERPLAFNHVIFFSAESDSDSEPKMQSNALAVGLYMAQLTAKGLKSSFVTKTSDLGAAVSYQPSPVIVHVPQVANSPGMIKTAASRSCSTLISAIQLLCNSGNRSRLCKVFSLVTRADEGEAQNTLRALSFAPLYGLARIVISEHPEIFGGLLEIENEQAIFPLGALRHVQGVDVIRLDNDGIPRSAVLRPLAGEQRERSTGKQRRDDDGDSKKLVHFSPGGTYLITGGLGALGLEIATWMVQRGARRLVLISRRGLPPRSTWSKLPDSLAIRRIVSLEELGATIRVLALDIGEAGADARLKDAIANLDLPAVKGVVHAAGVLHDQLVSQITTDAFDHVLDPKVSGALNLNAAFPAGTLDFFTLFSSCGQLLGFPGQASYASANSFLDQLAEQRLAAVRHEAKKNAQKAQEKVMAILWTSWRGLGMAASTEYIDAELSARGIGDVTVKEAFKAWDLIDATLDNSQGGGSDFGSRGSYITAASAVVLRALELDPHEEVPHPVLRDIAPRRRQATRASVAVVDGELSNGEKKQMTGQELEAHLMATIRGCVASVLGLSSGEEVDAAVALAEMGMDSVMTVHFRVEMQHALVGVRIAPTLVWKCPTVNHLVKHFVDELGKCDNEI

SEQ ID NO: 5430 - DNA, 1227 bp, Muscodor strobelii
  misc_feature: SGI EST ID NO. CUFF.13729.0
  misc_feature: Variant of the nucleotide sequence at SEQ ID NO 5428
gaaggcatgcgcgtcgtttgccggcgagctcgcctctaccagcaggtcatggggacaggagccatggtcctagtcagcgtccctgtcgacgatgggccgctcggtgccgtcttagctgactacccagatgtcgtcatcgccattgacacctcaccatcgtcgtgtgtactttccggcccgaaagcctcgatcgagacgctgaccagggagttggtgaagcgcgaaatccgccacttctctgttcgctccgacatcgcatttcacagtcccatgttgcatgagcttgatgaacccttgcggaaagcgttggcggatgcgctctgcccccagtctcccaagatgactctgtactcaacttcgtcaccagacccccgtgtcccgggtccttgcggcgtggactactggatacgcaacatgatcgagcccgtgttcctgcgaggcgcaatcaaggcagctgccaccgacggattcaaggctttcgtggaagtatcaagccaccccattgtggcccattctattaccgagaccctaggcgatgctggcttcgacgattgcatcgttgtacctaccatgcttcgcaacaagccggccgccaaacagcttatggcctgcgtcggcaagctgcactcattcggctgctctgtcgcctatacagagcttaacaaccgcgcgtggtccgtcgatgtgccgaagacagaatggatacataagagttactggcgagaggttgccaagtttcccacagtgaccgcaacacacgatgccagctccaacagtctgctcggatcgcgtcatgatatctggggccgtagggagactctattcatcacgcgcctagatgagaagaacaagcccttccccggcagccatcccctacacggttctgagattgtgcctgctgctgtgttgatccatactttcctccaggctgccaagtccagagggtcgcagagcgatcccgacttttgcccgagcttgaagaatatgagtctcaaggttccagtttctgtctcgccgccgcgcgacgtccagatcctcatggacaaccgcagacagacgattactatagcgtcaaggctagtgcccagcgacgacgagggtgatggcgcgtggctcgcgaacacgacaaccgaagttgtcgaggatggccaagacgataatacggctttggccaagtctcgactcgacatagacgagactaggaagagactgtcaaacgcgctcccg

SEQ ID NO: 5431 - DNA, 2268 bp, Muscodor strobelii
  misc_feature: SGI cDNA ID NO. 561525
  misc_feature: Encodes the peptide sequence at SEQ ID NO 5432
atgttggccacagtcgaagcaaacccgaatgacattagaggcatgcgcagctaccttacatctatgctagactctgccacttcgattgcgtcgaccctattctacgccaaacccgagctgcgcatgccaacctcggtcagtcgcgtcgtcgccgttcccggtatcctgtccggtgagcgagaacaagatcttcgccttggcttgatctattgcaaaaagcttgagcccacctcctctgctcccactgccgccgatgtcttggtctgttcacagaaaggcgaggttctggtcaagttcgaggccatggttttcgccccattggatggtggcgtcggcgcgcgacgacaacagagtgccgctagcatgtgccatcaactcacttggatcccggcagtccttgccgagaggccgttggccttcaatcacgtcattttcttttccgccgagtcagacagtgacagcgagcctaagatgcaatctaacgcattggccgttgggctatacatggctcaattgacggccaaaggcctgaagagcagcttcgtcaccaaaacaagtgatcttggagccgcggtgtcttaccaacccagtccagtcattgttcacgttccgcaggtcgccaacagtccaggtatgatcaagacagcggcatcacgctcctgctcgacgttgatatcagcaattcaactattatgcaactcgggcaacaggagcaggctctgcaaagtcttttccctagtgacacgagcggatgagggtgaagcacagaataccttgcgcgccttgagctttgctccactttacggattggcccggatcgtcatatctgagcaccccgaaatcttcggaggtcttttggagatcgagaacgaacaggccatcttcccgctcggggcactccgtcacgtgcagggtgtagatgtgatcaggttggacaatgacggtatcccccggtctgctgtgttgcggccgctagcgggtgaacagcgtgaaaggagtaccggtaaacagagacgtgacgatgacggagacagtaagaagcttgtgcatttctcgccggggggcacctatctcatcaccggcggtcttggggctctgggtctcgagatcgcgacatggatggtccagcgcggtgctcgtcgcctagtgctcatttctcgccgtggcttgcctccacggtcgacatggtcaaagcttcctgatagcttggcgatccgccgcatagtaagcctcgaggagctaggtgccacgatccgcgtgttggccctggacatcggcgaagcaggtgccgatgctcgcctaaaggacgccattgccaatttggacttgccggcagtcaagggagtagttcatgccgctggtgttcttcatgatcaactggtcagccaaataaccaccgacgcctttgaccacgtcttggaccccaaggtgtcgggggctctgaacctgaacgcagctttccctgcaggtacccttgatttcttcacactcttttcctcatgtggtcagcttctaggtttccctggccaagcttcctacgccagtgctaattctttcctggatcaacttgctgagcagcgcctggcggccgtgcgccacgaggccaagaagaatgcgcaaaaggcacaagaaaaggtcatggctatcttgtggactagttggcgtggtcttggcatggccgccagtaccgagtacattgatgccgagctatctgctcggggcatcggcgatgtcacggtaaaggaggcttttaaggcctgggatctcatcgatgccacgcttgacaacagtcagggcggtggaagcgactttgggagccgaggaagctacatcactgcggcctcggccgttgtgctgagagcacttgaactagaccctcatgaagaagttccacacccagttctgagagacattgcgccccgccggcgtcaagctactagagcatccgtcgctgttgttgatggggagctgagtaacggcgagaagaaacagatgacgggccaagagctcgaggcccatctcatggcgaccattcgggggtgcgtggcatctgtgctaggcttgtccagcggagaagaggtcgatgcggccgtggctttggctgagatgggcatggactcagtcatgacggtacacttccgagttgagatgcagcatgctttggtcggtgtccgtatcgcgcctaccctggtgtggaagtgcccaacggtgaatcatcttgtgaagcactttgtggacgaacttggaaagtgtgataacgaaatctag

SEQ ID NO: 5432 - protein, 755 aa, Muscodor strobelii
  misc_feature: SGI Peptide ID NO. 561525
  misc_feature (355)..(532): Pfam Id: PF00106 Pfam Desc: short chain dehydrogenase
  misc_feature (355)..(557): Pfam Id: PF08659 Pfam Desc: KR domain
  misc_feature (676)..(744): Pfam Id: PF00550 Pfam Desc: Phosphopantetheine attachment site
  misc_feature (355)..(527): Pfam Id: PF08659 Pfam Desc: KR domain
  misc_feature (1)..(748): NCBI GI: 1888549 Blast Desc: polyketide synthase [Penicillium griseofulvum]
  misc_feature (1)..(750): NCBI GI: 255939382 Blast Desc: Pc16g00370 [Penicillium chrysogenum Wisconsin 54-1255] gi|211585083|emb|CAP92707.1| Pc16g00370 [Penicillium chrysogenum Wisconsin 54-1255]
  misc_feature (1)..(748): NCBI GI: 145256049 Blast Desc: An10g00140 [Aspergillus niger CBS 513.88] gi|134078577|emb|CAK49105.1| protein product [Aspergillus niger]
  misc_feature (22)..(750): NCBI GI: 114213489 Blast Desc: 6-methylsalicylic acid synthase [Aspergillus terreus]
  misc_feature (22)..(750): NCBI GI: 13899024 Blast Desc: AF360398_1 6-methylsalicylic acid synthase [Byssochlamys nivea]
  misc_feature (22)..(750): NCBI GI: 950203 Blast Desc: polyketide synthase [Aspergillus terreus]
  misc_feature (22)..(750): NCBI GI: 115399712 Blast Desc: 6-methylsalicylic acid synthase [Aspergillus terreus NIH2624] gi|114191119|gb|EAU32819.1| 6-methylsalicylic acid synthase [Aspergillus terreus NIH2624]
  misc_feature (1)..(750): NCBI GI: 238840119 Blast Desc: 6-methylsalicylic acid synthase [Microsporum canis CBS 113480]
  misc_feature (1)..(750): NCBI GI: 127337 Blast Desc: MSAS_PENPA RecName: Full=6-methylsalicylic acid synthase; Short=6-MSAS gi|3212|emb|CAA39295.1| 6-Methyl salicylic acid Synthase [Penicillium griseofulvum]
  misc_feature (1)..(750): NCBI GI: 121710954 Blast Desc: 6-methylsalicylic acid synthase MsaS [Aspergillus clavatus NRRL 1] gi|119401243|gb|EAW11667.1| 6-methylsalicylic acid synthase MsaS [Aspergillus clavatus NRRL 1]
  misc_feature (1)..(750): SWISSPROT Homolog: EC 2.3.1.165 6-methylsalicylic acid synthase
  misc_feature: Useful for fungicidal and/or biocontrol applications
MLATVEANPNDIRGMRSYLTSMLDSATSIASTLFYAKPELRMPTSVSRVVAVPGILSGEREQDLRLGLIYCKKLEPTSSAPTAADVLVCSQKGEVLVKFEAMVFAPLDGGVGARRQQSAASMCHQLTWIPAVLAERPLAFNHVIFFSAESDSDSEPKMQSNALAVGLYMAQLTAKGLKSSFVTKTSDLGAAVSYQPSPVIVHVPQVANSPGMIKTAASRSCSTLISAIQLLCNSGNRSRLCKVFSLVTRADEGEAQNTLRALSFAPLYGLARIVISEHPEIFGGLLEIENEQAIFPLGALRHVQGVDVIRLDNDGIPRSAVLRPLAGEQRERSTGKQRRDDDGDSKKLVHFSPGGTYLITGGLGALGLEIATWMVQRGARRLVLISRRGLPPRSTWSKLPDSLAIRRIVSLEELGATIRVLALDIGEAGADARLKDAIANLDLPAVKGVVHAAGVLHDQLVSQITTDAFDHVLDPKVSGALNLNAAFPAGTLDFFTLFSSCGQLLGFPGQASYASANSFLDQLAEQRLAAVRHEAKKNAQKAQEKVMAILWTSWRGLGMAASTEYIDAELSARGIGDVTVKEAFKAWDLIDATLDNSQGGGSDFGSRGSYITAASAVVLRALELDPHEEVPHPVLRDIAPRRRQATRASVAVVDGELSNGEKKQMTGQELEAHLMATIRGCVASVLGLSSGEEVDAAVALAEMGMDSVMTVHFRVEMQHALVGVRIAPTLVWKCPTVNHLVKHFVDELGKCDNEI

SEQ ID NO: 5433 - DNA, 948 bp, Muscodor strobelii
  misc_feature: SGI cDNA ID NO. 561526
  misc_feature: Encodes the peptide sequence at SEQ ID NO 5434
atgactaccaaacctcgacagaaactatcggcgacaatgccacagaggaacacacttcgcggtgtgtgggagctggcccgtttccacactcgagagtcgtggctttgctggtacccagctatttggggagcgtgtgtcgccgccagcagccagcatgttgtcctggaaccctacgcctttctcagggtaatctttgggatctgggtcagcgtcacggcctcacatgccgctttttgtactttcaatgatatctgtgatcggaacttagatgtacacgtcgagcgatgcaaggtccgacctcttccatcgggcatgatatctacacgcaatgcaatcctggcctttctcctctgggttccctcaaccgtctgggttacctgggctacgctgggcgacaaagctgtcattgctttcttgcccgtctggggcctgagcttcatttatcctttcatgaaacgcttaatacagtttccacaggtggtgctcggggcctgcattggggctgctgttttccccggctgggttgccatcacacagcagctcgacaatctgtggaatgcagtcccactcttcgcggctacggccgtctgggtcgtctacttcgatgtcatatacgcgacgcaggacacgcccgacgatgagaagatcggcgttaagtctctcaccattctcatggccggccacctgcagaccttcctctctgtaatggccgtcttgcaagtcgcgctatttgcacaggccgctaggaccgcgcattcatcgctgatcttttggattcttggtgttgctgtctgggccgggaatctgccttggcacatcatatccttggatacccgtgatagaaagtccggtggacgagtcttcaaggccaacattaagctagggttgtatatgaccggcgtttcgattgctgagctggttatcaaccgagttcagctgtcgtcataa

SEQ ID NO: 5434 - protein, 315 aa, Muscodor strobelii
  misc_feature: SGI Peptide ID NO. 561526
  misc_feature (33)..(305): Pfam Id: PF01040 Pfam Desc: UbiA prenyltransferase family
  misc_feature (14)..(311): NCBI GI: 255939384 Blast Desc: Pc16g00380 [Penicillium chrysogenum Wisconsin 54-1255] gi|211585084|emb|CAP92708.1| Pc16g00380 [Penicillium chrysogenum Wisconsin 54-1255]
  misc_feature (2)..(312): NCBI GI: 145256046 Blast Desc: An10g00130 [Aspergillus niger CBS 513.88] gi|134078576|emb|CAK49104.1| protein product [Aspergillus niger]
  misc_feature (13)..(305): NCBI GI: 145252150 Blast Desc: An16g02750 [Aspergillus niger] gi|134083133|emb|CAK48585.1| protein product [Aspergillus niger]
  misc_feature (24)..(298): NCBI GI: 91978575 Blast Desc: 4-hydroxybenzoate polyprenyltransferase [Rhodopseudomonas palustris BisB5] gi|91685031|gb|ABE41333.1| 4-hydroxybenzoate octaprenyltransferase [Rhodopseudomonas BisB5]
  misc_feature (69)..(309): NCBI GI: 170751752 Blast Desc: 4-hydroxybenzoate polyprenyl transferase [Methylobacterium radiotolerans JCM 2831] gi|170658274|gb|ACB27329.1| 4-hydroxybenzoate polyprenyl JCM
  misc_feature (17)..(291): NCBI GI: 148253215 Blast Desc: 4-hydroxybenzoate polyprenyltransferase [Bradyrhizobium sp. BTAi1] gi|146405388|gb|ABQ33894.1| 4-hydroxybenzoate octaprenyltransferase [Bradyrhizobium sp.
  misc_feature (20)..(307): NCBI GI: 283840697 Blast Desc: 4-hydroxybenzoate polyprenyl transferase [Rhodopseudomonas palustris DX-1] gi|283578423|gb|EFC25848.1| 4-hydroxybenzoate polyprenyl transferase [Rhodopseudomonas DX-1]
  misc_feature (20)..(307): NCBI GI: 192289754 Blast Desc: 4-hydroxybenzoate polyprenyl transferase [Rhodopseudomonas palustris TIE-1] gi|192283503|gb|ACE99883.1| 4-hydroxybenzoate polyprenyl transferase [Rhodopseudomonas TIE-1]
  misc_feature (1)..(291): NCBI GI: 146342921 Blast Desc: prenyltransferase [Bradyrhizobium sp. ORS278] gi|146195727|emb|CAL79754.1| 4-hydroxybenzoate-octaprenyl transferase [Bradyrhizobium sp. ORS278]
  misc_feature (69)..(298): NCBI GI: 188580092 Blast Desc: 4-hydroxybenzoate polyprenyl transferase [Methylobacterium populi BJ001] gi|179343590|gb|ACB79002.1| 4-hydroxybenzoate polyprenyl transferase [Methylobacterium populi
MTTKPRQKLSATMPQRNTLRGVWELARFHTRESWLCWYPAIWGACVAASSQHVVLEPYAFLRVIFGIWVSVTASHAAFCTFNDICDRNLDVHVERCKVRPLPSGMISTRNAILAFLLWVPSTVWVTWATLGDKAVIAFLPVWGLSFIYPFMKRLIQFPQVVLGACIGAAVFPGWVAITQQLDNLWNAVPLFAATAVWVVYFDVIYATQDTPDDEKIGVKSLTILMAGHLQTFLSVMAVLQVALFAQAARTAHSSLIFWILGVAVWAGNLPWHIISLDTRDRKSGGRVFKANIKLGLYMTGVSIAELVINRVQLSS

SEQ ID NO: 5435 - DNA, 1437 bp, Muscodor strobelii
  misc_feature: SGI cDNA ID NO. 561527
  misc_feature: Elevated expression when VOC is produced
  misc_feature: Encodes the peptide sequence at SEQ ID NO 5436
atgactgttgacgttccaccactggccatggagcgttcgtctgcgcaagctatggcacttagcgataacgattcggagtctgttattgatgagaaaaaacttgtgctgaagctcgatcacactttcagcttcttggatagggtgaatattggaaatgcaagactgtacaatctagagagggacctaaacctttctccgacccaatttcaaaccgccgtgtctattctatttgttacttaccttgtctttgaattgccttccaacctcgttctcaagcgtttcacgccccagcgttggctctcctttatcgtgcttgtttggggcatcttggcccttgtaacaggcttcattcgtaattatggcagcctagttgctttgcgacttttactcggggcttttgaggcaggtttatttcctggactcaatgtctaccttacatttttctacaccaaacgcgaattggcactgcgggttggctacctcttcgtcagtgctgccgttgccggcgctttgggaggactgttagcatatggtattggtcacctcgacggcgtggctggcatgagtggatggcggtggattatgattatcgaggggattcccagtattttgcttgggtttgtggtctactttttgttgccgaacgatgttgaccacgcatactttctatcgcccgaggagaagaagttcatgcacacaagaatgcaacgatactatggcgttacagagagtgctcagaatttcgacaagaaggatatgatggcggcattcaaagactggaaagtgtggacgttctgtgttggccagtttggtggcgatactatgctttatggttactcgacgttcttgccaactatcatcaaaggcttaggtagttggaccactgcagagatacagctgctcaccattccatgttatgcgcttggagccacgacctacatgagtattgcgtacttatcagatcgaaagcagatgcgtggtatcttctgtgtcatattcggctcgcttagtgtcattggctatggtattttgctgtcggactcgcccgctggtgtacattattttgcgtgtttcctgatcgcgacgggactctatgttctagttggactgccactggcttggctaccaaataacagtcctcgctacggcaaacgtgcgactgccaatggcctgcaactcacaatcggcaatagcagtgggattatggcttcgttcatctattcgagtggcagtgcgccgagatacatcaaaggaaacgccatttcactgtcgcttgtggggctgagcgcgatcttgtatgggcttctgtggttttggtttgcgcgggagaacaggaggcgagagagaggtcaaatcaaggctgaataccagaacttgtcggaggaggcatgggccgaacttggagacgaaagtcccaagtttcgatacactatctga

SEQ ID NO: 5436 - protein, 478 aa, Muscodor strobelii
  misc_feature: SGI Peptide ID NO. 561527
  misc_feature (36)..(404): Pfam Id: PF07690 Pfam Desc: Major Facilitator Superfamily
  misc_feature (42)..(404): Pfam Id: PF07690 Pfam Desc: Major Facilitator Superfamily
  misc_feature (29)..(478): NCBI GI: 261354928 Blast Desc: high-affinity nicotinic acid transporter [Verticillium albo-atrum VaMs.102]
  misc_feature (31)..(478): NCBI GI: 189194747 Blast Desc: conserved [Pyrenophora tritici-repentis Pt-1C-BFP] gi|187979276|gb|EDU45902.1| conserved [Pyrenophora tritici-repentis Pt-1C-BFP]
  misc_feature (12)..(478): NCBI GI: 256729126 Blast Desc: [Nectria haematococca mpVI 77-13-4]
  misc_feature (13)..(476): NCBI GI: 46138589 Blast Desc: FG10809.1 [Gibberella zeae PH-1]
  misc_feature (24)..(477): NCBI GI: 259484879 Blast Desc: TPA: conserved [Aspergillus nidulans FGSC A4]
  misc_feature (21)..(477): NCBI GI: 121703990 Blast Desc: MFS transporter, [Aspergillus clavatus NRRL 1] gi|119398403|gb|EAW08833.1| MFS transporter, [Aspergillus clavatus NRRL 1]
  misc_feature (10)..(477): NCBI GI: 70984595 Blast Desc: MFS transporter [Aspergillus fumigatus Af293] gi|66845431|gb|EAL85766.1| MFS transporter, [Aspergillus fumigatus Af293] gi|159122585|gb|EDP47706.1| MFS transporter,
  misc_feature (3)..(478): NCBI GI: 259483057 Blast Desc: TPA: MFS transporter, (AFU_orthologue; AFUA_6G02730) [Aspergillus nidulans FGSC A4]
  misc_feature (3)..(477): NCBI GI: 119467316 Blast Desc: MFS transporter, [Neosartorya fischeri NRRL 181] gi|119405616|gb|EAW15567.1| MFS transporter, [Neosartorya fischeri NRRL 181]
  misc_feature (31)..(478): NCBI GI: 255951076 Blast Desc: Pc22g24160 [Penicillium chrysogenum Wisconsin 54-1255] gi|211593322|emb|CAP99704.1| Pc22g24160 [Penicillium chrysogenum Wisconsin 54-1255]
  misc_feature: Useful for introducing or modulating the production of volatile compounds
MTVDVPPLAMERSSAQAMALSDNDSESVIDEKKLVLKLDHTFSFLDRVNIGNARLYNLERDLNLSPTQFQTAVSILFVTYLVFELPSNLVLKRFTPQRWLSFIVLVWGILALVTGFIRNYGSLVALRLLLGAFEAGLFPGLNVYLTFFYTKRELALRVGYLFVSAAVAGALGGLLAYGIGHLDGVAGMSGWRWIMIIEGIPSILLGFVVYFLLPNDVDHAYFLSPEEKKFMHTRMQRYYGVTESAQNFDKKDMMAAFKDWKVWTFCVGQFGGDTMLYGYSTFLPTIIKGLGSWTTAEIQLLTIPCYALGATTYMSIAYLSDRKQMRGIFCVIFGSLSVIGYGILLSDSPAGVHYFACFLIATGLYVLVGLPLAWLPNNSPRYGKRATANGLQLTIGNSSGIMASFIYSSGSAPRYIKGNAISLSLVGLSAILYGLLWFWFARENRRRERGQIKAEYQNLSEEAWAELGDESPKFRYTI

SEQ ID NO: 5437 - DNA, 1592 bp, Muscodor strobelii
  misc_feature: SGI EST ID NO. CUFF.13760.0
  misc_feature: Variant of the nucleotide sequence at SEQ ID NO 5435
gtttcacgccccagcgttggctctcctttatcgtgcttgtttggggcatcttggcccttgtaacaggcttcattcgtaattatggcagcctagttgctttgcgacttttactcggggcttttgaggcaggtttatttcctggactcaatgtctaccttacatttttctacaccaaacgcgaattggcactgcgggttggctacctcttcgtcagtgctgccgttgccggcgctttgggaggactgttagcatatggtattggtcacctcgacggcgtggctggcatgagtggatggcggtggattatgattatcgaggggattcccagtattttgcttgggtttgtggtctactttttgttgccgaacgatgttgaccacgcatactttctatcgcccgaggagaagaagttcatgcacacaagaatgcaacgatactatggcgttacagagagtgctcagaatttcgacaagaaggatatgatggcggcattcaaagactggaaagtgtggacgttctgtgttggccagtttggtggcgatactatgctttatggttactcgacgttcttgccaactatcatcaaaggcttaggtagttggaccactgcagagatacagctgctcaccattccatgttatgcgcttggagccacgacctacatgagtattgcgtacttatcagatcgaaagcagatgcgtggtatcttctgtgtcatattcggctcgcttagtgtcattggctatggtattttgctgtcggactcgcccgctggtgtacattattttgcgtgtttcctgatcgcgacgggactctatgttctagttggactgccactggcttggctaccaaataacagtcctcgctacggcaaacgtgcgactgccaatggcctgcaactcacaatcggcaatagcagtgggattatggcttcgttcatctattcgagtggcagtgcgccgagatacatcaaaggaaacgccatttcactgtcgcttgtggggctgagcgcgatcttgtatgggcttctgtggttttggtttgcgcgggagaacaggaggcgagagagaggtcaaatcaaggctgaataccagaacttgtcggaggaggcatgggccgaacttggagacgaaagtcccaagtttcgatacactatctgaagcaggcggcaggaatctaccttaccctgccttacacttcacaattgattgcaagtacctccaatctacagtcatcagagtacaggtacggctgtgattgattcaattgtgtcacatctgccagttgagctattgtcgcgaaggacgaatgatacagtggatatcctggtatacatcccgccagctgctcatctgagggggtcataaatcatctaccaattgcattttcaagcgttgttttacccaagcttctaggtcaactataagtgcacgaacaggcaaacaagcttcaaggtcgcaagccatcgaaaagacgactgaggctgcggttggcgtatagggggtacctgacataggaagaggcgagctctgactggccactttgctcaggaagctgtagccccatagtggggggcaagtgcaggggaggtc

SEQ ID NO: 5438 - DNA, 804 bp, Muscodor strobelii
  misc_feature: SGI cDNA ID NO. 561528
  misc_feature: Encodes the peptide sequence at SEQ ID NO 5439
atgcctcagcaaatccccaccgccagcaagctccaggacctgctcagcctcaagggcaaggtcatcgtcgtcactggcgcgtctggcccccgtggcatgggcattgaggccgctcgtggagctgccgagatgggcgccgacgttgccatcacctactcctctcgcaaggagggtgccgagaagaacgtcgaggagcttaccaaggactatggcgtcaaggccaaggcgtacaagtgcaatgtcgcagactttgcttcgtgcgaggagctcgttaagaatgtccttaacgactttggcggcaagatcgatggcttcgttgccaacgccggtgctacggctgacaatggtgtccttgacggctccgttgatgagtggaaccatgtcatccagaccgatctcaacggcaccgcctactgcgccaaggctattggtcccgtctttaagaagcagggcaaaggctccttcgttatcacggcctccatgtctggccacgttgccaatttcccccaggagcagaccagctacaacgttgctaaagctggctgcatccacatggcccgttcgctcgccaacgagtggcgcgatttcgctcgtgtcaacagcatttcccccggctacattgacaccggtctgtccgacttcatcgacgcgaagactcaagatctctggaggagcatgatccctatgaatcgtaacggtgacgccaaggagctcaagggtgcctatgtctacttcctcagtgatgccagtacgtacactaccggtgctgacatggtcattgacggtggttacacatgccgataa

SEQ ID NO: 5439 - protein, 267 aa, Muscodor strobelii
  misc_feature: SGI Peptide ID NO. 561528
  misc_feature (20)..(194): Pfam Id: PF00106 Pfam Desc: short chain dehydrogenase
  misc_feature (21)..(196): Pfam Id: PF08659 Pfam Desc: KR domain
  misc_feature (1)..(267): NCBI GI: 67901206 Blast Desc: AN7590.2 [Aspergillus nidulans FGSC A4] gi|40742980|gb|EAA62170.1| AN7590.2 [Aspergillus nidulans FGSC A4] gi|259483915|tpe|CBF79695.1| TPA: similar to NADP-dependent
  misc_feature (5)..(267): NCBI GI: 85091614 Blast Desc: L-xylulose reductase [Neurospora crassa OR74A] gi|28920382|gb|EAA29752.1| L-xylulose reductase [Neurospora crassa OR74A]
  misc_feature (1)..(267): NCBI GI: 50400559 Blast Desc: DCXR_TRIRE RecName: Full=L-xylulose reductase; Short=XR gi|20378204|gb|AAM20896.1|AF375616_1 L-xylulose reductase [Hypocrea jecorina]
  misc_feature (1)..(267): NCBI GI: 46120358 Blast Desc: FG04826.1 [Gibberella zeae PH-1] gi|30692097|gb|AAP33281.1| mannitol dehydrogenase [Gibberella zeae]
  misc_feature (4)..(267): NCBI GI: 261354120 Blast Desc: L-xylulose reductase [Verticillium albo-atrum VaMs.102]
  misc_feature (5)..(267): NCBI GI: 171681295 Blast Desc: protein product [Podospora anserina] gi|170940606|emb|CAP65834.1| protein product [Podospora anserina]
  misc_feature (1)..(267): NCBI GI: 85792474 Blast Desc: mannitol dehydrogenase [Botryotinia fuckeliana]
  misc_feature (1)..(267): NCBI GI: 145251121 Blast Desc: An15g05450 [Aspergillus niger] gi|134082603|emb|CAK97330.1| protein product [Aspergillus niger]
  misc_feature (1)..(267): NCBI GI: 156048136 Blast Desc: SS1G_08799 [Sclerotinia sclerotiorum 1980] gi|154693196|gb|EDN92934.1| SS1G_08799 [Sclerotinia sclerotiorum 1980]
  misc_feature (1)..(267): NCBI GI: 14550183 Blast Desc: AF387300_1 NADP-dependent mannitol dehydrogenase [Passalora fulva]
  misc_feature (1)..(267): SWISSPROT Homolog: EC 1.1.1.10 L-xylulose reductase
MPQQIPTASKLQDLLSLKGKVIVVTGASGPRGMGIEAARGAAEMGADVAITYSSRKEGAEKNVEELTKDYGVKAKAYKCNVADFASCEELVKNVLNDFGGKIDGFVANAGATADNGVLDGSVDEWNHVIQTDLNGTAYCAKAIGPVFKKQGKGSFVITASMSGHVANFPQEQTSYNVAKAGCIHMARSLANEWRDFARVNSISPGYIDTGLSDFIDAKTQDLWRSMIPMNRNGDAKELKGAYVYFLSDASTYTTGADMVIDGGYTCR

SEQ ID NO: 5440 - DNA, 1426 bp, Muscodor strobelii
  misc_feature: SGI EST ID NO. CUFF.13775.0
  misc_feature: Variant of the nucleotide sequence at SEQ ID NO 5438
tgagaatgcgcgaacaccgcaaaagttgggccgatagctagggcaaccctcgcggccatctatggctcgatggtttttggtctaattcctgagaaacccctcatcgacccctccatgctttgagccgtttgttgagcctagtcttttgtttatatgtcctgccctcccctctctcccaaacttactttcccattgaaactacctacctatttcatcattcttcttattcttcttccatccatcaaccgccccttgaatcttcacctcttcaaataaacacatatcaacattcaagatgcctcagcaaatccccaccgccagcaagctccaggacctgctcagcctcaagggcaaggtcatcgtcgtcactggcgcgtctggcccccgtggcatgggcattgaggccgctcgtggagctgccgagatgggcgccgacgttgccatcacctactcctctcgcaaggagggtgccgagaagaacgtcgaggagcttaccaaggactatggcgtcaaggccaaggcgtacaagtgcaatgtcgcagactttgcttcgtgcgaggagctcgttaagaatgtccttaacgactttggcggcaagatcgatggcttcgttgccaacgccggtgctacggctgacaatggtgtccttgacggctccgttgatgagtggaaccatgtcatccagaccgatctcaacggcaccgcctactgcgccaaggctattggtcccgtctttaagaagcagggcaaaggctccttcgttatcacggcctccatgtctggccacgttgccaatttcccccaggagcagaccagctacaacgttgctaaagctggctgcatccacatggcccgttcgctcgccaacgagtggcgcgatttcgctcgtgtcaacagcatttcccccggctacattgacaccggtctgtccgacttcatcgacgcgaagactcaagatctctggaggagcatgatccctatgaatcgtaacggtgacgccaaggagctcaagggtgcctatgtctacttcctcagtgatgccagtacgtacactaccggtgctgacatggtcattgacggtggttacacatgccgataaatgcttccttgtctcgaagactgatgtttatggtgatgaaaatggcggggtttgctcgctcctcattaggcgttttggaaccaaatggatgtacgcatgaatgactcaaaaataatctactattgtatctagatggagtttagacacctaggaattgatataggctcctctggttaatactacccctgaatctcaaatttggagcgaagctttgatgttttgggccagtcgccattatcgctgtttgatcgaaatcacctggtgtttcctttattcgcatcaaaggacctatgattgtactgtcttctatttgttttatctgctccg

SEQ ID NO: 5441 - DNA, 1728 bp, Muscodor strobelii
  misc_feature: SGI cDNA ID NO. 561529
  misc_feature: Encodes the peptide sequence at SEQ ID NO 5442
atgtcgtactatgcaggcggcctatacggcgagaaaccgtcagaacgatcaagatggactccattgacacgaatgctcctctcgggagaaatgacgcaggagaggcagaaggagttgacgtcgcgggagagattcgacaagtggatgatcaatgaaggctaccgacgattctttgttttcgtcttcgtagcattacatgccttggtatttgcttttggtttcgtcaactatgccgtcaaggacagtttgcaaaacgcgagaagcacatttgggccaacatacatgatagccagatcggcggccctcgtacttcatgtcgacgtggctctgattcttctccccgtatgccgtaccttcatctccattgcccgacaaacacccttgaacggcattgtgcagttcgacaaaaacattacattccacatcacaaccgcatggtctattgtatttttctcctgggttcacacgatagcacattggaacaacttcgcccaaatcgcagccaagaacaatctggggttctacgggttcttagcagccaacttggcttcggggcctggctggacgggatatatcatgctgatcgcattaatgggcatggtgcttacttcagtcgagaagccacgccgtgctaattacgaacggttttggtacacgcatcacatgttcatcatattctttctgttttggtcgattcacggagccttctgcatgattcagccagataccgcacctttctgtgtctcggttggtacgactgccatcggtgtcttttggcaatactggatgtatgggggtttcatttatctcgccgaacgaattgcccgcgaggttcgcggccgacacaagacttatatatccaaggtcattcagcatcccagcaatgtctgcgaaatccagatcaagaaagaaaacaccaaaactcgagctgggcagtacattttcttctgctgtcctgaggtatcactttggcaatatcatccattcactttgacgagtgctcccgaagaggattacatatcgattcacatgagagtggttggtgacttcacgagacaggttgcaacaacactcggatgtgaatttgggaaaaaggaaggtggcaaggacgcgtcgaaggttgttggagttgataaccaaaatggcgaagtagatccagccctacggcgaatacttcctcgcgtctacatcgatggtccgttcggatctgcatccgaggacgtcttcaaatacgaagtctctgtcctctgtggagctggtatcggcgttacccctttcgcttctattctcaagtcgatctggtatcgcatgaactatccgcagaagaagactcgattggccaaggtgtatttcttttggatatgtcgagatttcggttcatttgagtggtttcggtcattgctcatggccattgaagcgcaggatgtggaagggcgcattgagatccacacttatctcaccgctaagattaaggcagatgatgcgaccaacatcatgatcaatgatgcaaatgcagataaagatgccatcacaggccttcgaagccccacgaactttggccggcctaattgggatatgattttccgaggtattcgaaagttgcatgctccggctgaagctggtgtattcttctgtgggccgaaagggttgggtagtgctctacatgtcttctgtaacaaatacagcgaaccagggttctcgttcgtttggggcaaggagaatttctga

SEQ ID NO: 5442 - protein, 575 aa, Muscodor strobelii
  misc_feature: SGI Peptide ID NO. 561529
  misc_feature (98)..(231): Pfam Id: PF01794 Pfam Desc: Ferric reductase like transmembrane component
  misc_feature (281)..(405): Pfam Id: PF08022 Pfam Desc: FAD-binding domain
  misc_feature (411)..(559): Pfam Id: PF08030 Pfam Desc: Ferric reductase NAD binding domain
  misc_feature (4)..(575): NCBI GI: 171679659 Blast Desc: protein product [Podospora anserina] gi|34555697|gb|AAQ74977.1| NADPH oxidase isoform 2 [Podospora anserina] gi|170939455|emb|CAP64683.1| protein product [Podospora
  misc_feature (12)..(575): NCBI GI: 116203451 Blast Desc: CHGG_09609 [Chaetomium globosum CBS 148.51] gi|88175737|gb|EAQ83205.1| CHGG_09609 [Chaetomium globosum CBS 148.51]
  misc_feature (11)..(575): NCBI GI: 164427000 Blast Desc: NCU10775 [Neurospora crassa OR74A] gi|157071562|gb|EDO65265.1| NCU10775 [Neurospora crassa OR74A]
  misc_feature (4)..(575): NCBI GI: 256729128 Blast Desc: [Nectria haematococca mpVI 77-13-4]
  misc_feature (14)..(575): NCBI GI: 39977313 Blast Desc: MGG_06559 [Magnaporthe grisea 70-15] gi|145016000|gb|EDK00490.1| MGG_06559 [Magnaporthe grisea 70-15] gi|151349587|gb|ABS01491.1| NADPH oxidase isoform 2 [Magnaporthe
  misc_feature (3)..(575): NCBI GI: 84570590 Blast Desc: NADPH oxidase [Epichloe festucae]
  misc_feature (9)..(575): NCBI GI: 46138585 Blast Desc: FG10807.1 [Gibberella zeae PH-1]
  misc_feature (14)..(575): NCBI GI: 156042746 Blast Desc: conserved [Sclerotinia sclerotiorum 1980] gi|154695557|gb|EDN95295.1| conserved [Sclerotinia sclerotiorum 1980]
  misc_feature (14)..(575): NCBI GI: 164513880 Blast Desc: NADPH oxidase B [Botryotinia fuckeliana]
  misc_feature (11)..(565): NCBI GI: 164513858 Blast Desc: NADPH oxidase 2 [Claviceps purpurea]
  misc_feature (95)..(575): SWISSPROT Homolog: EC 1.6.3.1 NAD(P)H oxidase
MSYYAGGLYGEKPSERSRWTPLTRMLLSGEMTQERQKELTSRERFDKWMINEGYRRFFVFVFVALHALVFAFGFVNYAVKDSLQNARSTFGPTYMIARSAALVLHVDVALILLPVCRTFISIARQTPLNGIVQFDKNITFHITTAWSIVFFSWVHTIAHWNNFAQIAAKNNLGFYGFLAANLASGPGWTGYIMLIALMGMVLTSVEKPRRANYERFWYTHHMFIIFFLFWSIHGAFCMIQPDTAPFCVSVGTTAIGVFWQYWMYGGFIYLAERIAREVRGRHKTYISKVIQHPSNVCEIQIKKENTKTRAGQYIFFCCPEVSLWQYHPFTLTSAPEEDYISIHMRVVGDFTRQVATTLGCEFGKKEGGKDASKVVGVDNQNGEVDPALRRILPRVYIDGPFGSASEDVFKYEVSVLCGAGIGVTPFASILKSIWYRMNYPQKKTRLAKVYFFWICRDFGSFEWFRSLLMAIEAQDVEGRIEIHTYLTAKIKADDATNIMINDANADKDAITGLRSPTNFGRPNWDMIFRGIRKLHAPAEAGVFFCGPKGLGSALHVFCNKYSEPGFSFVWGKENF

SEQ ID NO: 5443 - DNA, 3028 bp, Muscodor strobelii
  misc_feature: SGI EST ID NO. CUFF.13789.0
  misc_feature: Variant of the nucleotide sequence at SEQ ID NO 5441
gataacttcttcattgtgacattcgcttcgtgattattctgagaacagtagccctgctctctagcctactccagcctcccacatgttttaaagccgtcgtttgcacaggtacatcagttcatgtgttcaaacacgcccagcccatcctggacattttgtgctggcgtcgtaattcgagtatgatctgcaagataatggcctgatgtttctctcttggcatacacccataactcttccgtatcctctcccgtctttgcatgagatctccatgccactcctccttctcttggctttagtctttccacgctttcattcataccacacttcttttctttagtctcctgttctaatcctatttgcgtgccacgcgggcgagcagagcagcttggtttgtctcctgctttcggtattttacattctcttggaccattgttgaggtgcttgtacgttcttttttgaaatccgcgacgaattcctggctgtacgcccgttcagcaggctctgaatcgattgaacttcgttttcctccgaatctctaagttcaacaacgtaataactgcgacagctcattgaggatattttaagtttgaattgggtctgcgggagcagaagctagcagtcggcttgggaaggccattggacaaggcaaaaaaaacggttggagacgacaccagacggcgaaggtgtccccagggccagccgaaaatatgtcgtactatgcaggcggcctatacggcgagaaaccgtcagaacgatcaagatggactccattgacacgaatgctcctctcgggagaaatgacgcaggagaggcagaaggagttgacgtcgcgggagagattcgacaagtggatgatcaatgaaggctaccgacgattctttgttttcgtcttcgtagcattacatgccttggtatttgcttttggtttcgtcaactatgccgtcaaggacagtttgcaaaacgcgagaagcacatttgggccaacatacatgatagccagatcggcggccctcgtacttcatgtcgacgtggctctgattcttctccccgtatgccgtaccttcatctccattgcccgacaaacacccttgaacggcattgtgcagttcgacaaaaacattacattccacatcacaaccgcatggtctattgtatttttctcctgggttcacacgatagcacattggaacaacttcgcccaaatcgcagccaagaacaatctggggttctacgggttcttagcagccaacttggcttcggggcctggctggacgggatatatcatgctgatcgcattaatgggcatggtgcttacttcagtcgagaagccacgccgtgctaattacgaacggttttggtacacgcatcacatgttcatcatattctttctgttttggtcgattcacggagccttctgcatgattcagccagataccgcacctttctgtgtctcggttggtacgactgccatcggtgtcttttggcaatactggatgtatgggggtttcatttatctcgccgaacgaattgcccgcgaggttcgcggccgacacaagacttatatatccaaggtcattcagcatcccagcaatgtctgcgaaatccagatcaagaaagaaaacaccaaaactcgagctgggcagtacattttcttctgctgtcctgaggtatcactttggcaatatcatccattcactttgacgagtgctcccgaagaggattacatatcgattcacatgagagtggttggtgacttcacgagacaggttgcaacaacactcggatgtgaatttgggaaaaaggaaggtggcaaggacgcgtcgaaggttgttggagttgataaccaaaatggcgaagtagatccagccctacggcgaatacttcctcgcgtctacatcgatggtccgttcggatctgcatccgaggacgtcttcaaatacgaagtctctgtcctctgtggagctggtatcggcgttacccctttcgcttctattctcaagtcgatctggtatcgcatgaactatccgcagaagaagactcgattggccaaggtgtatttcttttggatatgtcgagatttcggttcatttgagtggtttcggtcattgctcatggccattgaagcgcaggatgtggaagggcgcattgagatccacacttatctcaccgctaagattaaggcagatgatgcgaccaacatcatgatcaatgatgcaaatgcagataaagatgccatcacaggccttcgaagccccacgaactttggccggcctaattgggatatgattttccgaggtattcgaaagttgcatgctccggctgaagctggtgtattcttctgtgggccgaaagggttgggtagtgctctacatgtcttctgtaacaaatacagcgaaccagggttctcgttcgtttggggcaaggagaatttctgaaatctttaacacttcactcaaacttcgatgccacctcatagatttatatcgtcctcatagaatatgacgattgggaccagaacgagggtgtttcagtacggaaacatgagtccgttgacctagaagcagtatcgagttcttgcttaaaccgcaaactaacgagctaatcccgagccctttccatgattgcaaacaaagcaatgatttaatagacaacgaagctgtcaggacagcctcgctcaagcaacaagcataaagaggagcaaggctgtttttcgaggcgtttgaggaaagacggtacacctacacactcggatagggcgctgcagacctattgtttagcatagctacctactttccaccatttcgagtctatctcgatccattgaagtatatgcttgctgtatttagaccttcgatctgtgcttggttgtgatgaccaacagccagatttagacttcaattcgatacgcgaagttaacatggtgctcctcactgtccgctctagtgctacatggtcattagtcaaacgtagaagaatcacttaggaatcatgttgttatcttacgtattggtataatagacgaccgtca

SEQ ID NO: 5444 - DNA, 444 bp, Muscodor strobelii
  misc_feature: SGI cDNA ID NO. 561530
  misc_feature: Reduced expression when VOC is produced
  misc_feature: Encodes the peptide sequence at SEQ ID NO 5445
atggcgctcaagcgtatcaacaaggaactcacagacctgggccgtgatccgccctcgtcctgctctgctggccccgtcggagaagacctgtttcactggcaagcaactatcatgggacctggcgactctccgtactcaggcggtgtcttcttcctggctatccacttccccacagactaccctttcaagcccccgaaggtcaacttcaccacccgcatctaccatcccaacatcaactccaacggcagcatttgcctcgacatcctcagagaccaatggagcccggctctgaccatctccaaggtcctgctctctatctgctcgatgttgacggaccccaatcccgacgaccctctggtccccgagatcgcacatgtgtacaagaccgaccgtgcccgctacgaggccaccgctcgagagtggacacgcaagtacgccatctag

SEQ ID NO: 5445 - protein, 147 aa, Muscodor strobelii
  misc_feature: SGI Peptide ID NO. 561530
  misc_feature (5)..(142): Pfam Id: PF00179 Pfam Desc: Ubiquitin-conjugating enzyme
  misc_feature (1)..(147): NCBI GI: 27805755 Blast Desc: UBC1_COLGL RecName: Full=Ubiquitin-conjugating enzyme E2-16 kDa; AltName: Full=Ubiquitin-protein ligase; AltName: Full=Ubiquitin carrier protein; AltName: Full=Colletotrichum 1
  misc_feature (1)..(147): NCBI GI: 169779970 Blast Desc: [Aspergillus oryzae RIB40] gi|83773189|dbj|BAE63316.1| protein product [Aspergillus oryzae]
  misc_feature (1)..(147): NCBI GI: 84570589 Blast Desc: [Epichloe festucae]
  misc_feature (1)..(147): NCBI GI: 255945097 Blast Desc: Pc20g07930 [Penicillium chrysogenum Wisconsin 54-1255] gi|211588051|emb|CAP86122.1| Pc20g07930 [Penicillium chrysogenum Wisconsin 54-1255]
  misc_feature (1)..(147): NCBI GI: 189191948 Blast Desc: ubiquitin-conjugating enzyme E2-16 kDa [Pyrenophora tritici-repentis Pt-1C-BFP] gi|187973919|gb|EDU41418.1| ubiquitin-conjugating enzyme E2-16 kDa [Pyrenophora Pt-1C-BFP]
  misc_feature (1)..(147): NCBI GI: 119192248 Blast Desc: ubiquitin-conjugating enzyme E2 [Coccidioides immitis RS] gi|240106165|gb|EER24358.1| Ubiquitin-conjugating enzyme E2-16 kDa , [Coccidioides posadasii C735 delta SOWgp]
  misc_feature (1)..(147): NCBI GI: 256729129 Blast Desc: [Nectria haematococca mpVI 77-13-4]
  misc_feature (1)..(147): NCBI GI: 71000643 Blast Desc: ubiquitin conjugating enzyme (UbcD) [Aspergillus fumigatus Af293] gi|119493316|ref|XP_001263848.1| ubiquitin conjugating enzyme (UbcD), [Neosartorya fischeri NRRL 181] enzyme
  misc_feature (1)..(147): NCBI GI: 169599847 Blast Desc: SNOG_02749 [Phaeosphaeria nodorum SN15] gi|111068360|gb|EAT89480.1| SNOG_02749 [Phaeosphaeria nodorum SN15]
  misc_feature (1)..(147): NCBI GI: 154292279 Blast Desc: ubiquitin-conjugating enzyme E2-16 kDa [Botryotinia fuckeliana B05.10] gi|150846170|gb|EDN21363.1| ubiquitin-conjugating enzyme E2-16 kDa [Botryotinia fuckeliana
  misc_feature (1)..(147): SWISSPROT Homolog: EC 6.3.2.19 Ubiquitin--protein ligase
  misc_feature: Useful for introducing or modulating the production of volatile compounds
MALKRINKELTDLGRDPPSSCSAGPVGEDLFHWQATIMGPGDSPYSGGVFFLAIHFPTDYPFKPPKVNFTTRIYHPNINSNGSICLDILRDQWSPALTISKVLLSICSMLTDPNPDDPLVPEIAHVYKTDRARYEATAREWTRKYAI

SEQ ID NO: 5446 - DNA, 1319 bp, Muscodor strobelii
  misc_feature: SGI EST ID NO. CUFF.14312.1
  misc_feature: Variant of the nucleotide sequence at SEQ ID NO 5444
tctccctccccactacgacacaatatctgtgacaactgctgccactgcgtaaaccgtccactttgttccttctccctcatcggcgaccaagctagtttctttgacgacgtttcatcccttcaacaccaccaaccaacagcacactctcgcccagtcttccagaaacccagcctcacggcgttctcctgtattgactgactccatccgagaggtcgctctcgtccacggcccctccgcgccccgacaccgtctgccgcctcgcccaggttgacagcccacctgacgcaccaccccaaaacccgaccaccacaacacacatcgccatggcgctcaagcgtatcaacaaggaactcacagacctgggccgtgatccgccctcgtcctgctctgctggccccgtcggagaagacctgtttcactggcaagcaactatcatgggacctggcgactctccgtactcaggcggtgtcttcttcctggctatccacttccccacagactaccctttcaagcccccgaaggtcaacttcaccacccgcatctaccatcccaacatcaactccaacggcagcatttgcctcgacatcctcagagaccaatggagcccggctctgaccatctccaaggtcctgctctctatctgctcgatgttgacggaccccaatcccgacgaccctctggtccccgagatcgcacatgtgtacaagaccgaccgtgcccgctacgaggccaccgctcgagagtggacacgcaagtacgccatctagggtgggagaatgtcgtgttcgggggataggggcactgccgggtccgtgccggcgcatatctgttacctcggtggctcttcgtagaccgccgtacatacccaacaggagagagcattggcttgtagcgcggtagtagtggttgtcatagacagtaatagtgtttcggaaggggcatacacattctctcttatcaggcagtatgaggtgaaattgcatggcgtttgttgtcgactgttgactgcgatgggatctcacgtctctgaataggacattcggtctgcctcccgttgaatgcaaaggcggcggcgagctagccaagaagcagcagaagccgacctggtgaactttccatgttcgcgccatcatatgtttttgacattgctcgagttctcttattatgcatacactgatctacgctcgcaccgtctccaaatttctcaatgtctgcatgtacacgtgcttatggcctcccgaccgttcgactctttacctttgtagagctcttcccagaagctcctttaagtagttaaatccaggacagtaagattcgtg

SEQ ID NO: 5447 - DNA, 1314 bp, Muscodor strobelii
  misc_feature: SGI cDNA ID NO. 561531
  misc_feature: Reduced expression when VOC is produced
  misc_feature: Encodes the peptide sequence at SEQ ID NO 5448
atgttgcgatcaattgctccacgcctccggtgcgccaaacaatcgctggcggggagatgtaataccaaatatcatcaaactgttcaataccagaggtgctatgcgtcttccgctgcgactgcgccggtctttgactggcaggatcccctagggagcaagaatctactcacagaagaggaattggctattgcggaaacggcagagcgatattgtcaagagcgactactcccccgagttctcgatgcgtatcgtgatgagaattatgaccgtgaaatcctttctgagatgggagaacttggtctactgggcgcgaatctagaagggtatggatgcgccggtgcatcaaccgtggcagccggccttatcacgcgagcagttgaacgtgtagatagtggctaccggtcaggcatgtctgtccagtcatcgctggtaatgggtggcatacatgaatttgggacggaagagcagaaggagaaatatctcgagcccatgagtaaaggtaaactccttggtgccttcggcctaacggaacctaatcacggaagtgatcctgggtcgatggagaccacggcgcggcctcatccaacacgttccggttactatgttctcagcggtgccaagacatggatcactaactcgccgattgccgatgtgttgatggtctgggcgaaactggccgagacggggaagatccgtggattcctgatcgaacgcaaggaatgtccaactggcaccctcgaaacacctgctatcaagaacaaaaacgggttgcgggcgagtatcactggcatgatccagatggacgactgtcctgttccggctgccaacatgtttccagacgtcgagggtctccgtggcccgttcacatgtctcaacagtgcgcggtatggtatcgcactaggcgtgattggagcgttggaggattgtatattgcgggctcgaacgtacgcactcgaacgccgccagttcaaagacaacccgctggccaagtaccaactcgtgcagaagaagctagcagatgcggcgacggacgcagcgtttggaactctggctgctatccaggtgggtcgcctcaaagacgagggcaaagcgacgcccgaaatgatcagcatgatcaagcggcagaattgcgaccgagctttgaataatgctcgtgtcttacaggagatctttggtggcaatgccgtcagtgatgagtatggcatcggcagacacgttgccaacctatttgtcacacagacatacgagggtcaaagtgatatacacagtcttatccttgggcgagccataactggccttcaggccttcgtttaa

SEQ ID NO: 5448 - protein, 437 aa, Muscodor strobelii
  misc_feature: SGI Peptide ID NO. 561531
  misc_feature (172)..(227): Pfam Id: PF02770 Pfam Desc: Acyl-CoA dehydrogenase, middle domain
  misc_feature (281)..(431): Pfam Id: PF00441 Pfam Desc: Acyl-CoA dehydrogenase, C-terminal domain
  misc_feature (296)..(420): Pfam Id: PF08028 Pfam Desc: Acyl-CoA dehydrogenase, C-terminal domain
  misc_feature (57)..(168): Pfam Id: PF02771 Pfam Desc: Acyl-CoA dehydrogenase, N-terminal domain
  misc_feature (282)..(431): Pfam Id: PF00441 Pfam Desc: Acyl-CoA dehydrogenase, C-terminal domain
  misc_feature (1)..(437): NCBI GI: 261354918 Blast Desc: glutaryl-CoA dehydrogenase [Verticillium albo-atrum VaMs.102]
  misc_feature (32)..(437): NCBI GI: 256729130 Blast Desc: [Nectria haematococca mpVI 77-13-4]
  misc_feature (32)..(437): NCBI GI: 46138579 Blast Desc: FG10804.1 [Gibberella zeae PH-1]
  misc_feature (32)..(437): NCBI GI: 85094673 Blast Desc: glutaryl-CoA dehydrogenase, mitochondrial precursor [Neurospora crassa OR74A] gi|28921392|gb|EAA30699.1| glutaryl-CoA dehydrogenase, mitochondrial precursor [Neurospora crassa OR74A]
  misc_feature (7)..(436): NCBI GI: 156042750 Blast Desc: SS1G_11174 [Sclerotinia sclerotiorum 1980] gi|154695559|gb|EDN95297.1| SS1G_11174 [Sclerotinia sclerotiorum 1980]
  misc_feature (33)..(437): NCBI GI: 119493314 Blast Desc: glutaryl-CoA dehydrogenase, [Neosartorya fischeri NRRL 181] gi|119412007|gb|EAW21950.1| glutaryl-CoA dehydrogenase, [Neosartorya fischeri NRRL 181]
  misc_feature (36)..(436): NCBI GI: 154292281 Blast Desc: conserved [Botryotinia fuckeliana B05.10] gi|150846171|gb|EDN21364.1| conserved [Botryotinia fuckeliana B05.10]
  misc_feature (36)..(437): NCBI GI: 159128016 Blast Desc: glutaryl-CoA dehydrogenase, [Aspergillus fumigatus A1163]
  misc_feature (1)..(437): NCBI GI: 242814012 Blast Desc: glutaryl-CoA dehydrogenase, [Talaromyces stipitatus ATCC 10500] gi|218714623|gb|EED14046.1| glutaryl-CoA dehydrogenase, [Talaromyces stipitatus ATCC 10500]
  misc_feature (36)..(437): NCBI GI: 71000641 Blast Desc: glutaryl-CoA dehydrogenase [Aspergillus fumigatus Af293] gi|66852639|gb|EAL92964.1| glutaryl-CoA dehydrogenase, [Aspergillus fumigatus Af293]
  misc_feature (36)..(437): SWISSPROT Homolog: EC 1.3.99.7 Glutaryl-CoA dehydrogenase
  misc_feature: Useful for introducing or modulating the production of volatile compounds
  misc_feature: Useful for fungicidal and/or biocontrol applications
MLRSIAPRLRCAKQSLAGRCNTKYHQTVQYQRCYASSAATAPVFDWQDPLGSKNLLTEEELAIAETAERYCQERLLPRVLDAYRDENYDREILSEMGELGLLGANLEGYGCAGASTVAAGLITRAVERVDSGYRSGMSVQSSLVMGGIHEFGTEEQKEKYLEPMSKGKLLGAFGLTEPNHGSDPGSMETTARPHPTRSGYYVLSGAKTWITNSPIADVLMVWAKLAETGKIRGFLIERKECPTGTLETPAIKNKNGLRASITGMIQMDDCPVPAANMFPDVEGLRGPFTCLNSARYGIALGVIGALEDCILRARTYALERRQFKDNPLAKYQLVQKKLADAATDAAFGTLAAIQVGRLKDEGKATPEMISMIKRQNCDRALNNARVLQEIFGGNAVSDEYGIGRHVANLFVTQTYEGQSDIHSLILGRAITGLQAFV

SEQ ID NO: 5449 - DNA, 2476 bp, Muscodor strobelii
  misc_feature: SGI EST ID NO. CUFF.13792.0
  misc_feature: Variant of the nucleotide sequence at SEQ ID NO 5447
agcaaacaagcctcggcccacccacggagaactccacacgacggcatgtctccacgggccgctttcatcctccgtatgccagcaatcttcactttcatttttatttgattaaggccagtaatcatgttgcgatcaattgctccacgcctccggtgcgccaaacaatcgctggcggggagatgtaataccaaatatcatcaaactgttcaataccagaggtgctatgcgtcttccgctgcgactgcgccggtctttgactggcaggatcccctagggagcaagaatctactcacagaagaggaattggctattgcggaaacggcagagcgatattgtcaagagcgactactcccccgagttctcgatgcgtatcgtgatgagaattatgaccgtgaaatcctttctgagatgggagaacttggtctactgggcgcgaatctagaagggtatggatgcgccggtgcatcaaccgtggcagccggccttatcacgcgagcagttgaacgtgtagatagtggctaccggtcaggcatgtctgtccagtcatcgctggtaatgggtggcatacatgaatttgggacggaagagcagaaggagaaatatctcgagcccatgagtaaaggtaaactccttggtgccttcggcctaacggaacctaatcacggaagtgatcctgggtcgatggagaccacggcgcggcctcatccaacacgttccggttactatgttctcagcggtgccaagacatggatcactaactcgccgattgccgatgtgttgatggtctgggcgaaactggccgagacggggaagatccgtggattcctgatcgaacgcaaggaatgtccaactggcaccctcgaaacacctgctatcaagaacaaaaacgggttgcgggcgagtatcactggcatgatccagatggacgactgtcctgttccggctgccaacatgtttccagacgtcgagggtctccgtggcccgttcacatgtctcaacagtgcgcggtatggtatcgcactaggcgtgattggagcgttggaggattgtatattgcgggctcgaacgtacgcactcgaacgccgccagttcaaagacaacccgctggccaagtaccaactcgtgcagaagaagctagcagatgcggcgacggacgcagcgtttggaactctggctgctatccaggtgggtcgcctcaaagacgagggcaaagcgacgcccgaaatgatcagcatgatcaagcggcagaattgcgaccgagctttgaataatgctcgtgtcttacaggagatctttggtggcaatgccgtcagtgatgagtatggcatcggcagacacgttgccaacctatttgtcacacagacatacgagggtcaaagtgatatacacagtcttatccttgggcgagccataactggccttcaggccttcgtttaactccaaatttgacagatcttcacataatggtaatgggaagagaacaccagcatgatgctttggcgaggtaaggcagtatctcttgcggaagacattgctgccgatagtctatcatctacgcagagcctcatgacagacacccctttccgcgcccttgcgaacagcatcgcatccacctgacctaggtacagcatttctataaaacaaaccctgaggttaggctcatatactcatataggtcaatatagacgaaggtgccacagcgatacaacagcccgagctccctttactagctggcgcaatagcatagataagagcaataaacagacaacgccgtattagatgtgcgccgtgtgaatatttctattattggatctagactgatatgaactttgtgaattcaaaccatttacttgagtgacgaggggcctctggatgggtttgaatgtgttggttgggtggcaatatcggatggagtcactgactcagacaggcctgacagccacgggccacgcgattgattttgggatgatgattcacccaatggtgtgtcctgcttcgatgcaagttaggatgcaaagcatgactaacaagtggttttcttgaggtcggtttttctatccttgactaagctagttggcgagtgatatgccgtacggtgtgatactgcatacatcagcggttgtgtaatcattctcagtggtcccctcaaggtatcaagaggcgctaggtgagtgcaagatccttattgtttggcagcactggatgtttgggctgagatggtggatggaaatgcaccgccacttagagatacccgcatatccaagggagacattttgggctaagcactttgcttgtatctgtcatcgaactgagattcaaaggtatctggactaatttcactctcgcctgatgggaatatctcactcagggtcatcatccgttcctttagataccaatgattctaattaaagcggtgagtctttgtatgtatagttgagtcgtcgtattcacatcgactggattcctttgactctcg

SEQ ID NO: 5450 - DNA, 906 bp, Muscodor strobelii
  misc_feature: SGI cDNA ID NO. 561532
  misc_feature: Encodes the peptide sequence at SEQ ID NO 5451
atgattgctcccaccattatgctactttgggccatggcccttttcggagggctttcctcgcctctggccatcgagctcgataccaatcctgcactagtgcagcgcgacctgtgcgatggtgttggtacgataggtgtcctggacgaggaatatttcgcggacagatgtcctccaaaatggttcatgcccatgcaggagtatcctatcccaggaacttactgccgtggccccaaaacttgcaaggttgaagactcggtacattccgaagtaggaattcagtacgacgggtctgaagactggcgacgagcattcgagaccggtatctcaggaggtttcttcggtaagaaagagaacgtcggcatgaagggtgccagtgtcgacatcaaagaaggacagtgtggctattttacctggattggtaccaggcgagaagtttgtggctccttgaccgaacccgccgatccaggacattgcactggcccgaagaaaacaacacaaaatgtctgcgtcgaggacatgttcatcggcccgacgggctttcccgatgcccatgcagtgacagttttcgtgtacttagattgcaacactcgcctacccctacccgcagaccagcagaacggtctcttccgctatgaaggtgtagcttttgacacgacccagctcgatgctaaactacaggcagaggttgtaaccgagtgctcatgggacgatcatttcttgtggtacgcatggtccatcaaagggcgaggactcaaagacgacaagctaggacactctggatctggtctactcgccaacatacgtcactgtggtcccgatgtcacaggctggactttcaagtatacgcccgacgatactgattatgacgtgagcaacttctggacttcttctcttcccattctgtaa

SEQ ID NO: 5451 - protein, 301 aa, Muscodor strobelii
  misc_feature: SGI Peptide ID NO. 561532
MIAPTIMLLWAMALFGGLSSPLAIELDTNPALVQRDLCDGVGTIGVLDEEYFADRCPPKWFMPMQEYPIPGTYCRGPKTCKVEDSVHSEVGIQYDGSEDWRRAFETGISGGFFGKKENVGMKGASVDIKEGQCGYFTWIGTRREVCGSLTEPADPGHCTGPKKTTQNVCVEDMFIGPTGFPDAHAVTVFVYLDCNTRLPLPADQQNGLFRYEGVAFDTTQLDAKLQAEVVTECSWDDHFLWYAWSIKGRGLKDDKLGHSGSGLLANIRHCGPDVTGWTFKYTPDDTDYDVSNFWTSSLPIL

SEQ ID NO: 5452 - DNA, 648 bp, Muscodor strobelii
  misc_feature: SGI cDNA ID NO. 561533
  misc_feature: Encodes the peptide sequence at SEQ ID NO 5453
atggcacggaggagacgtccgccgcgatctggcgccatcgccgagctgccgcctctgcgcatcctgggccagatcgccgccttgcaaggcatctactacgccgccgccctcgtcctcatgctcttcacctcgctcgtcatgggcgtccagttccagctagacttcgtcttcggctgggcgagtttgcgcggcgataccacacagggatggctgataggtttcgtgtggctctgttgcgccggtgccattgttattgcattagttgtattaatatcaagatctaaactcgtcctcgacttcgccttcaccctccacttcatccatctcctcatcgtctccatttccacagggtacttgccccgcaacatcgcctggtggctcaccatgttcgtgtccggcaccatcaccgtcgccggcggtacctacggctgtcgctggagagagctgcagcccatcacctttggcggcggggctcggagctcgaaccacggcgaaggcggtggagatggggagatggagaatggcagcgctggcgaagaccacggtgacgaggaaatgggcttctcgcgagggaggggtagaggcagaggccgtgatggagcgggagagtatgaaatggctgatatgaaaggcgactcgaatgagtag

SEQ ID NO: 5453 - protein, 215 aa, Muscodor strobelii
  misc_feature: SGI Peptide ID NO. 561533
  misc_feature (1)..(209): NCBI GI: 46138559 Blast Desc: FG10794.1 [Gibberella zeae PH-1]
  misc_feature (1)..(213): NCBI GI: 116203443 Blast Desc: CHGG_09605 [Chaetomium globosum CBS 148.51] gi|88175733|gb|EAQ83201.1| CHGG_09605 [Chaetomium globosum CBS 148.51]
  misc_feature (1)..(210): NCBI GI: 255934184 Blast Desc: Pc12g15740 [Penicillium chrysogenum Wisconsin 54-1255] gi|211582992|emb|CAP81201.1| Pc12g15740 [Penicillium chrysogenum Wisconsin 54-1255]
  misc_feature (1)..(210): NCBI GI: 256729134 Blast Desc: NECHADRAFT_60839 [Nectria haematococca mpVI 77-13-4]
  misc_feature (1)..(211): NCBI GI: 238484357 Blast Desc: protein sys1, [Aspergillus flavus NRRL3357] gi|220701467|gb|EED57805.1| protein sys1, [Aspergillus flavus NRRL3357]
  misc_feature (1)..(211): NCBI GI: 169767480 Blast Desc: [Aspergillus oryzae RIB40] gi|83766066|dbj|BAE56209.1| protein product [Aspergillus oryzae]
  misc_feature (11)..(215): NCBI GI: 154278335 Blast Desc: conserved [Ajellomyces capsulatus NAm1] gi|150413566|gb|EDN08949.1| conserved [Ajellomyces capsulatus NAm1]
  misc_feature (3)..(215): NCBI GI: 119195109 Blast Desc: CIMG_01929 [Coccidioides immitis RS]
  misc_feature (1)..(211): NCBI GI: 121705430 Blast Desc: conserved [Aspergillus clavatus NRRL 1] gi|119399124|gb|EAW09552.1| conserved [Aspergillus clavatus NRRL 1]
  misc_feature (3)..(215): NCBI GI: 240105030 Blast Desc: CPC735_045930 [Coccidioides posadasii C735 delta SOWgp]
MARRRRPPRSGAIAELPPLRILGQIAALQGIYYAAALVLMLFTSLVMGVQFQLDFVFGWASLRGDTTQGWLIGFVWLCCAGAIVIALVVLISRSKLVLDFAFTLHFIHLLIVSISTGYLPRNIAWWLTMFVSGTITVAGGTYGCRWRELQPITFGGGARSSNHGEGGGDGEMENGSAGEDHGDEEMGFSRGRGRGRGRDGAGEYEMADMKGDSNE

SEQ ID NO: 5454 - DNA, 2693 bp, Muscodor strobelii
  misc_feature: SGI EST ID NO. CUFF.13987.1
  misc_feature: Variant of the nucleotide sequence at SEQ ID NO 5452
gcatgttactgagagtggcttatttgggcaaaattggggtgcaggactggaggacaaatatgagttgaagatgaacctgagcagcttggcttaggtaccctctatatgccgttcccagacggcggcctacttgagcatctcaataatggattacacgacctagagctcacatatcatacattggtatgcttcataagtagttgttccctcccaattttataggtcttgggcatattatattatgtatgattggctatttaggatggctatggcatctatcatatttactacaagtagactacagctgatctaacgtgggcactcaggtatcgagccattcacctcgtgccgtcttatagacatcggcaaggacaaagtcaggtgtgcttctccggacatgcatccttcgggagcagcctgcactggccgatttgcacgcacttctcacgctcacacataatgcccgatatcctcaggtgccacagaattctgtccgtcagcctgggctggcttccaagctttggatatgccgctctctaagcaacatgcgcaccatcgtgggagattctctcatggcaaccgaactccagtccatgcgaatcatgtacagtgatagcaatacagtttatcatacaagtttgctgactcggggcccgtgcgaggttatggtcggcaagatatggatagcataatgccgcagagcttcagcgcgccctcgggccgcctgcagctccgccgggcaggtcaccgggcccctcgatgccgaccttgtcagcgccttccttctgcaggcgctcgatggtcttcttcttttggtactcggcgacacggtatttcttgaagtaagtgacccaagcagaggcacagttctgctggaaggcgttgtcctcgacggagcattccttgtcggactttttcttgccggcaccgttcagggcgtcgatgacgtcgtgcttgtccaggcagctgtagtaggcatcgcgggcatcccagcactgcctcctctcggtgcgatcgggagctcgagcgccggtgcggacttcctctttgcgcttgtcgtcctcagacgagaagaggccaaagaagcccatggtgcgtggatgtgagtcgagtgtgccgagagaatgtgaaaatagcggcttgtattttttggattcgtgaaccggaagactgttggcgtagaactagtcgcccagtggtaaacagtgaagctcgcagaaatcgtgatgagggtggtgatgggggtgaagcggcaagagcgaatgggtgtcatatgataatcgataaagcttggagttacccagatatgcacaaggcatgataatgtaggtgctaccctagatcgccaatttggacctatattgcagttgatgcaggctagtccatacgcggcttagagcgagctggatagtgcagacgctacctacccgacctcccggctccacctagacattggcagaggttgcgacgcctgctgactccctttcgacagccaactcgaggcacgactgcacaggctgatacttaaagctattactttttgcaatcgacaattacacatctggcggccgacaaccacagctgtctaaaacaaacagtacctagtccaggacgatagcttgcagcaacacatcttcatttcgacttccagttatttcaagcacgcggacactgcttctcgccgcttctcacccgggagtgctcatcatgatcaccttataaccggtcttgaacgctatcatcgctacttcccattcgattcgctccttccgatagtctcttggacttctgcctgccgctcgacgccaccaagcccgcccgccacggccctgtccgaggccacggtacaaagatcataagcccaagatggcacggaggagacgtccgccgcgatctggcgccatcgccgagctgccgcctctgcgcatcctgggccagatcgccgccttgcaaggcatctactacgccgccgccctcgtcctcatgctcttcacctcgctcgtcatgggcgtccagttccagctagacttcgtcttcggctgggcgagtttgcgcggcgataccacacagggatggctgataggtttcgtgtggctctgttgcgccggtgccattgttattgcattagttgtattaatatcaagatctaaactcgtcctcgacttcgccttcaccctccacttcatccatctcctcatcgtctccatttccacagggtacttgccccgcaacatcgcctggtggctcaccatgttcgtgtccggcaccatcaccgtcgccggcggtacctacggctgtcgctggagagagctgcagcccatcacctttggcggcggggctcggagctcgaaccacggcgaaggcggtggagatggggagatggagaatggcagcgctggcgaagaccacggtgacgaggaaatgggcttctcgcgagggaggggtagaggcagaggccgtgatggagcgggagagtatgaaatggctgatatgaaaggcgactcgaatgagtagatgctttttgggggacatgggagacacggaatggtcacagccacttgctagagactcgcatcgcatggcgtttttgggatatgtatgactaaggtaggtatgtcgacccacgtcagggtccgcctttatgatttaataaataccctatacaacggcattaccagcttgcctcataccgc

SEQ ID NO: 5455 - DNA, 387 bp, Muscodor strobelii
  misc_feature: SGI cDNA ID NO. 561534
  misc_feature: Encodes the peptide sequence at SEQ ID NO 5456
atgggcttctttggcctcttctcgtctgaggacgacaagcgcaaagaggaagtccgcaccggcgctcgagctcccgatcgcaccgagaggaggcagtgctgggatgcccgcgatgcctactacagctgcctggacaagcacgacgtcatcgacgccctgaacggtgccggcaagaaaaagtccgacaaggaatgctccgtcgaggacaacgccttccagcagaactgtgcctctgcttgggtcacttacttcaagaaataccgtgtcgccgagtaccaaaagaagaagaccatcgagcgcctgcagaaggaaggcgctgacaaggtcggcatcgaggggcccggtgacctgcccggcggagctgcaggcggcccgagggcgcgctga

SEQ ID NO: 5456 - protein, 128 aa, Muscodor strobelii
  misc_feature: SGI Peptide ID NO. 561534
  misc_feature (1)..(126): NCBI GI: 261354916 Blast Desc: conserved [Verticillium albo-atrum VaMs.102]
  misc_feature (1)..(109): NCBI GI: 39977341 Blast Desc: MGG_06573 [Magnaporthe grisea 70-15] gi|145015986|gb|EDK00476.1| MGG_06573 [Magnaporthe grisea 70-15]
  misc_feature (1)..(112): NCBI GI: 171679667 Blast Desc: protein product [Podospora anserina] gi|170939459|emb|CAP64687.1| protein product [Podospora anserina]
  misc_feature (1)..(123): NCBI GI: 156060973 Blast Desc: SS1G_02629 [Sclerotinia sclerotiorum 1980] gi|154700033|gb|EDN99771.1| SS1G_02629 [Sclerotinia sclerotiorum 1980]
  misc_feature (4)..(109): NCBI GI: 154308703 Blast Desc: [Botryotinia fuckeliana B05.10] gi|150852725|gb|EDN27917.1| [Botryotinia fuckeliana B05.10]
  misc_feature (1)..(106): NCBI GI: 116203441 Blast Desc: CHGG_09604 [Chaetomium globosum CBS 148.51] gi|88175732|gb|EAQ83200.1| CHGG_09604 [Chaetomium globosum CBS 148.51]
  misc_feature (4)..(125): NCBI GI: 156050623 Blast Desc: SS1G_07899 [Sclerotinia sclerotiorum 1980] gi|154692299|gb|EDN92037.1| SS1G_07899 [Sclerotinia sclerotiorum 1980]
  misc_feature (1)..(119): NCBI GI: 169622591 Blast Desc: SNOG_14520 [Phaeosphaeria nodorum SN15] gi|160704804|gb|EAT78060.2| SNOG_14520 [Phaeosphaeria nodorum SN15]
  misc_feature (1)..(119): NCBI GI: 189200495 Blast Desc: PTRG_06251 [Pyrenophora tritici-repentis Pt-1C-BFP] gi|187983683|gb|EDU49171.1| PTRG_06251 [Pyrenophora tritici-repentis Pt-1C-BFP]
  misc_feature (4)..(111): NCBI GI: 46138557 Blast Desc: FG10793.1 [Gibberella zeae PH-1]
MGFFGLFSSEDDKRKEEVRTGARAPDRTERRQCWDARDAYYSCLDKHDVIDALNGAGKKKSDKECSVEDNAFQQNCASAWVTYFKKYRVAEYQKKKTIERLQKEGADKVGIEGPGDLPGGAAGGPRAR

SEQ ID NO: 5457 - DNA, 2791 bp, Muscodor strobelii
  misc_feature: SGI EST ID NO. CUFF.13986.0
  misc_feature: Variant of the nucleotide sequence at SEQ ID NO 5455
gcggtatgaggcaagctggtaatgccgttgtatagggtatttattaaatcataaaggcggaccctgacgtgggtcgacatacctaccttagtcatacatatcccaaaaacgccatgcgatgcgagtctctagcaagtggctgtgaccattccgtgtctcccatgtcccccaaaaagcatctactcattcgagtcgcctttcatatcagccatttcatactctcccgctccatcacggcctctgcctctacccctccctcgcgagaagcccatttcctcgtcaccgtggtcttcgccagcgctgccattctccatctccccatctccaccgccttcgccgtggttcgagctccgagccccgccgccaaaggtgatgggctgcagctctctccagcgacagccgtaggtaccgccggcgacggtgatggtgccggacacgaacatggtgagccaccaggcgatgttgcggggcaagtaccctgtggaaatggagacgatgaggagatggatgaagtggagggtgaaggcgaagtcgaggacgagtttagatcttgatattaatacaactaatgcaataacactatcattatagtcagcattcacgtcgggatgtggagttgtggctgcccatgagccacacgagatatgctggggacgatgaagagcgggcgaacgcacatggcaccggcgcaacagagccacacgaaacctatcagccatccctgtgtggtatcgccgcgcaaactcgcccagccgaagacgaagtctagctggaactggacgcccatgacgagcgaggtgaagagcatgaggacgagggcggcggcgtagtagatgccttgcaaggcggcgatctggcccaggatgcgcagaggcggcagctcggcgatggcgccagatcgcggcggacgtctcctccgtgccatcttgggcttatgatctttgtaccgtggcctcggacagggccgtggcgggcgggcttggtggcgtcgagcggcaggcagaagtccaagagactatcggaaggagcgaatcgaatgggaagtagcgatgatagcgttcaagaccggttataaggtgatcatgatgagcactcccgggtgagaagcggcgagaagcagtgtccgcgtgcttgaaataactggaagtcgaaatgaagatgtgttgctgcaagctatcgtcctggactaggtactgtttgttttagacagctgtggttgtcggccgccagatgtgtaattgtcgattgcaaaaagtaatagctttaagtatcagcctgtgcagtcgtgcctcgagttggctgtcgaaagggagtcagcaggcgtcgcaacctctgccaatgtctaggtggagccgggaggtcgggtaggtagcgtctgcactatccagctcgctctaagccgcgtatggactagcctgcatcaactgcaatataggtccaaattggcgatctagggtagcacctacattatcatgccttgtgcatatctgggtaactccaagctttatcgattatcatatgacacccattcgctcttgccgcttcacccccatcaccaccctcatcacgatttctgcgagcttcactgtttaccactgggcgactagttctacgccaacagtcttccggttcacgaatccaaaaaatacaagccgctattttcacattctctcggcacactcgactcacatccacgcaccatgggcttctttggcctcttctcgtctgaggacgacaagcgcaaagaggaagtccgcaccggcgctcgagctcccgatcgcaccgagaggaggcagtgctgggatgcccgcgatgcctactacagctgcctggacaagcacgacgtcatcgacgccctgaacggtgccggcaagaaaaagtccgacaaggaatgctccgtcgaggacaacgccttccagcagaactgtgcctctgcttgggtcacttacttcaagaaataccgtgtcgccgagtaccaaaagaagaagaccatcgagcgcctgcagaaggaaggcgctgacaaggtcggcatcgaggggcccggtgacctgcccggcggagctgcaggcggcccgagggcgcgctgaagctctgcggcattatgctatccatatcttgccgaccataacctcgcacgggccccgagtcagcaaacttgtatgataaactgtattgctatcactgtacatgattcgcatggactggagttcggttgccatgagagaatctcccacgatggtgcgcatgttgcttagagagcggcatatccaaagcttggaagccagcccaggctgacggacagaattctgtggcacctgaggatatcgggcattatgtgtgagcgtgagaagtgcgtgcaaatcggccagtgcaggctgctcccgaaggatgcatgtccggagaagcacacctgactttgtccttgccgatgtctataagacggcacgaggtgaatggctcgatacctgagtgcccacgttagatcagctgtagtctacttgtagtaaatatgatagatgccatagccatcctaaatagccaatcatacataatataatatgcccaagacctataaaattgggagggaacaactacttatgaagcataccaatgtatgatatgtgagctctaggtcgtgtaatccattattgagatgctcaagtaggccgccgtctgggaacggcatatagagggtacctaagccaagctgctcaggttcatcttcaactcatatttgtcctccagtcctgcaccccaattttgcccaaataagccactctcagtaacatgc

SEQ ID NO: 5458 - DNA, 2661 bp, Muscodor strobelii
  misc_feature: SGI cDNA ID NO. 561535
  misc_feature: Reduced expression when VOC is produced
  misc_feature: Encodes the peptide sequence at SEQ ID NO 5459
atgccctccttcgtcaacaacgagaactcgccctacacgccctacacgcccacctcggccgtcttccggctcgacagccacggccgccacgacccgcagttcgccaagctggtcgccggcgagaagccgctgcccgccctcgtcgaccactccaacgcgagcttcgatgacaacgcctccaccctctcgacccagagttccgagctgcggccgcgtctgaacggggacaagaacggagacaccatggccgccgcgctccccaatggcattccgatcaccgaggcagacggctacgcggaccaccactcgcacccctcgcaccactccgccactgtcagacccgtcgacgcacaccaatcctcggccaagcccccctcgctggaccgcacgtcctccgacgcaccacacactccgctggcccacgcgctgccgtcgcggccctcgaccgtcgcccccgaccacgacagactcaacaatgcagacaatcagaggttttcctcgcccccgagcttcccccccgcttccgcttccacctctgcgctctacccccctccagcgtcgtcggccgcagccaaacagcgccataccctggaagtcccacgcgtacagccaggaagaggctccaaagacggcaacgatgctgcgtatgcaagtggccggtactcccccgcgccgacgggtggtgctgcggcacggagaggctccctcaacctggctcggcggaacacgcgttccatgcactccgacatgccccgcgacgaggtgccaccggacgacgacgcgctgcggtgggcagaggccgtgagagcgaagcgggcgagcaagaagaagcgacgggaagaggacgacgacgaccgtgttctggtcggcaccaaagtcgacgagaaccacgccaactacactgtcgcctataacatgctgaccggcatccgcgtctccgtctcgcgcaccaacgcaaagctcgaccgacccctgaccgatgaagacttcggggctaagcagaagtcgacgtttgatatcgcggggaacgagttggtgccttcggcaaaatacgacttcaagttcaaggattatgcgccctgggtcttccgacacctgcgagccctcttcagactggatcccgctgattatctcatgtccctcactgggaaatatattctttcggagcttggatcgccggggaagagcggtagcttcttctacttctctcgcgactacaagtacattatcaagaccatccaccacgccgagcacaagtttctgcgcaaggtcctgaaggactactacaaccacgttgctgacaaccccaatactctactctcccagttttatggcttgcaccgcgtcaagatgccgtacggcaagaagatacactttgtcgtcatgaacaacttgtttcccccgcaccgagatatccacacgacattcgatttgaaaggctcaacgatcggccgagattacaaagaggaggagctggagaagaatccgcgcgccacgctgaaagatctcaactggctgcgtcgacagaggcatttggagatggggctccaaaagaaacagcttttcctccagcagctgcagagcgatgtgaagctcctgcaaaagctgaagatcatggattactcactattggtcggcatgcatgacttacggaaaggcaacgaagagaatctccgggacaagactctccaagtcttcaaccctggaggtgccggccctggtgaggatggtggcgaccccaacgtggttctcatgcggaccccatcgaagctggaaagcgcgcggaaagcgagagagctccgacagatgatcaaagccgaacgtccggtccccatgggcgagacaagcgagaagatgccggacgaactggctgagggccacggtcgtgggggcgacgaggtgtactacctcggtgtcattgactgcttgacacattacggcatgatcaagaaaatcgagcacttttggaaaggtctttctaacgatcgcacacaaatctcggccttaccgccgcaggaatacggcaacagattcctgaaattcatgtctggcgtcaccatgtcccccgaagaagcggctcgagatcagcatgacagggaggccgcggcggcagcagccgctgcatctgctgccgaatcgaactcagtcccacctgttcccacctatctcccgccggcaccaccaggaatgagaagtcccgcgtcgccggaaccaaaccctaccgtagagaaggccatgaagaaggccatgaaaaaagaaagtgaggtcgccaaggaggatcaagtgccagaacgcaaaataacgacatcggtgtcaacggcaatgaatggaagaacaaactcgcacactgtcttgcctgtagtggaagaatcggcggaagcggcatctttgggtggtcgaagtcgcggcgagagtgaatctcggccatatacaccagtacccacgagcagacaagacggatttactgatctcggcccacacggaatcggtggacgtggaccaccgacacctcccaaaacgagttatttcgaccccgacggcaactacggtggttcgagaaagcgaagtgggagcggcagcgggagccttgaagggaagctgtcaagagacttgatcagccgcgaaagcctcgataaggcattaccaccactcccgaaatag

SEQ ID NO: 5459 - protein, 886 aa, Muscodor strobelii
  misc_feature: SGI Peptide ID NO. 561535
  misc_feature (379)..(686): Pfam Id: PF01504 Pfam Desc: Phosphatidylinositol-4-phosphate 5-Kinase
  misc_feature (129)..(886): NCBI GI: 171679669 Blast Desc: protein product [Podospora anserina] gi|170939460|emb|CAP64688.1| protein product [Podospora anserina]
  misc_feature (173)..(885): NCBI GI: 85094689 Blast Desc: phosphatidylinositol-4-phosphate 5-kinase its3 [Neurospora crassa OR74A] gi|28921396|gb|EAA30703.1| phosphatidylinositol-4-phosphate 5-kinase its3 [Neurospora crassa
  misc_feature (126)..(885): NCBI GI: 39977339 Blast Desc: MGG_06572 [Magnaporthe grisea 70-15] gi|145015987|gb|EDK00477.1| MGG_06572 [Magnaporthe grisea 70-15]
  misc_feature (1)..(886): NCBI GI: 46138555 Blast Desc: FG10792.1 [Gibberella zeae PH-1]
  misc_feature (164)..(885): NCBI GI: 116203439 Blast Desc: CHGG_09603 [Chaetomium globosum CBS 148.51] gi|88175731|gb|EAQ83199.1| CHGG_09603 [Chaetomium globosum CBS 148.51]
  misc_feature (1)..(886): NCBI GI: 256729135 Blast Desc: [Nectria haematococca mpVI 77-13-4]
  misc_feature (57)..(795): NCBI GI: 225685177 Blast Desc: phosphatidylinositol-4-phosphate 5-kinase 1 (PtdIns(4)P-5-kinase 1) [Paracoccidioides brasiliensis Pb03]
  misc_feature (167)..(795): NCBI GI: 226294500 Blast Desc: phosphatidylinositol-4-phosphate 5-kinase its3 [Paracoccidioides brasiliensis Pb18]
  misc_feature (57)..(795): NCBI GI: 226279386 Blast Desc: phosphatidylinositol-4-phosphate 5-kinase its3 [Paracoccidioides brasiliensis Pb01]
  misc_feature (160)..(801): NCBI GI: 169618082 Blast Desc: SNOG_12229 [Phaeosphaeria nodorum SN15] gi|160703545|gb|EAT80641.2| SNOG_12229 [Phaeosphaeria nodorum SN15]
  misc_feature (253)..(682): SWISSPROT Homolog: EC 2.7.1.68 1-phosphatidylinositol-4-phosphate 5-kinase
  misc_feature: Useful for introducing or modulating the production of volatile compounds
MPSFVNNENSPYTPYTPTSAVFRLDSHGRHDPQFAKLVAGEKPLPALVDHSNASFDDNASTLSTQSSELRPRLNGDKNGDTMAAALPNGIPITEADGYADHHSHPSHHSATVRPVDAHQSSAKPPSLDRTSSDAPHTPLAHALPSRPSTVAPDHDRLNNADNQRFSSPPSFPPASASTSALYPPPASSAAAKQRHTLEVPRVQPGRGSKDGNDAAYASGRYSPAPTGGAAARRGSLNLARRNTRSMHSDMPRDEVPPDDDALRWAEAVRAKRASKKKRREEDDDDRVLVGTKVDENHANYTVAYNMLTGIRVSVSRTNAKLDRPLTDEDFGAKQKSTFDIAGNELVPSAKYDFKFKDYAPWVFRHLRALFRLDPADYLMSLTGKYILSELGSPGKSGSFFYFSRDYKYIIKTIHHAEHKFLRKVLKDYYNHVADNPNTLLSQFYGLHRVKMPYGKKIHFVVMNNLFPPHRDIHTTFDLKGSTIGRDYKEEELEKNPRATLKDLNWLRRQRHLEMGLQKKQLFLQQLQSDVKLLQKLKIMDYSLLVGMHDLRKGNEENLRDKTLQVFNPGGAGPGEDGGDPNVVLMRTPSKLESARKARELRQMIKAERPVPMGETSEKMPDELAEGHGRGGDEVYYLGVIDCLTHYGMIKKIEHFWKGLSNDRTQISALPPQEYGNRFLKFMSGVTMSPEEAARDQHDREAAAAAAAASAAESNSVPPVPTYLPPAPPGMRSPASPEPNPTVEKAMKKAMKKESEVAKEDQVPERKITTSVSTAMNGRTNSHTVLPVVEESAEAASLGGRSRGESESRPYTPVPTSRQDGFTDLGPHGIGGRGPPTPPKTSYFDPDGNYGGSRKRSGSGSGSLEGKLSRDLISRESLDKALPPLPK

SEQ ID NO: 5460 - DNA, 5027 bp, Muscodor strobelii
  misc_feature: SGI EST ID NO. CUFF.14166.0
  misc_feature: Variant of the nucleotide sequence at SEQ ID NO 5458
cgggccggggactgcgcctgtgccaacttccagaatccacatctgcagcaccagcaccacactgcacagctcgtccatctcaggccgtcgggtttggcaagtctccgactgctcgctcacgatctcctttctcccctatctttctttagtctcattctcagccaattctctcctcacctcgcgacgacggcactccaggcagtctcaccgtgtcttctgccgcccaattcacttttctcccgtgctattttgtgttcaatccgagcgcccgcgttgttgcatgtggtcctgaagtccgccccgaggcgttgcccacctcgcagaccggtcgcccgtctcgtgcgcgacaccgacgatgccctccttcgtcaacaacgagaactcgccctacacgccctacacgcccacctcggccgtcttccggctcgacagccacggccgccacgacccgcagttcgccaagctggtcgccggcgagaagccgctgcccgccctcgtcgaccactccaacgcgagcttcgatgacaacgcctccaccctctcgacccagagttccgagctgcggccgcgtctgaacggggacaagaacggagacaccatggccgccgcgctccccaatggcattccgatcaccgaggcagacggctacgcggaccaccactcgcacccctcgcaccactccgccactgtcagacccgtcgacgcacaccaatcctcggccaagcccccctcgctggaccgcacgtcctccgacgcaccacacactccgctggcccacgcgctgccgtcgcggccctcgaccgtcgcccccgaccacgacagactcaacaatgcagacaatcagaggttttcctcgcccccgagcttcccccccgcttccgcttccacctctgcgctctacccccctccagcgtcgtcggccgcagccaaacagcgccataccctggaagtcccacgcgtacagccaggaagaggctccaaagacggcaacgatgctgcgtatgcaagtggccggtactcccccgcgccgacgggtggtgctgcggcacggagaggctccctcaacctggctcggcggaacacgcgttccatgcactccgacatgccccgcgacgaggtgccaccggacgacgacgcgctgcggtgggcagaggccgtgagagcgaagcgggcgagcaagaagaagcgacgggaagaggacgacgacgaccgtgttctggtcggcaccaaagtcgacgagaaccacgccaactacactgtcgcctataacatgctgaccggcatccgcgtctccgtctcgcgcaccaacgcaaagctcgaccgacccctgaccgatgaagacttcggggctaagcagaagtcgacgtttgatatcgcggggaacgagttggtgccttcggcaaaatacgacttcaagttcaaggattatgcgccctgggtcttccgacacctgcgagccctcttcagactggatcccgctgattatctcatgtccctcactgggaaatatattctttcggagcttggatcgccggggaagagcggtagcttcttctacttctctcgcgactacaagtacattatcaagaccatccaccacgccgagcacaagtttctgcgcaaggtcctgaaggactactacaaccacgttgctgacaaccccaatactctactctcccagttttatggcttgcaccgcgtcaagatgccgtacggcaagaagatacactttgtcgtcatgaacaacttgtttcccccgcaccgagatatccacacgacattcgatttgaaaggctcaacgatcggccgagattacaaagaggaggagctggagaagaatccgcgcgccacgctgaaagatctcaactggctgcgtcgacagaggcatttggagatggggctccaaaagaaacagcttttcctccagcagctgcagagcgatgtgaagctcctgcaaaagctgaagatcatggattactcactattggtcggcatgcatgacttacggaaaggcaacgaagagaatctccgggacaagactctccaagtcttcaaccctggaggtgccggccctggtgaggatggtggcgaccccaacgtggttctcatgcggaccccatcgaagctggaaagcgcgcggaaagcgagagagctccgacagatgatcaaagccgaacgtccggtccccatgggcgagacaagcgagaagatgccggacgaactggctgagggccacggtcgtgggggtctcttcacaatgatgacggcgggctacgggcgactcacgaagatggaactccaggcgacgaggtgtactacctcggtgtcattgactgcttgacacattacggcatgatcaagaaaatcgagcacttttggaaaggtctttctaacgatcgcacacaaatctcggccttaccgccgcaggaatacggcaacagattcctgaaattcatgtctggcgtcaccatgtcccccgaagaagcggctcgagatcagcatgacagggaggccgcggcggcagcagccgctgcatctgctgccgaatcgaactcagtcccacctgttcccacctatctcccgccggcaccaccaggaatgagaagtcccgcgtcgccggaaccaaaccctaccgtagagaaggccatgaagaaggccatgaaaaaagaaagtgaggtcgccaaggaggatcaagtgccagaacgcaaaataacgacatcggtgtcaacggcaatgaatggaagaacaaactcgcacactgtcttgcctgtagtggaagaatcggcggaagcggcatctttgggtggtcgaagtcgcggcgagagtgaatctcggccatatacaccagtacccacgagcagacaagacggatttactgatctcggcccacacggaatcggtggacgtggaccaccgacacctcccaaaacgagttatttcgaccccgacggcaactacggtggttcgagaaagcgaagtgggagcggcagcgggagccttgaagggaagctgtcaagagacttgatcagccgcgaaagcctcgataaggcattaccaccactcccgaaataggcgtaatttcatcgcttcggctagtgacggttctggtccgtatttctctcgcaaatttagtcgcattttggaaaacaagagcccgttacaggaggataggagctcgaagccacgtcgaaacggacgtgatgaaacataagagagtatatgatcatggatatatccatgacacacggagctttggacatagaagctacattttgagaagcggcacggatcaataaaaaggggattacccgacgggcttaactcgtcgccgaacctgggtggtacggagcatagacgaacgagtttctttgcatgcgcggagccgaatttcccagcccaactttagagcataggccattgttttcttcttctttccacctcctaatttcctttgttgtctgctcagcctgctgcgtttcctcagcatgttagtcaactagagacatgataccaccaccatagcataataggcatgaattcaatgaaacgggtttcgactttgcaacttttccctttttgctttatgcaagcaaatcatatgtgtcgccttgctctatagacgaggacgttaccctctcccatcgactgaccaatatgatgggcttataacaatgaggatgatagttttcttgccacgagatgagatggcaacctgattcacattatttccgaactaagagattaggtgcatcgacactagatatacgaatagatctccaacgtacgctatctggagatcaggcttttaaagagatccttcaggccatgtgtaagcaggccagtcaaaatgcggatcgtatcgtaattgcagagtgacgcttccctcggggaattctttcatactcccatctagcatcttcctcgggcgcacgccgccggcaagcgtccagcgattgacgaggccatgagccttcgccacggcctccttgagtctagctaccttgtccggacgcggtaaaaagttatccctcagctcttcatccgtgctctcctcgaactctcctggctcggcgacgatccaagcatcgtgtgagttccgctcatcttccatatccagccctccacaatcggaggcttcctcttggacgaagtcctcggtaacaggcatctccacacctgcgttgtctaaatcctcgccaatggacatattcgcaatatcatagttgacgtacgtcaatggcagacaatcagtctttacgtaaatacgccagacaacgtctgtggagtccgcttcgccgtcatctacctcttgctggtctgcgaatcgatcgacgtaccatacagctccgtctctgccgcctttcgctccttcgctgatgataacaaagggatctttgcgtcctgccctcgtctcttccgcgcgcaggtctggtgagcagagagtgttgtgttagtaggttttcgcgggtttccctttcgggtccgcgggcttttaagattttaagattttaagacaaaagactgatatctgatacttgacaggtgagattacttactacaaagaattagtatgatgtctcaggaaaatacgaagaagaactgaaccacgtagtatctttccacacataccacttgaaggactttccgaggtaatgcgctggcgcacgctggattacaagctcgagcattgggctgaatggcgcgcaagtcccgaattcgaacgcttgcttgaactcctgcagttcttcgtccgagaagtctgccatgaggtaggcgttaagccttggggcgcctgtaggtggaggtatgtagaccatgttcgctttcgatatgtctaggtagtgttatttcgtatattgcaatgatttttgatgcagtttgatccaacatttgcgagcaattcgtcagctcagaatatatatcgaaatggaaaaataggcaagtaggagctcccggagcaaaaattcgcctgactaattagatgcgatacccgtcagccccggaacaatgtttagacacagttacag

SEQ ID NO: 5461 - DNA, 822 bp, Muscodor strobelii
  misc_feature: SGI cDNA ID NO. 561536
  misc_feature: Reduced expression when VOC is produced
  misc_feature: Encodes the peptide sequence at SEQ ID NO 5462
atggtctacatacctccacctacaggcgccccaaggcttaacgcctacctcatggcagacttctcggacgaagaactgcaggagttcaagcaagcgttcgaattcgggacttgcgcgccattcagcccaatgctcgagcttgtaatccagcgtgcgccagcgcattacctcggaaagtccttcaagtgtaatctcacctacctgcgcgcggaagagacgagggcaggacgcaaagatccctttgttatcatcagcgaaggagcgaaaggcggcagagacggagctgtatggtacgtcgatcgattcgcagaccagcaagaggtagatgacggcgaagcggactccacagacgttgtctggcgtatttacgtaaagactgattgtctgccattgacgtacgtcaactatgatattgcgaatatgtccattggcgaggatttagacaacgcaggtgtggagatgcctgttaccgaggacttcgtccaagaggaagcctccgattgtggagggctggatatggaagatgagcggaactcacacgatgcttggatcgtcgccgagccaggagagttcgaggagagcacggatgaagagctgagggataactttttaccgcgtccggacaaggtagctagactcaaggaggccgtggcgaaggctcatggcctcgtcaatcgctggacgcttgccggcggcgtgcgcccgaggaagatgctagatgggagtatgaaagaattccccgagggaagcgtcactctgcaattacgatacgatccgcattttgactggcctgcttacacatggcctgaaggatctctttaa

SEQ ID NO: 5462 - protein, 273 aa, Muscodor strobelii
  misc_feature: SGI Peptide ID NO. 561536
  misc_feature (1)..(273): NCBI GI: 46109810 Blast Desc: FG01787.1 [Gibberella zeae PH-1]
  misc_feature (1)..(273): NCBI GI: 242812620 Blast Desc: conserved [Talaromyces stipitatus ATCC 10500] gi|218714334|gb|EED13757.1| conserved [Talaromyces stipitatus ATCC 10500]
  misc_feature (1)..(223): NCBI GI: 169620004 Blast Desc: SNOG_13202 [Phaeosphaeria nodorum SN15] gi|160703943|gb|EAT79529.2| SNOG_13202 [Phaeosphaeria nodorum SN15]
  misc_feature: Useful for introducing or modulating the production of volatile compounds
MVYIPPPTGAPRLNAYLMADFSDEELQEFKQAFEFGTCAPFSPMLELVIQRAPAHYLGKSFKCNLTYLRAEETRAGRKDPFVIISEGAKGGRDGAVWYVDRFADQQEVDDGEADSTDVVWRIYVKTDCLPLTYVNYDIANMSIGEDLDNAGVEMPVTEDFVQEEASDCGGLDMEDERNSHDAWIVAEPGEFEESTDEELRDNFLPRPDKVARLKEAVAKAHGLVNRWTLAGGVRPRKMLDGSMKEFPEGSVTLQLRYDPHFDWPAYTWPEGSL

SEQ ID NO: 5463 - DNA, 5117 bp, Muscodor strobelii
  misc_feature: SGI EST ID NO. CUFF.14167.1
  misc_feature: Variant of the nucleotide sequence at SEQ ID NO 5461
ctgtaactgtgtctaaacattgttccggggctgacgggtatcgcatctaattagtcaggcgaatttttgctccgggagctcctacttgcctatttttccatttcgatatatattctgagctgacgaattgctcgcaaatgttggatcaaactgcatcaaaaatcattgcaatatacgaaataacactacctagacatatcgaaagcgaacatggtctacatacctccacctacaggcgccccaaggcttaacgcctacctcatggcagacttctcggacgaagaactgcaggagttcaagcaagcgttcgaattcgggacttgcgcgccattcagcccaatgctcgagcttgtaatccagcgtgcgccagcgcattacctcggaaagtccttcaagtgtaagtaatctcacctgtcaagtatcagatatcagtcttttgtcttaaaatcttaaaatcttaaaagcccgcggacccgaaagggaaacccgcgaaaacctactaacacaacactctctgctcaccagacctgcgcgcggaagagacgagggcaggacgcaaagatccctttgttatcatcagcgaaggagcgaaaggcggcagagacggagctgtatggtacgtcgatcgattcgcagaccagcaagaggtagatgacggcgaagcggactccacagacgttgtctggcgtatttacgtaaagactgattgtctgccattgacgtacgtcaactatgatattgcgaatatgtccattggcgaggatttagacaacgcaggtgtggagatgcctgttaccgaggacttcgtccaagaggaagcctccgattgtggagggctggatatggaagatgagcggaactcacacgatgcttggatcgtcgccgagccaggagagttcgaggagagcacggatgaagagctgagggataactttttaccgcgtccggacaaggtagctagactcaaggaggccgtggcgaaggctcatggcctcgtcaatcgctggacgcttgccggcggcgtgcgcccgaggaagatgctagatgggagtatgaaagaattccccgagggaagcgtcactctgcaattacgatacgatccgcattttgactggcctgcttacacatggcctgaaggatctctttaaaagcctgatctccagatagcgtacgttggagatctattcgtatatctagtgtcgatgcacctaatctcttagttcggaaataatgtgaatcaggttgccatctcatctcgtggcaagaaaactatcatcctcattgttataagcccatcatattggtcagtcgatgggagagggtaacgtcctcgtctatagagcaaggcgacacatatgatttgcttgcataaagcaaaaagggaaaagttgcaaagtcgaaacccgtttcattgaattcatgcctattatgctatggtggtggtatcatgtctctagttgactaacatgctgaggaaacgcagcaggctgagcagacaacaaaggaaattaggaggtggaaagaagaagaaaacaatggcctatgctctaaagttgggctgggaaattcggctccgcgcatgcaaagaaactcgttcgtctatgctccgtaccacccaggttcggcgacgagttaagcccgtcgggtaatcccctttttattgatccgtgccgcttctcaaaatgtagcttctatgtccaaagctccgtgtgtcatggatatatccatgatcatatactctcttatgtttcatcacgtccgtttcgacgtggcttcgagctcctatcctcctgtaacgggctcttgttttccaaaatgcgactaaatttgcgagagaaatacggaccagaaccgtcactagccgaagcgatgaaattacgcctatttcgggagtggtggtaatgccttatcgaggctttcgcggctgatcaagtctcttgacagcttcccttcaaggctcccgctgccgctcccacttcgctttctcgaaccaccgtagttgccgtcggggtcgaaataactcgttttgggaggtgtcggtggtccacgtccaccgattccgtgtgggccgagatcagtaaatccgtcttgtctgctcgtgggtactggtgtatatggccgagattcactctcgccgcgacttcgaccacccaaagatgccgcttccgccgattcttccactacaggcaagacagtgtgcgagtttgttcttccattcattgccgttgacaccgatgtcgttattttgcgttctggcacttgatcctccttggcgacctcactttcttttttcatggccttcttcatggccttctctacggtagggtttggttccggcgacgcgggacttctcattcctggtggtgccggcgggagataggtgggaacaggtgggactgagttcgattcggcagcagatgcagcggctgctgccgccgcggcctccctgtcatgctgatctcgagccgcttcttcgggggacatggtgacgccagacatgaatttcaggaatctgttgccgtattcctgcggcggtaaggccgagatttgtgtgcgatcgttagaaagacctttccaaaagtgctcgattttcttgatcatgccgtactagggaagtcagtaagcatggcatatctgggggcaatgcttggtagtgcttacatgtgtcaagcagtcaatgacaccgaggtagtacacctcgtcgcctggagttccatcttcgtgagtcgcccgtagcccgccgtcatcattgtgaagagacccccacgaccgtggccctcagccagttcgtccggcatcttctcgcttgtctcgcccatggggaccggacgttcggctttgatcatctgtcggagctctctcgctttccgcgcgctttccagcttcgatggggtccgcatgagaaccacgttggggtcgccaccatcctcaccagggccggcacctccagggttgaagacttggagagtcttgtcccggagattctcttcgttgcctttccgtaagtcatgcatgccgaccaatagtgagtaatccatgatcttcagcttttgcaggagcttcacatcgctctgcagctgctggaggaaaagctgtttcttttggagccccatctccaaatgcctctgtcgacgcagccagttgagatctttcagcgtggcgcgcggattcttctccagctcctcctctttgtaatctcggccgatcgttgagcctttcaaatcgaatgtcgtgtggatatctcggtgcgggggaaacaagttgttcatgacgacaaagtgtatcttcttgccgtacggcatcttgacgcggtgcaagccataaaactgggagagtagagtattggggttgtcagcaacgtggttgtagtagtccttcaggaccttgcgcagaaacttgtgctcggcgtggtggatggtcttgataatgtacttgtagtcgcgagagaagtagaagaagctaccgctcttccccggcgatccaagctccgaaagaatatatttcccagtgagggacatgagataatcagcgggatccagtctgaagagggctcgcaggtgtcggaagacccagggcgcataatccttgaacttgaagtcgtattttgccgaaggcaccaactcgttccccgcgctgtagtcctgttagctgagacagtttcgagaaagcacgcggcagttaacaagcgatatgacaagatgacgtgggaagccgtgttcttctttctataaggcaggacatacatatcaaacgtcgacttctgcttagccccgaagtcttcatcggtcaggggtcggtcgagctttgcgttggtgcgcgagacggagacgcggatgccggtcagcatgttataggcgacagtgtagttggcgtggttctcgtcgactttggtgccgaccagaacacggtcgtcgtcgtcctcttcccgtcgcttcttcttgctcgcccgcttcgctctcacggcctctgcccaccgcagcgcgtcgtcgtccggtggcacctcgtcgcggggcatgtcggagtgcatggaacgcgtgttccgccgagccaggttgagggagcctctccgtgccgcagcaccacccgtcggcgcgggggagtaccggccacttgcatacgcagcatcgttgccgtctttggagcctcttcctggctgtacgcgtgggacttccagggtatggcgctgtttggctgcggccgacgacgctggaggggggtagagcgcagaggtggaagcggaagcgggggggaagctcgggggcgaggaaaacctctgattgtctgcattgttgagtctgtcgtggtcgggggcgacggtcgagggccgcgacggcagcgcgtgggccagcggagtgtgtggtgcgtcggaggacgtgcggtccagcgaggggggcttggccgaggattggtgtgcgtcgacgggtctgacagtggcggagtggtgcgaggggtgcgagtggtggtccgcgtagccgtctgcctcggtgatcggaatgccattggggagcgcggcggccatggtgtctccgttcttgtccccgttcagacgcggccgcagctcggaactctgggtcgagagggtggaggcgttgtcatcgaagctcgcgttggagtggtcgacgagggcgggcagcggcttctcgccggcgaccagcttggcgaactgcgggtcgtggcggccgtggctgtcgagccggaagacggccgaggtgggcgtgtagggcgtgtagggcgagttctcgttgttgacgaaggagggcatcgtcggtgtcgcgcacgagacgggcgaccggtctgcgaggtgggcaacgcctcggggcggacttcaggaccacatgcaacaacgcgggcgctcggattgaacacaaaatagcacgggagaaaagtgaattgggcggcagaagacacggtgagactgcctggagtgccgtcgtcgcgaggtgaggagagaattggctgagaatgagactaaagaaagataggggagaaaggagatcgtgagcgagcagtcggagacttgccaaacccgacggcctgagatggacgagctgtgcagtgtggtgctggtgctgcagatgtggattctggaagttggcacaggcgcagtccccggcccg

SEQ ID NO: 5464 - DNA, 1245 bp, Muscodor strobelii
  misc_feature: SGI cDNA ID NO. 561537
  misc_feature: Encodes the peptide sequence at SEQ ID NO 5465
atgattccctccagcattcttttcccatgcctctctctcatcgggttgcctattgttttaggttatcccgggtgggacaaacaactgaaagagcttgtagcaagacaagaggacgatggaggcgaagaatttgactcgtttgagctactgggggatcttcagacacttccggattcccagttgacacccgtaggccaggatattaaatcggtgctgacgggtggaggagaccctgagagcgatgccacttggactcgaccagctcttggaagcactctttgcaatcaggatacatgctgtgtctgggattatatcaaagacgatatgtatgctgccttcaagtcaaagtctggacggtgcaatggtctcgcccgtgcagctgttcgactgggattccacgatgctggcgcatggtcgaaagaggttgcctctcagggcggcggcgccgatggctcgatctgcatcaacaacgttgagatcaaccagccagagaacaacgggctacaaacaattgtcaagcaaatgcagacctggtatcagaagtggaacgtcaagaagggatacaagcaagtcacctatgctgatctaatccaaatgggtgcaaccatcgcgacagtcacttgcccacttggcccccgcgtcaagtcgtatgttggcaggatagacagcagtttcacgaaccattttgaactattacctagcgccgctgacaacgccgatcacctcatcgaactgttcaagaataagactatcttccctcacggattgacggctttggtgggagctcacactagcagccaacaattcttcttcaatacctctcgtgctggtgatccacaggatagcacgcctggtgtttgggacgtcaagttttataaccagactctgtttcctcagtcggcacccaaacgtgttttcatgttcccaagcgatctgtctctgtcggtgcatccagatacacatgcggagtgggtaaagttcacgactgatcaagacgactggaatgaagacttcgcacgagaatacattcgcctgagccttcttggggtcaacaatatcaacactctgacggagtgcacaaaggtgctgccgtcagccattaaagacccgaactacaaggcttccgatgaagccgcggtggcttcttggctgaagacaattagccataacgtagtctccaagaagattgcggatcttctcaacagtggcggtatcgtcttggcgtctttgcttacggggttgtag

SEQ ID NO: 5465 - protein, 414 aa, Muscodor strobelii
  misc_feature: SGI Peptide ID NO. 561537
  misc_feature (105)..(330): Pfam Id: PF00141 Pfam Desc: Peroxidase
  misc_feature (1)..(407): NCBI GI: 261361667 Blast Desc: ligninase H2 [Verticillium albo-atrum VaMs.102]
  misc_feature (36)..(414): NCBI GI: 39972991 Blast Desc: MGG_07790 [Magnaporthe grisea 70-15] gi|145012565|gb|EDJ97219.1| MGG_07790 [Magnaporthe grisea 70-15]
  misc_feature (48)..(385): NCBI GI: 256725786 Blast Desc: NECHADRAFT_4582 [Nectria haematococca mpVI 77-13-4]
  misc_feature (20)..(410): NCBI GI: 261352643 Blast Desc: peroxidase manganese-dependent 1 [Verticillium albo-atrum VaMs.102]
  misc_feature (17)..(385): NCBI GI: 169620674 Blast Desc: SNOG_13539 [Phaeosphaeria nodorum SN15] gi|160704086|gb|EAT78986.2| SNOG_13539 [Phaeosphaeria nodorum SN15]
  misc_feature (13)..(384): NCBI GI: 189194071 Blast Desc: ligninase H2 precursor [Pyrenophora tritici-repentis Pt-1C-BFP] gi|187978938|gb|EDU45564.1| ligninase H2 precursor [Pyrenophora tritici-repentis Pt-1C-BFP]
  misc_feature (15)..(366): NCBI GI: 145606935 Blast Desc: MGG_03873 [Magnaporthe grisea 70-15] gi|145014564|gb|EDJ99132.1| MGG_03873 [Magnaporthe grisea 70-15]
  misc_feature (48)..(364): NCBI GI: 171695770 Blast Desc: protein product [Podospora anserina] gi|170948127|emb|CAP60291.1| protein product [Podospora anserina]
  misc_feature (39)..(365): NCBI GI: 169616924 Blast Desc: SNOG_11639 [Phaeosphaeria nodorum SN15] gi|111060227|gb|EAT81347.1| SNOG_11639 [Phaeosphaeria nodorum SN15]
  misc_feature (11)..(364): NCBI GI: 261361376 Blast Desc: versatile peroxidase VPL1 [Verticillium albo-atrum VaMs.102]
  misc_feature (88)..(365): SWISSPROT Homolog: EC 1.11.1.16 Versatile peroxidase
MIPSSILFPCLSLIGLPIVLGYPGWDKQLKELVARQEDDGGEEFDSFELLGDLQTLPDSQLTPVGQDIKSVLTGGGDPESDATWTRPALGSTLCNQDTCCVWDYIKDDMYAAFKSKSGRCNGLARAAVRLGFHDAGAWSKEVASQGGGADGSICINNVEINQPENNGLQTIVKQMQTWYQKWNVKKGYKQVTYADLIQMGATIATVTCPLGPRVKSYVGRIDSSFTNHFELLPSAADNADHLIELFKNKTIFPHGLTALVGAHTSSQQFFFNTSRAGDPQDSTPGVWDVKFYNQTLFPQSAPKRVFMFPSDLSLSVHPDTHAEWVKFTTDQDDWNEDFAREYIRLSLLGVNNINTLTECTKVLPSAIKDPNYKASDEAAVASWLKTISHNVVSKKIADLLNSGGIVLASLLTGL

SEQ ID NO: 5466 - DNA, 144 bp, Muscodor strobelii
  misc_feature: SGI EST ID NO. CUFF.13838.0
  misc_feature: Variant of the nucleotide sequence at SEQ ID NO 5464
cacatgcggagtgggtaaagttcacgactgatcaagacgactggaatgaagacttcgcacgagaatacattcgcctgagccttcttggggtcaacaatatcaacactctgacggagtgcacaaaggtgctgccgtcagccatta

SEQ ID NO: 5467 - DNA, 1632 bp, Muscodor strobelii
  misc_feature: SGI cDNA ID NO. 561538
  misc_feature: Encodes the peptide sequence at SEQ ID NO 5468
atggccaagacatttagcaaagccgatgttgcgtcgcatagcaaggctgatgatttgtggattattgtcgatgacgacgtctacgacctaacgaaatttcaagatgagcatccgggcggaaagaagatcttgacgcgcgtggccggcaaggatgcatcaaagcaattctggaaatatcacaatgagggtattctcaagaaattccagccctcccttcagatcggctcgctcgactcgaagccaaaggcggagcccactccatctcccgtatatgctgcacccgagccaaagaaggaaagcaagactcctattgcggcgtccccatcacaagaaagcgaggccctcgaccagtttggagcacagatccccttcgcagatcccagctggtaccaaaactaccactcgccctactacaacgagtcgcacgccgccctccgcgccgaggttcgagaatgggtcgagagcgcaatcgagcccaatgtcaccgaatgggacgagaagaaggaggtgccgcgcgagattttcctcgaggccggccgtcgcggatatctggctggtcttttaggcgtgcactatcctgtggaatactgcaagacttctgtgaagtctgtgccgccggagaagtgggatctcttccacgagatgattgttactgatgagctttcccgggttggctcaggtggtttcgtctggaatatgattggtggcttcggcatcggcgggccaccgttgatcaagttcggcaagaaggccctcaaggaccgcctcatgcccggcattctgtccggcgagaagcgcatttgcttggctatcaccgaacccgatgctggcagtgatgtggccaacctcacttgcgaagccaagctctcggaagatggcaagcattacatagtcaatggcgagaagaagtggattaccaacggtatatggtgcgactatttcaccactgcagtccgaaccggtggagagggaatgaacggtgtctctcttctgctcatcgagcgagatatgggcggtgtcagcacgaggcgtatggactgtcaaggtgtgtggtccagcggtacgacttacatcacttttgaagatgtcaaggtgcccgttgagaacttgctaggaaaggaaaatcaaggatttaaggttattatgaccaacttcaaccatgaacgaatgggcatcatcattcagtccctgcgattctctcgtgtatgctacgaggagtctgttaagtacgcaagcaagcgccggacgttcggcaagaagctgatcgaacatcccgtcattcgtatgaaattggcacatatggcgcggcagatcgaggcgtcatataactggctcgagaaccttatctaccagtgccaggtcatgaatgagaccgaagccatgctgcgtctcggtggtgctattgctggcctcaaagcgcagagcacattaactttcgagttctgtgctcgtgaggccagtcaaatctttggcggtctcagctactcgcgcggcggtcaaggtgcaaaggttgagcgactctaccgcgatgtccgagcatatgccatccctggtggtagcgaggagatcatgctggacttgagcatgagacagagtttgagagtggcaaaaatgtcgggcatgaagttataa

SEQ ID NO: 5468 - protein, 543 aa, Muscodor strobelii
  misc_feature: SGI Peptide ID NO. 561538
  misc_feature (268)..(321): Pfam Id: PF02770 Pfam Desc: Acyl-CoA dehydrogenase, middle domain
  misc_feature (375)..(533): Pfam Id: PF00441 Pfam Desc: Acyl-CoA dehydrogenase, C-terminal domain
  misc_feature (139)..(264): Pfam Id: PF02771 Pfam Desc: Acyl-CoA dehydrogenase, N-terminal domain
  misc_feature (4)..(78): Pfam Id: PF00173 Pfam Desc: Cytochrome b5-like Heme/Steroid binding domain
  misc_feature (1)..(543): NCBI GI: 145257349 Blast Desc: An04g03290 [Aspergillus niger] gi|134058611|emb|CAK38595.1| protein product [Aspergillus niger]
  misc_feature (1)..(543): NCBI GI: 85094657 Blast Desc: NCU02287 [Neurospora crassa OR74A] gi|28921388|gb|EAA30695.1| NCU02287 [Neurospora crassa OR74A]
  misc_feature (1)..(543): NCBI GI: 46138551 Blast Desc: FG10790.1 [Gibberella zeae PH-1]
  misc_feature (1)..(543): NCBI GI: 171679663 Blast Desc: protein product [Podospora anserina] gi|170939457|emb|CAP64685.1| protein product [Podospora anserina]
  misc_feature (1)..(543): NCBI GI: 70994276 Blast Desc: acyl-CoA dehydrogenase [Aspergillus fumigatus Af293] gi|66849611|gb|EAL89939.1| acyl-CoA dehydrogenase, [Aspergillus fumigatus Af293]
  misc_feature (1)..(543): NCBI GI: 238491502 Blast Desc: acyl-CoA dehydrogenase, [Aspergillus flavus NRRL3357] gi|220697401|gb|EED53742.1| acyl-CoA dehydrogenase, [Aspergillus flavus NRRL3357]
  misc_feature (1)..(543): NCBI GI: 159125110 Blast Desc: acyl-CoA dehydrogenase, [Aspergillus fumigatus A1163]
  misc_feature (1)..(543): NCBI GI: 154295184 Blast Desc: acyl-CoA dehydrogenase [Botryotinia fuckeliana B05.10] gi|150844218|gb|EDN19411.1| acyl-CoA dehydrogenase [Botryotinia fuckeliana B05.10]
  misc_feature (1)..(543): NCBI GI: 39942676 Blast Desc: conserved [Magnaporthe grisea 70-15] gi|145010043|gb|EDJ94699.1| conserved [Magnaporthe grisea 70-15]
  misc_feature (1)..(543): NCBI GI: 169595978 Blast Desc: SNOG_00736 [Phaeosphaeria nodorum SN15] gi|111071111|gb|EAT92231.1| SNOG_00736 [Phaeosphaeria nodorum SN15]
  misc_feature (251)..(534): SWISSPROT Homolog: EC 1.3.99.2 Butyryl-CoA dehydrogenase
  misc_feature: Useful for introducing or modulating the production of volatile compounds
  misc_feature: Useful for fungicidal and/or biocontrol applications
MAKTFSKADVASHSKADDLWIIVDDDVYDLTKFQDEHPGGKKILTRVAGKDASKQFWKYHNEGILKKFQPSLQIGSLDSKPKAEPTPSPVYAAPEPKKESKTPIAASPSQESEALDQFGAQIPFADPSWYQNYHSPYYNESHAALRAEVREWVESAIEPNVTEWDEKKEVPREIFLEAGRRGYLAGLLGVHYPVEYCKTSVKSVPPEKWDLFHEMIVTDELSRVGSGGFVWNMIGGFGIGGPPLIKFGKKALKDRLMPGILSGEKRICLAITEPDAGSDVANLTCEAKLSEDGKHYIVNGEKKWITNGIWCDYFTTAVRTGGEGMNGVSLLLIERDMGGVSTRRMDCQGVWSSGTTYITFEDVKVPVENLLGKENQGFKVIMTNFNHERMGIIIQSLRFSRVCYEESVKYASKRRTFGKKLIEHPVIRMKLAHMARQIEASYNWLENLIYQCQVMNETEAMLRLGGAIAGLKAQSTLTFEFCAREASQIFGGLSYSRGGQGAKVERLYRDVRAYAIPGGSEEIMLDLSMRQSLRVAKMSGMKL

SEQ ID NO: 5469 - DNA, 2161 bp, Muscodor strobelii
  misc_feature: SGI EST ID NO. CUFF.14027.1
  misc_feature: Variant of the nucleotide sequence at SEQ ID NO 5467
gcttgcggcagcatgtgaaaatgcaacgccagaagccgagcttcgtcatgacaataaatctgaccggaggaatgacacgatgaccttgtgccactgttcatcttgctatgctgaactcgcccccattttgacatagtctccctattaactaccacgcactgccgttgcatcttcatctttcgtcattgcattccattccagacatagtgtagtattccaccgatctaccccccaacttagctgcgatttcgactgttttcgccatggccaagacatttagcaaagccgatgttgcgtcgcatagcaaggctgatgatttgtggattattgtcgatgacgacgtctacgacctaacgaaatttcaagatgagcatccgggcggaaagaagatcttgacgcgcgtggccggcaaggatgcatcaaagcaattctggaaatatcacaatgagggtattctcaagaaattccagccctcccttcagatcggctcgctcgactcgaagccaaaggcggagcccactccatctcccgtatatgctgcacccgagccaaagaaggaaagcaagactcctattgcggcgtccccatcacaagaaagcgaggccctcgaccagtttggagcacagatccccttcgcagatcccagctggtaccaaaactaccactcgccctactacaacgagtcgcacgccgccctccgcgccgaggttcgagaatgggtcgagagcgcaatcgagcccaatgtcaccgaatgggacgagaagaaggaggtgccgcgcgagattttcctcgaggccggccgtcgcggatatctggctggtcttttaggcgtgcactatcctgtggaatactgcaagacttctgtgaagtctgtgccgccggagaagtgggatctcttccacgagatgattgttactgatgagctttcccgggttggctcaggtggtttcgtctggaatatgattggtggcttcggcatcggcgggccaccgttgatcaagttcggcaagaaggccctcaaggaccgcctcatgcccggcattctgtccggcgagaagcgcatttgcttggctatcaccgaacccgatgctggcagtgatgtggccaacctcacttgcgaagccaagctctcggaagatggcaagcattacatagtcaatggcgagaagaagtggattaccaacggtatatggtgcgactatttcaccactgcagtccgaaccggtggagagggaatgaacggtgtctctcttctgctcatcgagcgagatatgggcggtgtcagcacgaggcgtatggactgtcaaggtgtgtggtccagcggtacgacttacatcacttttgaagatgtcaaggtgcccgttgagaacttgctaggaaaggaaaatcaaggatttaaggttattatgaccaacttcaaccatgaacgaatgggcatcatcattcagtccctgcgattctctcgtgtatgctacgaggagtctgttaagtacgcaagcaagcgccggacgttcggcaagaagctgatcgaacatcccgtcattcgtatgaaattggcacatatggcgcggcagatcgaggcgtcatataactggctcgagaaccttatctaccagtgccaggtcatgaatgagaccgaagccatgctgcgtctcggtggtgctattgctggcctcaaagcgcagagcacattaactttcgagttctgtgctcgtgaggccagtcaaatctttggcggtctcagctactcgcgcggcggtcaaggtgcaaaggttgagcgactctaccgcgatgtccgagcatatgccatccctggtggtagcgaggagatcatgctggacttgagcatgagacagagtttgagagtggcaaaaatgtcgggcatgaagttataatcgaccagttgtatttatcatatgatcatgcggaactttgtataacagacccttgtgcatcgggccggacgatggcgatgcggcgttgtcatttctcctttgcctctgttacggctttgcatcaatacactatattcgttgtttagacaaaaatcattaaaggcattgtcaaattcaaagagttccatggtgatgtttagtagtatacataagttttcacacttgcttaggttagcacggtatctttcttgaacgatacgtcctgc

SEQ ID NO: 5470 - DNA, 777 bp, Muscodor strobelii
  misc_feature: SGI cDNA ID NO. 561539
  misc_feature: Encodes the peptide sequence at SEQ ID NO 5471
atgacttcgccggtgtggttcatcacgggagcttcaaatggcatcgggctcgtccttacgttgcgagccctaaaggcggggcatcgcgccatcggttccatgcgtaataaagagaaacacatcaatgccgtgaaacaaatcgaagatgcaggcggagaggtcatggagttggatatgaccgaatcacaagaaagtatccacaagaaaatcaaggctgtcggccaaatcgactttctggtgaacaacgcgggatactcaatatggtgcgccttggaacagatgagtgacaaggaggtcaatgctctattctcggccaatatttttggacctgtctatgttatgcaaggagcactggagaacatgcgacgacgtcgatcagggcttatcatcaatgtgtcgagtaacaatgccagagatccattccctgctagtgcgatgtacgcagcgacaaaagctgccttggaagccgcatccgaaggcttgcaaaaagaggtcgagtcattcggcattaaagtggtacatttgagggatatgatgggcgacaacctggtgatcctaagaaagcagcagaacggatggtttgagattgccactggagagggcatggccggagaactcaaagacaaagtcttacgactcgcgttgggcggtgacggccatcagcgcatgaaagagaacactgagaaattcgtgcaggatatgaacataggcgagaaagtcgcttatagtacggactactcgagcgcttcgaatgaagaaaaatcagattcccactag

SEQ ID NO: 5471 - protein, 258 aa, Muscodor strobelii
  misc_feature: SGI Peptide ID NO. 561539
  misc_feature (4)..(166): Pfam Id: PF00106 Pfam Desc: short chain dehydrogenase
  misc_feature (71)..(166): Pfam Id: PF00106 Pfam Desc: short chain dehydrogenase
  misc_feature (1)..(246): NCBI GI: 242812062 Blast Desc: short-chain dehydrogenase, [Talaromyces stipitatus ATCC 10500] gi|218714220|gb|EED13643.1| short-chain dehydrogenase, [Talaromyces stipitatus ATCC 10500]
  misc_feature (1)..(247): NCBI GI: 255937457 Blast Desc: Pc13g13410 [Penicillium chrysogenum Wisconsin 54-1255] gi|211584375|emb|CAP92410.1| Pc13g13410 [Penicillium chrysogenum Wisconsin 54-1255]
  misc_feature (1)..(245): NCBI GI: 46116818 Blast Desc: FG04251.1 [Gibberella zeae PH-1]
  misc_feature (1)..(248): NCBI GI: 256725968 Blast Desc: NECHADRAFT_104681 [Nectria haematococca mpVI 77-13-4]
  misc_feature (1)..(246): NCBI GI: 169782333 Blast Desc: [Aspergillus oryzae RIB40] gi|238500784|ref|XP_002381626.1| short chain oxidoreductase/dehydrogenase, [Aspergillus flavus NRRL3357] short
  misc_feature (5)..(246): NCBI GI: 115387054 Blast Desc: ATEG_07382 [Aspergillus terreus NIH2624] gi|114191066|gb|EAU32766.1| ATEG_07382 [Aspergillus terreus NIH2624]
  misc_feature (3)..(246): NCBI GI: 240273390 Blast Desc: dehydrogenase [Ajellomyces capsulatus H143]
  misc_feature (3)..(246): NCBI GI: 225558147 Blast Desc: short-chain dehydrogenase/reductase SDR [Ajellomyces capsulatus G186AR]
  misc_feature (3)..(246): NCBI GI: 239609820 Blast Desc: short chain oxidoreductase/dehydrogenase [Ajellomyces dermatitidis ER-3]
  misc_feature (1)..(245): NCBI GI: 70990156 Blast Desc: short chain oxidoreductase/dehydrogenase [Aspergillus fumigatus Af293] gi|66847559|gb|EAL87889.1| short chain oxidoreductase/dehydrogenase, [Aspergillus fumigatus Af293]
  misc_feature (7)..(182): SWISSPROT Homolog: EC 1.1.1.10 L-xylulose reductase
MTSPVWFITGASNGIGLVLTLRALKAGHRAIGSMRNKEKHINAVKQIEDAGGEVMELDMTESQESIHKKIKAVGQIDFLVNNAGYSIWCALEQMSDKEVNALFSANIFGPVYVMQGALENMRRRRSGLIINVSSNNARDPFPASAMYAATKAALEAASEGLQKEVESFGIKVVHLRDMMGDNLVILRKQQNGWFEIATGEGMAGELKDKVLRLALGGDGHQRMKENTEKFVQDMNIGEKVAYSTDYSSASNEEKSDSH

SEQ ID NO: 5472 - DNA, 518 bp, Muscodor strobelii
  misc_feature: SGI EST ID NO. CUFF.13855.0
  misc_feature: Variant of the nucleotide sequence at SEQ ID NO 5470
cgaagttcagaaatttcgattcacaatgacttcgccggtgtggttcatcacgggagcttcaaatggcatcgggctcgtccttacgttgcgagccctaaaggcggggcatcgcgccatcggttccatgcgtaataaagagaaacacatcaatgccgtgaaacaaatcgaagatgcaggcggagaggtcatggagttggatatgaccgaatcacaagaaagtatccacaagaaaatcaaggctgtcggccaaatcgactttctggtgaacaacgcgggatactcaatatggtgcgccttggaacagatgagtgacaaggaggtcaatgctctattctcggccaatatttttggacctgtctatgttatgcaaggagcactggagaacatgcgacgacgtcgatcagggcttatcatcaatgtgtcgagtaacaatgccagagatccattccctgctagtgcgatgtacgcagcgacaaaagctgccttggaagccgcatccgaaggcttgcaaaaagagg

SEQ ID NO: 5473 - DNA, 1512 bp, Muscodor strobelii
  misc_feature: SGI cDNA ID NO. 561540
  misc_feature: Encodes the peptide sequence at SEQ ID NO 5474
atgcgatatatatggtatgaactatcttcactgtgcttgctcttgagcaaagcatacacgaaatacattgttccgggcgctcggtggactgctacagatggcagtataatcagcgcgcatgccggcaatgtactatttcgtaatgacactttttggtggtttggcgagtacaaagtagagggccaagtcgaaggtggtggcgtgtcagtgtattcctcgcctgatctagcaacatgggacttccaaggaatcgcattgaagccgatcgagggatctccgtatatctccccggactcgatcatccaaaggccgaaagtggtatatagtgagccaacaggacaatatcatatgtggtggcatgcagataattcaagctacgggctgttgctccaaggcctcgcaacctcgaccaatattgctggaccgtacgcatttcagaatgcaattgcgcctctaggaaactggtcgcaagattttggcatctttactgactataaggacgaccggtcttatgcattgtattcaaacggcgacagtgtacagggtagagatgtgtacttgaccgcatatgacaaagaggtctcttctttaacagaagtcatacaccgattcggcaagtatgacctagaagcgccatctatcgtgcagacagaaaagagctattatgcattgatgagccacaagactggataccgaccaaacaatgtcgttgctttccgagctgatcggttgactggtccatggtctcagccatggattatagctccgctcaatacaaggacattcagttcacagtccggttttaccctccgcatacagggcagcaaaaagacgacatatttataccttggtgaccagtgggactcgaactcgctgtgggaaagccggtacatatggcttcccattgccatagatgacgacaagaagactcttgggctcgaatggcacgatgtgtacgacttgaatattgaaactggagaatggtcaccgattcaaggtagaacttacacgagtagcgacgcgacaacgagtggggattcgttcaaacaagaagctaactttgccagcgatggagttatactgactggcatttatgggaatgatagtacagtgaccttccacggcatagatggaaccggcgagcctcaatgggtatcgttttattaccaaagtaactattcctttcccatattcgaacaaagtcacacaactgatgtgccattagataccgatgatatgggcttcggagaccaacctggtggaagccctgaccgcattggaggatcgttccagttgcgacggattagcagcgtcgtggtcaacggcaacacgacgaacgtcgggacactctaccagagggacactcacaaaggcatcatcctgtcgacacctcttcttctaacactagccaaaggtttgaacaacacgataactatcggcgggttatacaacggatttgactacaagggggctgaccttgacaaaatcatcgtgtatccacctgagacatga

SEQ ID NO: 5474 - protein, 503 aa, Muscodor strobelii
  misc_feature: SGI Peptide ID NO. 561540
  misc_feature (8)..(502): NCBI GI: 119477314 Blast Desc: NFIA_072780 [Neosartorya fischeri NRRL 181] gi|119407414|gb|EAW17363.1| conserved [Neosartorya fischeri NRRL 181]
  misc_feature (11)..(502): NCBI GI: 169762958 Blast Desc: [Aspergillus oryzae RIB40] gi|83770407|dbj|BAE60540.1| protein product [Aspergillus oryzae]
  misc_feature (8)..(502): NCBI GI: 115399392 Blast Desc: conserved [Aspergillus terreus NIH2624] gi|114192168|gb|EAU33868.1| conserved [Aspergillus terreus NIH2624]
  misc_feature (1)..(502): NCBI GI: 67524413 Blast Desc: AN2664.2 [Aspergillus nidulans FGSC A4] gi|40743882|gb|EAA63066.1| AN2664.2 [Aspergillus nidulans FGSC A4] gi|259486426|tpe|CBF84252.1| TPA: beta-glucanase, nidulans
  misc_feature (8)..(502): NCBI GI: 116205768 Blast Desc: CHGG_02177 [Chaetomium globosum CBS 148.51] gi|88182774|gb|EAQ90242.1| CHGG_02177 [Chaetomium globosum CBS 148.51]
  misc_feature (10)..(502): NCBI GI: 189197383 Blast Desc: galactan 1,3-beta-galactosidase [Pyrenophora tritici-repentis Pt-1C-BFP] gi|187980977|gb|EDU47603.1| galactan 1,3-beta-galactosidase [Pyrenophora tritici-repentis Pt-1C-BFP]
  misc_feature (7)..(502): NCBI GI: 255948380 Blast Desc: Pc22g09450 [Penicillium chrysogenum Wisconsin 54-1255] gi|211591974|emb|CAP98233.1| Pc22g09450 [Penicillium chrysogenum Wisconsin 54-1255]
  misc_feature (21)..(502): NCBI GI: 169621833 Blast Desc: SNOG_14129 [Phaeosphaeria nodorum SN15] gi|111057246|gb|EAT78366.1| SNOG_14129 [Phaeosphaeria nodorum SN15]
  misc_feature (8)..(502): NCBI GI: 261354007 Blast Desc: glycosyl hydrolase family 43 protein [Verticillium albo-atrum VaMs.102]
  misc_feature (12)..(502): NCBI GI: 256731616 Blast Desc: glycoside hydrolase family 43 [Nectria haematococca mpVI 77-13-4]
MRYIWYELSSLCLLLSKAYTKYIVPGARWTATDGSIISAHAGNVLFRNDTFWWFGEYKVEGQVEGGGVSVYSSPDLATWDFQGIALKPIEGSPYISPDSIIQRPKVVYSEPTGQYHMWWHADNSSYGLLLQGLATSTNIAGPYAFQNAIAPLGNWSQDFGIFTDYKDDRSYALYSNGDSVQGRDVYLTAYDKEVSSLTEVIHRFGKYDLEAPSIVQTEKSYYALMSHKTGYRPNNVVAFRADRLTGPWSQPWIIAPLNTRTFSSQSGFTLRIQGSKKTTYLYLGDQWDSNSLWESRYIWLPIAIDDDKKTLGLEWHDVYDLNIETGEWSPIQGRTYTSSDATTSGDSFKQEANFASDGVILTGIYGNDSTVTFHGIDGTGEPQWVSFYYQSNYSFPIFEQSHTTDVPLDTDDMGFGDQPGGSPDRIGGSFQLRRISSVVVNGNTTNVGTLYQRDTHKGIILSTPLLLTLAKGLNNTITIGGLYNGFDYKGADLDKIIVYPPET

SEQ ID NO: 5475 - DNA, 1047 bp, Muscodor strobelii
  misc_feature: SGI EST ID NO. CUFF.13858.0
  misc_feature: Variant of the nucleotide sequence at SEQ ID NO 5473
tagagatgtgtacttgaccgcatatgacaaagaggtctcttctttaacagaagtcatacaccgattcggcaagtatgacctagaagcgccatctatcgtgcagacagaaaagagctattatgcattgatgagccacaagactggataccgaccaaacaatgtcgttgctttccgagctgatcggttgactggtccatggtctcagccatggattatagctccgctcaatacaaggacattcagttcacagtccggttttaccctccgcatacagggcagcaaaaagacgacatatttataccttggtgaccaggtaggtctctacctcagcaggggctctgatgtggactgacaatacgtcttcagtgggactcgaactcgctgtgggaaagccggtacatatggcttcccattgccatagatgacgacaagaagactcttgggctcgaatggcacgatgtgtacgacttgaatattgaaactggagaatggtcaccgattcaaggtagaacttacacgagtagcgacgcgacaacgagtggggattcgttcaaacaagaagctaactttgccagcgatggagttatactgactggcatttatgggaatgatagtacagtgaccttccacggcatagatggaaccggcgagcctcaatgggtatcgttttattaccaaagtaactattcctttcccatattcgaacaaagtcacacaactgatgtgccattagataccgatgatatgggcttcggagaccaacgtaagcaaaccaactattcgctttcatgtggagtcttcttaacaattacactagctggtggaagccctgaccgcattggaggatcgttccagttgcgacggattagcagcgtcgtggtcaacggcaacacgacgaacgtcgggacactctaccagagggacactcacaaaggcatcatcctgtcgacacctcttcttctaacactagccaaaggtttgaacaacacgataactatcggcgggttatacaacggatttgactacaagggggctgaccttgacaaa

SEQ ID NO: 5476 - DNA, 1545 bp, Muscodor strobelii
  misc_feature: SGI cDNA ID NO. 561541
  misc_feature: Encodes the peptide sequence at SEQ ID NO 5477
atgctgaagaagttatatactgggacgtggtgccctgcgtgggttccggagtcaacattgacactatctgctctccttctcgtctgttcgaccgtccagtcttcgacggcaggctatgatggttctatgctcaatgggctcaatattctcccgtcgtatttggattatttccagcttacaccggcaactaccgggctaaacaccgcgtccgtttttattggaggtgcaatcggatccgtgatagcaggtttagttacagaccgactaggacgccgtcttgcaattttctggtcatccgtggttactttgattggtatcgttctccaggctgcggctcaaaatattgccatgtttgttatcgcccgtatactcttaggattcggtacgatcatctcaggcatcgccagcggtgtgtatttatccgagacttttgcaagtagatggcgagcctggggtgttgggcttttgaacgatttctactatgtcggggcattgatcgcggcaggaatcacgctggggactggacgctgggagtcaacgtgggcgtggcgagtcccctccctcttccagggcatattttccttattatccatagctattttgcctttcatccccgaaagtcccagatggttggttcatcgaggacatcttcagtcagcaatggagaccatagcagcgactaattctgacggtgatacaaatgaccctgtcgccatcgccgtatacaaggaaattgtaggcgcccttgagtgggagaagaaagaaggccgcactttgagcccgatggaaatcataaagacacccacagctcgaaaacgatttctaatcggcatgtcggctgctcctttttcttgcatcgcgggaaatatcatcgcgtcatattatctaggtgctgagcttacaaccgcaggaataactgattcgacggaacagcttgaagcgaatgttgttctgaatgtgtggtgtcttcttacctccctgattggcacacatcttatttcgagttgggggcggaaaccgactgctcttgcatctcagactctgttgatcatctcgctctttataattggcggtctcaccaaaaagtactctgataatcctgaccatgcacctcaaagtttgatttacggcgatgtagctgtgatgttcctcttccaagggttctactcgatcgcgtggactccattgttgtacctctaccctcctgaagtcatgaactacgcgatccgcgcaaatggacttgcattttccaacttaattctcaaccttttagctctggtgtttgtatatattatgccaattggacttgataacattggctggaaattgtatataattaacggatcgtgggatgtgattatattgatattgatagccgtttattggattgagaccagaggaaagactcttgaggaaattgatgccatcttcgaaggtcgaaaacactcgtcagtgcctgatgtggagaatatccgacaaggtaatgagaaattggattcggatctagtcgacgaggaactcgacaaccacgcaaaacttgcctga

SEQ ID NO: 5477 - protein, 514 aa, Muscodor strobelii
  misc_feature: SGI Peptide ID NO. 561541
  misc_feature (20)..(429): Pfam Id: PF07690 Pfam Desc: Major Facilitator Superfamily
  misc_feature (29)..(477): Pfam Id: PF00083 Pfam Desc: Sugar (and other) transporter
  misc_feature (49)..(429): Pfam Id: PF07690 Pfam Desc: Major Facilitator Superfamily
  misc_feature (1)..(507): NCBI GI: 212535042 Blast Desc: sugar transporter, [Penicillium marneffei ATCC 18224] gi|210070076|gb|EEA24166.1| sugar transporter, [Penicillium marneffei ATCC 18224]
  misc_feature (1)..(507): NCBI GI: 242791888 Blast Desc: hexose carrier protein, [Talaromyces stipitatus ATCC 10500] gi|218718434|gb|EED17854.1| hexose carrier protein, [Talaromyces stipitatus ATCC 10500]
  misc_feature (44)..(504): NCBI GI: 154303452 Blast Desc: BC1G_09297 [Botryotinia fuckeliana B05.10] gi|150854608|gb|EDN29800.1| BC1G_09297 [Botryotinia fuckeliana B05.10]
  misc_feature (12)..(512): NCBI GI: 256723709 Blast Desc: NECHADRAFT_86647 [Nectria haematococca mpVI 77-13-4]
  misc_feature (50)..(494): NCBI GI: 145614130 Blast Desc: MGG_08950 [Magnaporthe grisea 70-15] gi|145021092|gb|EDK05221.1| MGG_08950 [Magnaporthe grisea 70-15]
  misc_feature (24)..(512): NCBI GI: 169604985 Blast Desc: SNOG_05508 [Phaeosphaeria nodorum SN15] gi|160706681|gb|EAT86572.2| SNOG_05508 [Phaeosphaeria nodorum SN15]
  misc_feature (15)..(476): NCBI GI: 254564467 Blast Desc: hexose transporter [Pichia pastoris GS115] gi|238029140|emb|CAY67060.1| Hexose transporter with moderate affinity for glucose [Pichia pastoris GS115]
  misc_feature (10)..(479): NCBI GI: 256722159 Blast Desc: NECHADRAFT_98215 [Nectria haematococca mpVI 77-13-4]
  misc_feature (15)..(494): NCBI GI: 150866384 Blast Desc: xylose transporter [Pichia stipitis CBS 6054] gi|149387640|gb|ABN67933.2| xylose transporter [Pichia stipitis CBS 6054]
  misc_feature (12)..(505): NCBI GI: 254527774 Blast Desc: sugar transporter 1 [Candida intermedia]
MLKKLYTGTWCPAWVPESTLTLSALLLVCSTVQSSTAGYDGSMLNGLNILPSYLDYFQLTPATTGLNTASVFIGGAIGSVIAGLVTDRLGRRLAIFWSSVVTLIGIVLQAAAQNIAMFVIARILLGFGTIISGIASGVYLSETFASRWRAWGVGLLNDFYYVGALIAAGITLGTGRWESTWAWRVPSLFQGIFSLLSIAILPFIPESPRWLVHRGHLQSAMETIAATNSDGDTNDPVAIAVYKEIVGALEWEKKEGRTLSPMEIIKTPTARKRFLIGMSAAPFSCIAGNIIASYYLGAELTTAGITDSTEQLEANVVLNVWCLLTSLIGTHLISSWGRKPTALASQTLLIISLFIIGGLTKKYSDNPDHAPQSLIYGDVAVMFLFQGFYSIAWTPLLYLYPPEVMNYAIRANGLAFSNLILNLLALVFVYIMPIGLDNIGWKLYIINGSWDVIILILIAVYWIETRGKTLEEIDAIFEGRKHSSVPDVENIRQGNEKLDSDLVDEELDNHAKLA

SEQ ID NO: 5478 - DNA, 1084 bp, Muscodor strobelii
  misc_feature: SGI EST ID NO. CUFF.13864.0
  misc_feature: Variant of the nucleotide sequence at SEQ ID NO 5476
gaaaaatcgaaaaacttcgaacatttcaacatactatttgtgtttcatttctgttagagcatcaactaatctagaagtataggtgctgagcttacaaccgcaggaataactgattcgacggaacagcttgaagcgaatgttgttctgaatgtgtggtgtcttcttacctccctgattggcacacatcttatttcgagttgggggcggaaaccgactgctcttgcatctcagactctgttgatcatctcgctctttataattggcggtctcaccaaaaagtactctgataatcctgaccatgcacctcaaagtttgatttacggcgatgtagctgtgatgttcctcttccaagggttctactcgatcgcgtggactccattgttgtacctctaccctcctgaagtcatgaactacgcgatccgcgcaaatggacttgcattttccaacttaattctcaaccttttagctctggtgtttgtatatattatgccaattggacttgataacattggctggaaattgtatataattaacggatcgtgggatgtgattatattgatattgatagtaagctcccctctgtcccccaaatcatgtctttggagtcgcctagggcaattggttgatgagtctaggccgtttattggattgagaccagaggaaagactcttgaggaaattgatgccatcttcgaaggtcgaaaacactcgtcagtgcctgatgtggagaatatccgacaaggtaatgagaaattggattcggatctagtcgacgaggaactcgacaaccacgcaaaacttgcctgatacgcgcactctttactgagttggtagccaccacatgggtgtagtgcaacaatggacatcgaggcttaagcaatttcagtgttcgtggctcaaagtatctctctctagcctttcgcgggagatgggcaacggcgcaattcaacccaaattatattggcttcgtcagcgatgccaagccacaaaataaggcatttggctcgtcttgacactagtcgtcagtcatgcatataatttagtaggcagccagcataggtcctttgttgaatctaatgtctaag

SEQ ID NO: 5479 - DNA, 501 bp, Muscodor strobelii
  misc_feature: SGI cDNA ID NO. 561542
  misc_feature: Reduced expression when VOC is produced
  misc_feature: Encodes the peptide sequence at SEQ ID NO 5480
atggaagacacagttgtacggctctggcctaagatctctcgctcggaagatgatccacggcctgtcgtcgtgatgacgtgtggtattgcaggttcgggaaagtcgacactatccaagactatcgtgtcgatgcatccaaatttcgatcgcatatcaggcgacggaatagtggctgagaaacacggtatctatggcgtggactatgcaccggagatgtattcagattatctagacgaagcatggagcgaaagcaaatcacgactggcgcgaatcttgacgcaacacagagcaaaagacgtggttctcgatcgggcgttttggagcaaggaatacagggatgaagcaaaatccctcattgcgagcttgcaaggtcgatgggtgctggtctatctcaaagcaccatccaaagagaccctttggcagcgcatacaggcaaggaggaaggcggagcttaatgcagattcggcatatgagatcactgaagacattctagcaatgtaa

SEQ ID NO: 5480 - protein, 166 aa, Muscodor strobelii
  misc_feature: SGI Peptide ID NO. 561542
  misc_feature (3)..(164): NCBI GI: 119473571 Blast Desc: NFIA_001100 [Neosartorya fischeri NRRL 181] gi|119406814|gb|EAW16764.1| conserved [Neosartorya fischeri NRRL 181]
  misc_feature (3)..(164): NCBI GI: 70985735 Blast Desc: ATP/GTP-binding protein [Aspergillus fumigatus Af293] gi|66846002|gb|EAL86335.1| ATP/GTP-binding protein, [Aspergillus fumigatus Af293] gi|159128492|gb|EDP53607.1| ATP/GTP-binding
  misc_feature (1)..(159): NCBI GI: 256728287 Blast Desc: NECHADRAFT_87569 [Nectria haematococca mpVI 77-13-4]
  misc_feature (21)..(165): NCBI GI: 38049259 Blast Desc: ATP/GTP binding protein [Enterococcus faecium]
  misc_feature (32)..(164): NCBI GI: 238504600 Blast Desc: ATP/GTP-binding protein, [Aspergillus flavus NRRL3357] gi|220691002|gb|EED47351.1| ATP/GTP-binding protein, [Aspergillus flavus NRRL3357]
  misc_feature (20)..(164): NCBI GI: 66812536 Blast Desc: DDB_G0281831 [Dictyostelium discoideum AX4] gi|60468471|gb|EAL66475.1| DDB_G0281831 [Dictyostelium discoideum AX4]
  misc_feature (23)..(164): NCBI GI: 257874883 Blast Desc: conserved [Enterococcus casseliflavus EC20] gi|257809049|gb|EEV37869.1| conserved [Enterococcus casseliflavus EC20]
  misc_feature (23)..(164): NCBI GI: 257865283 Blast Desc: conserved [Enterococcus casseliflavus EC30] gi|257871611|ref|ZP_05651264.1| conserved [Enterococcus casseliflavus EC10] gi|257799217|gb|EEV28269.1| conserved EC30]
  misc_feature (12)..(164): NCBI GI: 223985710 Blast Desc: HOLDEFILI_03063 [Holdemania filiformis DSM 12042] gi|223962321|gb|EEF66786.1| HOLDEFILI_03063 [Holdemania filiformis DSM 12042]
  misc_feature (21)..(153): NCBI GI: 254376186 Blast Desc: conserved [Streptomyces sp. SPB74] gi|197696002|gb|EDY42935.1| conserved [Streptomyces sp. SPB74]
  misc_feature: Useful for introducing or modulating the production of volatile compounds
MEDTVVRLWPKISRSEDDPRPVVVMTCGIAGSGKSTLSKTIVSMHPNFDRISGDGIVAEKHGIYGVDYAPEMYSDYLDEAWSESKSRLARILTQHRAKDVVLDRAFWSKEYRDEAKSLIASLQGRWVLVYLKAPSKETLWQRIQARRKAELNADSAYEITEDILAM

SEQ ID NO: 5481 - DNA, 1141 bp, Muscodor strobelii
  misc_feature: SGI EST ID NO. CUFF.13873.1
  misc_feature: Variant of the nucleotide sequence at SEQ ID NO 5479
caattcaatatgacaaagtgctctatggataatatcatgatggaagacacagttgtacggctctggcctaagatctctcgctcggaagatgatccacggcctgtcgtcgtgatgacgtgtggtattgcaggttcgggaaagtcgacactatccaagactatcgtgtcgatgcatccaaatttcgatcgcatatcaggcgacggaatagtggctgagaaacacggtatctatggcgtggactatgcaccggagatgtattcagattatctagacgaagcatggagcgaaagcaaatcacgactggcgcgaatcttgacgcaacacagagcaaaagacgtggttctcgatcgggcgttttggagcaaggaatacagggatgaagcaaaatccctcattgcgagcttgcaaggtcgatgggtgctggtctatctcaaagcaccatccaaagagaccctttggcagcgcatacaggcaaggaggaaggcggagcttaatgcagattcggcatatgagatcactgaagacattctagcaatgtaagtgatataacctgtcaaatatcagaagccaatcctttgtcttgaacccgcggccctgcaggggaaaatcgcgaaaaataactaacgcaataccttcccggctaccaggtattgtgatggattcgaagaaccgattaatgaaggggagatagttgttcatacgaccagcaagaataacgcctagtctgatactcactcgggatagatcgcgatttgctcaaagatatggctattgtatagtgaatgcacaggttaggtgtctcagacattgaggtctgagtagacgaatacgaaattgaggttcacaatgaacagagcacacggaacggcggcagactcgttagtcaagaaatgatgcttgatgtgtatctacctcgcttcaacaaatattcattgcttttatgttcgcgcacttatctgaactagatgaaagacacatagacgacttcaatgacaaccgagacctgaagatgttgaagaccctcgtccacctctttatgttcgggacacagttacatcttatgccagccgatggcatttacatcgtgcgacagaaagatagtgctggcgatattcgagcgctgacagatggaaatacttct

SEQ ID NO: 5482 - DNA, 546 bp, Muscodor strobelii
  misc_feature: SGI cDNA ID NO. 561543
  misc_feature: Encodes the peptide sequence at SEQ ID NO 5483
atggggcaattcaatatgacaaagtgctctatggataatatcatgatggaagacacagttgtacggctctggcctaagatctctcgctcggaagatgatccacggcctgtcgtcgtgatgacgtgtggtattgcaggttcgggaaagtcgacactatccaagactatcgtgtcgatgcatccaaatttcgatcgcatatcaggcgacggaatagtggctgagaaacacggtatctatggcgtggactatgcaccggagatgtattcagattatctagacgaagcatggagcgaaagcaaatcacgactggcgcgaatcttgacgcaacacagagcaaaagacgtggttctcgatcgggcgttttggagcaaggaatacagggatgaagcaaaatccctcattgcgagcttgcaaggtcgatgggtgctggtctatctcaaagcaccatccaaagagaccctttggcagcgcatacaggcaaggaggaaggcggagcttaatgcagattcggcatatgagatcactgaagacattctagcaatgtaa

SEQ ID NO: 5483 - protein, 181 aa, Muscodor strobelii
  misc_feature: SGI Peptide ID NO. 561543
  misc_feature (18)..(179): NCBI GI: 119473571 Blast Desc: NFIA_001100 [Neosartorya fischeri NRRL 181] gi|119406814|gb|EAW16764.1| conserved [Neosartorya fischeri NRRL 181]
  misc_feature (18)..(179): NCBI GI: 70985735 Blast Desc: ATP/GTP-binding protein [Aspergillus fumigatus Af293] gi|66846002|gb|EAL86335.1| ATP/GTP-binding protein, [Aspergillus fumigatus Af293] gi|159128492|gb|EDP53607.1| ATP/GTP-binding
  misc_feature (16)..(174): NCBI GI: 256728287 Blast Desc: NECHADRAFT_87569 [Nectria haematococca mpVI 77-13-4]
  misc_feature (36)..(180): NCBI GI: 38049259 Blast Desc: ATP/GTP binding protein [Enterococcus faecium]
  misc_feature (47)..(179): NCBI GI: 238504600 Blast Desc: ATP/GTP-binding protein, [Aspergillus flavus NRRL3357] gi|220691002|gb|EED47351.1| ATP/GTP-binding protein, [Aspergillus flavus NRRL3357]
  misc_feature (35)..(179): NCBI GI: 66812536 Blast Desc: DDB_G0281831 [Dictyostelium discoideum AX4] gi|60468471|gb|EAL66475.1| DDB_G0281831 [Dictyostelium discoideum AX4]
  misc_feature (38)..(179): NCBI GI: 257874883 Blast Desc: conserved [Enterococcus casseliflavus EC20] gi|257809049|gb|EEV37869.1| conserved [Enterococcus casseliflavus EC20]
  misc_feature (38)..(179): NCBI GI: 257865283 Blast Desc: conserved [Enterococcus casseliflavus EC30] gi|257871611|ref|ZP_05651264.1| conserved [Enterococcus casseliflavus EC10] gi|257799217|gb|EEV28269.1| conserved EC30]
  misc_feature (27)..(179): NCBI GI: 223985710 Blast Desc: HOLDEFILI_03063 [Holdemania filiformis DSM 12042] gi|223962321|gb|EEF66786.1| HOLDEFILI_03063 [Holdemania filiformis DSM 12042]
  misc_feature (36)..(168): NCBI GI: 254376186 Blast Desc: conserved [Streptomyces sp. SPB74] gi|197696002|gb|EDY42935.1| conserved [Streptomyces sp. SPB74]
MGQFNMTKCSMDNIMMEDTVVRLWPKISRSEDDPRPVVVMTCGIAGSGKSTLSKTIVSMHPNFDRISGDGIVAEKHGIYGVDYAPEMYSDYLDEAWSESKSRLARILTQHRAKDVVLDRAFWSKEYRDEAKSLIASLQGRWVLVYLKAPSKETLWQRIQARRKAELNADSAYEITEDILAM

SEQ ID NO: 5484 - DNA, 1141 bp, Muscodor strobelii; identical to SEQ ID NO: 5481
  misc_feature: SGI EST ID NO. CUFF.13873.1
  misc_feature: Variant of the nucleotide sequence at SEQ ID NO 5482

SEQ ID NO: 5485 - DNA, 2055 bp, Muscodor strobelii
  misc_feature: SGI cDNA ID NO. 561544
  misc_feature: Encodes the peptide sequence at SEQ ID NO 5486
atggcgaataccgaaaacttagacctgccaattgcccttcgacgcacgcctcgccacgcttgtagtgccgtggtaacgcaaattgcaccgccccctgctcctacgacaactaccatcacgaaaacaccaagcaaaacgcgtaccaagaaacgggttcgcttctcagaccccggccctgatctctcaccatccaaggatgctacctctccatctactacgggtcttaccccgatggtgaaacgatcatctttgggcgaaccatctccgaagcggcgccgttactctgtacatgccggatcagagatagcccctgaaaatgccgatatacaaactagtctcatcgatcgtgtaaagcggcgaattcgccgcgttggttctaatgagaagatatcctcgagcgaaaccagtaagacaagcacgccaaagcggacaaatacacgcaaaactcggagtgcagaggagatagcagctgctcaggctgagatcgagcgacttcgtgcagagcttctagagcgcgatgccgagattgagcgtctgcatgatactacagtagttcaagacactgaacgtatctttgagcttgagcagcaagtccagacgttacgtagtgagcttgctcaaaagcagaattctgaggccgagaacccgtttgtagtcgaggcgggcgataagcgcgatgaggacatatcgcgtagcttctacgactggacattggccgcacgggatcctttctctgacacattcatggacgaggacgaaggtttcggagacgtttacatgcctgatactgagaaagaggctctgcaggccgagctaggatcgttaaggctcgagctcaccaagttaacggatgcactggagtctcacgcagcatttcagaaacgcctttctgacaagctttccgatgcggattcggtctttactgaaactgaggttgaggaggatgccacggcttctggcatagaaaaacatttcgatgcagttctacagacattatcggatcatacagccgcgctcctcgatctagacacctctcttgggtcactgggctttccaggaaccgatagtagagagataatagcctcaattgtagcgcaattccgctccgcgcgcctagagctagagtatctcaccccaggagagatcccgctacctctactgtcatgtggcgcggaggtactggacctcctccttacccgtctgcgtgatttctcacgcaaagcgcaagaagatgaagatactatagatgaataccattctctagagctatctttacgtcagcaactcggcgctcgcgttgatgcaatgaacgacttgagaaaggacgttgaagaacacgaggcgtcgttgcgtgaacgtgatgaccgcatctcggagcttgagatagggctcgatcgactgaaaggcgcggctgaaggctatcgtcgagacatcgtcgagcttgagactcttgttgaacgcctcgaagagaacacccaatcgggcgatgctaaaatccaagctgagcttagtagtgtgcagacccagcttgccgaacgcacacttgctgttgcagatctcgaagcaaagctctcggccactctggctgaggcagaggacttgcgaacacagctcctggccctgcagagacgcaaggacgctgagaccaaggtccgtaacaaatctaacgccgcggcactcgcgcttcgagatgcgcgtgttgccgagttgaggcgcgagatctatggggttaatgatagtctgcgtcgagcacacgaaacgatccaaaaattacgtgtcgcaaatggcagtctcgagcgagagattgatgagaccgagaagaacgcaaaaaacaccatcgatgcattaaaggctgagctggaaaaggtcgttgcagactctgtaccgaagcgaataacaagatcttcgtcaagtggaggaaaatcagttttagggacgccaggatcttatctttctggtgatctagcacgatcaggggctgggaagaaaagaaggcggtatgatagcgggttggggttccttgatgaagaggaggatgaactcgagctcgcatga

SEQ ID NO: 5486 - protein, 684 aa, Muscodor strobelii
  misc_feature: SGI Peptide ID NO. 561544
  misc_feature (5)..(681): NCBI GI: 256728853 Blast Desc: NECHADRAFT_93219 [Nectria haematococca mpVI 77-13-4]
  misc_feature (5)..(681): NCBI GI: 46138927 Blast Desc: FG10978.1 [Gibberella zeae PH-1]
  misc_feature (70)..(678): NCBI GI: 145608076 Blast Desc: MGG_03396 [Magnaporthe grisea 70-15] gi|145015587|gb|EDK00077.1| MGG_03396 [Magnaporthe grisea 70-15]
  misc_feature (8)..(674): NCBI GI: 156039675 Blast Desc: SS1G_11974 [Sclerotinia sclerotiorum 1980] gi|154697711|gb|EDN97449.1| SS1G_11974 [Sclerotinia sclerotiorum 1980]
  misc_feature (4)..(574): NCBI GI: 154295190 Blast Desc: BC1G_13538 [Botryotinia fuckeliana B05.10] gi|150844221|gb|EDN19414.1| BC1G_13538 [Botryotinia fuckeliana B05.10]
  misc_feature (260)..(439): NCBI GI: 116203947 Blast Desc: CHGG_09857 [Chaetomium globosum CBS 148.51] gi|88175985|gb|EAQ83453.1| CHGG_09857 [Chaetomium globosum CBS 148.51]
  misc_feature (8)..(255): NCBI GI: 171681515 Blast Desc: protein product [Podospora anserina] gi|170940716|emb|CAP65944.1| protein product [Podospora anserina]
  misc_feature (2)..(252): NCBI GI: 116203947 Blast Desc: CHGG_09857 [Chaetomium globosum CBS 148.51] gi|88175985|gb|EAQ83453.1| CHGG_09857 [Chaetomium globosum CBS 148.51]
  misc_feature (22)..(674): NCBI GI: 115390725 Blast Desc: conserved [Aspergillus terreus NIH2624] gi|114193791|gb|EAU35491.1| conserved [Aspergillus terreus NIH2624]
  misc_feature (16)..(678): NCBI GI: 238839966 Blast Desc: conserved [Microsporum canis CBS 113480]
MANTENLDLPIALRRTPRHACSAVVTQIAPPPAPTTTTITKTPSKTRTKKRVRFSDPGPDLSPSKDATSPSTTGLTPMVKRSSLGEPSPKRRRYSVHAGSEIAPENADIQTSLIDRVKRRIRRVGSNEKISSSETSKTSTPKRTNTRKTRSAEEIAAAQAEIERLRAELLERDAEIERLHDTTVVQDTERIFELEQQVQTLRSELAQKQNSEAENPFVVEAGDKRDEDISRSFYDWTLAARDPFSDTFMDEDEGFGDVYMPDTEKEALQAELGSLRLELTKLTDALESHAAFQKRLSDKLSDADSVFTETEVEEDATASGIEKHFDAVLQTLSDHTAALLDLDTSLGSLGFPGTDSREIIASIVAQFRSARLELEYLTPGEIPLPLLSCGAEVLDLLLTRLRDFSRKAQEDEDTIDEYHSLELSLRQQLGARVDAMNDLRKDVEEHEASLRERDDRISELEIGLDRLKGAAEGYRRDIVELETLVERLEENTQSGDAKIQAELSSVQTQLAERTLAVADLEAKLSATLAEAEDLRTQLLALQRRKDAETKVRNKSNAAALALRDARVAELRREIYGVNDSLRRAHETIQKLRVANGSLEREIDETEKNAKNTIDALKAELEKVVADSVPKRITRSSSSGGKSVLGTPGSYLSGDLARSGAGKKRRRYDSGLGFLDEEEDELELA

SEQ ID NO: 5487 - DNA, 924 bp, Muscodor strobelii
  misc_feature: SGI cDNA ID NO. 561545
  misc_feature: Encodes the peptide sequence at SEQ ID NO 5488
atggagtctgtcagtcagcctgctgccaataacatgaatcccggcggcacagctgccattcaagatgctgctgatcgcgaccaggccgagaccgatatgggaccccgagtctttcacctctaccctaagctacccacagagttgaaggcaatggtttgggagttcgcatttctggagctcttccccggtgcacactgcttcaagctatcaaccgacccaaaggatgaccgtatgatcacggtcaaacctgacaacgaccaaaagaacgacccctctgcttggcgacatataaaccacttattccaagtctgcgacattccaaacttcttccagaagcggctgatcgagcgtggtctaactctttaccacgactctcattccagacaccgggtcaagacagaggagaatggaatccaagccaatgtcagcggacagagtgatctcattcgattcaagttctactacggcgactctcaggcctcgctttcgatgattgagtctatcaattatcagcctgccttcaatggcatcacacgggtcggtgttgagcttgaccaagttcgctgtttcccaggcttgggggggcaacccagatatcggcccttccgttgccaatgcgtgtccctcggacaacaacgcagtcatatccgacttggacctccgctacagacaaagccgaacttcatttgctgcggggctatcatcaaatttgcttgcctcttcaagactctcaaatcgttctacatcatcgtcaaccttaaggccgaggccatttgttttgacaaactggccatccctgacggcaaggagctgctcaaggtcaatcccaaaggcttgggtactcagcttgcccttgacatcttcgtgcaccacaatggtatgtgcccatcatatgtttctggtgtcgttgctcacatgtggtga

SEQ ID NO: 5488 - protein, 307 aa, Muscodor strobelii
  misc_feature: SGI Peptide ID NO. 561545
MESVSQPAANNMNPGGTAAIQDAADRDQAETDMGPRVFHLYPKLPTELKAMVWEFAFLELFPGAHCFKLSTDPKDDRMITVKPDNDQKNDPSAWRHINHLFQVCDIPNFFQKRLIERGLTLYHDSHSRHRVKTEENGIQANVSGQSDLIRFKFYYGDSQASLSMIESINYQPAFNGITRVGVELDQVRCFPGLGGQPRYRPFRCQCVSLGQQRSHIRLGPPLQTKPNFICCGAIIKFACLFKTLKSFYIIVNLKAEAICFDKLAIPDGKELLKVNPKGLGTQLALDIFVHHNGMCPSYVSGVVAHMW

SEQ ID NO: 5489 - DNA, 392 bp, Muscodor strobelii
  misc_feature: SGI EST ID NO. CUFF.13896.0
  misc_feature: Variant of the nucleotide sequence at SEQ ID NO 5487
tgacggcaaggagctgctcaaggtcaatcccaaaggcttgggtactcagcttgcccttgacatcttcgtgcaccacaatggtatgtgcccatcatatgtttctggtgtcgttgctcacatgtggtgattcagagattgcaaagtctaccggtcgagatatctttcacgacagacgtggaacctattgccagattgaaaccacccgaggaggagaggtcgacccctgtcgaggtctttgtatcccagagaataaacaagttcattttactctcagagagctacgtaagatgtggattagagagcgacagcgtaaggcccagcggccctgcgttgaattcaaggccctggcgttttgcgatctgcgtaatgctgaagggtccaatggagagcgg

SEQ ID NO: 5490 - DNA, 1869 bp, Muscodor strobelii
  misc_feature: SGI cDNA ID NO. 561546
  misc_feature: Reduced expression when VOC is produced
  misc_feature: Encodes the peptide sequence at SEQ ID NO 5491
atgttggaatggatggacgacagcatcgtgcgcgagttcgagacgatcgcggacggttccaagaaagtcaatggtgctgcagggaacaacaagcagagcaaagaggcggggccattcgactttagattcctccgcttgttggacaggaccgggcaggtagacaaggttgtcgagcgcgaaccagttggtgacgcgactactggaaaagtcatcatcgccagcgatgccagcctggaatggggattttccaagaatgtgctcaagaagctggcccaagaccccgagaacatggttattctgaccgagtcgccggccccggcttcgtctactcgaccatcactcgctcgaactctgtgggactggtggaaagaaagacaagagagctccaacgaggaagaggatagtggggacttctctcgagaagtcgaaattacaaattcgcggaggcaagcacttgagggcaatgatctttcgcggtaccagcagtggcttgctcagcagcgtcagctccagacgactttgcagggaacgggcgcaaccacgctcgaggcagctggcgacgtagctgacgacgtctctgagtcatcatccgagtccgaagactctgaagacgagcagcagggcagggctctgaacgcggctacgacacttggccaggtcggacggaagaaagctgctctgaccgacgaagatttgggcgtcaatgtgatactgaaaaagaaaggcgttcatgatttcgatatccgcaacaagaagggtcgagaccgcatgttcccacaccccgttcggcggaaacggaacgatgactatggtgaactcatccggccagaagactttttgcgagccgaagaaagggaagatgaagggggtgacatcgaccaacgtggcaagaacgatgggcgcgacagtctagggaagaagcgcaaatgggaggaaacagctgcggccaaccaaacccctggatctcaaactaccaagcgaccagctcttacaagaaacatcaccgatgacctcgaattcgtcatggccaaggatgccgtggacgacgagctcgacgcaatccccgatgacacggacgaagaggtcctgggtccagctaggctggtcgtctcaacagaacgcttgacggtgaagttgaaaattgacttcatcgatctcagcggcatccatgataaacgcagtctccacatgttaatacccctgattcaacctcggaaactcatcctgatcggcggtaacgaaaaagacactatgactttagcttctgattgcaaaaagctcatggtggaaggctccttcgacatctatacccccagtatcggtgccatgattgatgccagtgtggacaccaacgcctgggtcgtcaagctcgcgccgccactagtgaagcaactcaagtggcagagtgtacgcggactgggcattgccaccgtgacaggtcaacttctcgctatccagaagcagcttggcttggttcctgatgagcaggcggcaaacaaacgtgtaaagactgagacaccacaaccagaggacggagcagaggtgccagtggaaccaacactggacatcctgccctcgaatatggtatcggctactcgtgcggtggcccagccactacatgttggtgatctacgtctagcggatctgaggaaggcaatgcagcaatccggccacacagccgagttccgaggcgagggtacgctgctcatcgacggctcggtggtggtgaagaagacgacgacgggtcgtattgatgtggagagtgtcggcctgcccacagatgctgggccgatgacacaattcggtgggacattttatgctgtgaagcgcacgatttacgagaatttggctgtggtggcgggtgcatag

SEQ ID NO: 5491 - protein, 622 aa, Muscodor strobelii
  misc_feature: SGI Peptide ID NO. 561546
  misc_feature (373)..(415): Pfam Id: PF07521 Pfam Desc: RNA-metabolising metallo-beta-lactamase
  misc_feature (373)..(410): Pfam Id: PF07521 Pfam Desc: RNA-metabolising metallo-beta-lactamase
  misc_feature (1)..(622): NCBI GI: 46138561 Blast Desc: FG10795.1 [Gibberella zeae PH-1]
  misc_feature (1)..(622): NCBI GI: 156042700 Blast Desc: SS1G_11148 [Sclerotinia sclerotiorum 1980] gi|154695534|gb|EDN95272.1| SS1G_11148 [Sclerotinia sclerotiorum 1980]
  misc_feature (1)..(622): NCBI GI: 116203607 Blast Desc: CHGG_09687 [Chaetomium globosum CBS 148.51] gi|88175815|gb|EAQ83283.1| CHGG_09687 [Chaetomium globosum CBS 148.51]
  misc_feature (1)..(622): NCBI GI: 39977335 Blast Desc: MGG_06570 [Magnaporthe grisea 70-15] gi|145015989|gb|EDK00479.1| MGG_06570 [Magnaporthe grisea 70-15]
  misc_feature (1)..(578): NCBI GI: 154292337 Blast Desc: BC1G_14624 [Botryotinia fuckeliana B05.10] gi|150846199|gb|EDN21392.1| BC1G_14624 [Botryotinia fuckeliana B05.10]
  misc_feature (1)..(622): NCBI GI: 164424681 Blast Desc: NCU06869 [Neurospora crassa OR74A] gi|157070616|gb|EAA28842.2| conserved [Neurospora crassa OR74A]
  misc_feature (1)..(622): NCBI GI: 171679503 Blast Desc: protein product [Podospora anserina] gi|170939377|emb|CAP64605.1| protein product [Podospora anserina]
  misc_feature (1)..(621): NCBI GI: 169767492 Blast Desc: [Aspergillus oryzae RIB40] gi|83766072|dbj|BAE56215.1| protein product [Aspergillus oryzae]
  misc_feature (1)..(622): NCBI GI: 67525249 Blast Desc: AN3082.2 [Aspergillus nidulans FGSC A4] gi|40744477|gb|EAA63653.1| AN3082.2 [Aspergillus nidulans FGSC A4] gi|259485970|tpe|CBF83440.1| TPA: cleavage and specificity
  misc_feature (1)..(621): NCBI GI: 121705410 Blast Desc: cleavage and polyadenylylation specificity factor, [Aspergillus clavatus NRRL 1] gi|119399114|gb|EAW09542.1| cleavage and polyadenylylation specificity factor, [Aspergillus
  misc_feature: Useful for introducing or modulating the production of volatile compounds
MLEWMDDSIVREFETIADGSKKVNGAAGNNKQSKEAGPFDFRFLRLLDRTGQVDKVVEREPVGDATTGKVIIASDASLEWGFSKNVLKKLAQDPENMVILTESPAPASSTRPSLARTLWDWWKERQESSNEEEDSGDFSREVEITNSRRQALEGNDLSRYQQWLAQQRQLQTTLQGTGATTLEAAGDVADDVSESSSESEDSEDEQQGRALNAATTLGQVGRKKAALTDEDLGVNVILKKKGVHDFDIRNKKGRDRMFPHPVRRKRNDDYGELIRPEDFLRAEEREDEGGDIDQRGKNDGRDSLGKKRKWEETAAANQTPGSQTTKRPALTRNITDDLEFVMAKDAVDDELDAIPDDTDEEVLGPARLVVSTERLTVKLKIDFIDLSGIHDKRSLHMLIPLIQPRKLILIGGNEKDTMTLASDCKKLMVEGSFDIYTPSIGAMIDASVDTNAWVVKLAPPLVKQLKWQSVRGLGIATVTGQLLAIQKQLGLVPDEQAANKRVKTETPQPEDGAEVPVEPTLDILPSNMVSATRAVAQPLHVGDLRLADLRKAMQQSGHTAEFRGEGTLLIDGSVVVKKTTTGRIDVESVGLPTDAGPMTQFGGTFYAVKRTIYENLAVVAGA

SEQ ID NO: 5492 - DNA, 2185 bp, Muscodor strobelii
  misc_feature: SGI EST ID NO. CUFF.13899.0
  misc_feature: Variant of the nucleotide sequence at SEQ ID NO 5490
catgttggaatggatggacgacagcatcgtgcgcgagttcgagacgatcgcggacggttccaagaaagtcaatggtgctgcagggaacaacaagcagagcaaagaggcggggccattcgactttagattcctccgcttgttggacaggaccgggcaggtagacaaggttgtcgagcgcgaaccagttggtgacgcgactactggaaaagtcatcatcgccagcgatgccagcctggaatggggattttccaagaatgtgctcaagaagctggcccaagaccccgagaacatggttattctgaccgagtcgccggccccggcttcgtctactcgaccatcactcgctcgaactctgtgggactggtggaaagaaagacaagagagctccaacgaggaagaggatagtggggacttctctcgagaagtcgaaattacaaattcgcggaggcaagcacttgagggcaatgatctttcgcggtaccagcagtggcttgctcagcagcgtcagctccagacgactttgcagggaacgggcgcaaccacgctcgaggcagctggcgacgtagctgacgacgtctctgagtcatcatccgagtccgaagactctgaagacgagcagcagggcagggctctgaacgcggctacgacacttggccaggtcggacggaagaaagctgctctgaccgacgaagatttgggcgtcaatgtgatactgaaaaagaaaggcgttcatgatttcgatatccgcaacaagaagggtcgagaccgcatgttcccacaccccgttcggcggaaacggaacgatgactatggtgaactcatccggccagaagactttttgcgagccgaagaaagggaagatgaagggggtgacatcgaccaacgtggcaagaacgatgggcgcgacagtctagggaagaagcgcaaatgggaggaaacagctgcggccaaccaaacccctggatctcaaactaccaagcgaccagctcttacaagaaacatcaccgatgacctcgaattcgtcatggccaaggatgccgtggacgacgagctcgacgcaatccccgatgacacggacgaagaggtcctgggtccagctaggctggtcgtctcaacagaacgcttgacggtgaagttgaaaattgacttcatcgatctcagcggcatccatgataaacgcagtctccacatgttaatacccctgattcaacctcggaaactcatcctgatcggcggtaacgaaaaagacactatgactttagcttctgattgcaaaaagctcatggtggaaggctccttcgacatctatacccccagtatcggtgccatgattgatgccagtgtggacaccaacgcctgggtcgtcaagctcgcgccgccactagtgaagcaactcaagtggcagagtgtacgcggactgggcattgccaccgtgacaggtcaacttctcgctatccagaagcagcttggcttggttcctgatgagcaggcggcaaacaaacgtgtaaagactgagacaccacaaccagaggacggagcagaggtgccagtggaaccaacactggacatcctgccctcgaatatggtatcggctactcgtgcggtggcccagccactacatgttggtgatctacgtctagcggatctgaggaaggcaatgcagcaatccggccacacagccgagttccgaggcgagggtacgctgctcatcgacggctcggtggtggtgaagaagacgacgacgggtcgtattgatgtggagagtgtcggcctgcccacagatgctgggccgatgacacaattcggtgggacattttatgctgtgaagcgcacgatttacgagaatttggctgtggtggcgggtgcatagaggactgatgaggatataatcatgtaccactatgtagaacatggatgtttcacaatcagaacgacaggatttctgatttgcacacattggtgtttcatttatttattccgtgaacatggacgtgtatggaactcatgtagatctctttctctactaatggcgatttgtacttggcttgttgaattgagttgaacctcggaaggattatagtaggaaaatcaatcagggtctgaatggtctacgactgaaaattcaaatcccaatgcaagctcagccaataaatattccatatgaaattgaaggtgaattagctag

SEQ ID NO: 5493 - DNA, 621 bp, Muscodor strobelii
  misc_feature: SGI cDNA ID NO. 561547
  misc_feature: Encodes the peptide sequence at SEQ ID NO 5494
atgacaacagagggctatgaactacactttgggctgaattaccttggtcatgccttgcttgcaagacttcttgtgcctaggctgcaacagacagcgcagtcattcggcgatgactcaaagtcatcacaaggttctactcccagtagtcgggatgtccgcattgtggttgtctcaagcgaaggtcatgctgttgcacccaaagagggcatccgctatgacagcttgaagacctcatgtgctgagatgtcttatgcccaacgttacggacagagcaaactagcacttatcggtctaacgagaggcctcgctagccgctaccccgaaataaagtcagctgcggtccacccgggccgagtgcttactggtatggccgagtcattgaagaaagagagttttcttgcacgtgtgacgattcctattgcgccgctcttttgtgtacctgtcgttgtagggatacagaatcatctatgggctgctacaagccgagacatggtcagtggtgtatactacgagcccgttggtgtcgccgcaacgccctcgaaggctgcccaggatgataacatgccggatctactttgggagtggacgagcaccgagctgaaaggccgtgatgttgcttga

SEQ ID NO: 5494 - protein, 206 aa, Muscodor strobelii
  misc_feature: SGI Peptide ID NO. 561547
  misc_feature (2)..(200): NCBI GI: 119490106 Blast Desc: NFIA_062320 [Neosartorya fischeri NRRL 181] gi|119411128|gb|EAW21071.1| NFIA_062320 [Neosartorya fischeri NRRL 181]
  misc_feature (1)..(204): NCBI GI: 255953377 Blast Desc: Pc21g03920 [Penicillium chrysogenum Wisconsin 54-1255] gi|211589152|emb|CAP95289.1| Pc21g03920 [Penicillium chrysogenum Wisconsin 54-1255]
  misc_feature (1)..(201): NCBI GI: 145246022 Blast Desc: An12g01730 [Aspergillus niger] gi|134079972|emb|CAK48456.1| protein product [Aspergillus niger]
  misc_feature (1)..(205): NCBI GI: 256731896 Blast Desc: [Nectria haematococca mpVI 77-13-4]
  misc_feature (1)..(205): NCBI GI: 261205394 Blast Desc: short-chain dehydrogenase/reductase [Ajellomyces dermatitidis SLH14081] gi|239592493|gb|EEQ75074.1| short-chain dehydrogenase/reductase [Ajellomyces dermatitidis SLH14081]
  misc_feature (1)..(205): NCBI GI: 239611352 Blast Desc: short-chain dehydrogenase/reductase [Ajellomyces dermatitidis ER-3]
  misc_feature (2)..(201): NCBI GI: 119479297 Blast Desc: short-chain dehydrogenase/reductase, [Neosartorya fischeri NRRL 181] gi|119407831|gb|EAW17780.1| short-chain dehydrogenase/reductase, [Neosartorya fischeri NRRL 181]
  misc_feature (2)..(200): NCBI GI: 169612976 Blast Desc: SNOG_09616 [Phaeosphaeria nodorum SN15] gi|160702620|gb|EAT82881.2| SNOG_09616 [Phaeosphaeria nodorum SN15]
  misc_feature (1)..(201): NCBI GI: 115399782 Blast Desc: conserved [Aspergillus terreus NIH2624] gi|114191146|gb|EAU32846.1| conserved [Aspergillus terreus NIH2624]
  misc_feature (1)..(201): NCBI GI: 256731918 Blast Desc: NECHADRAFT_41149 [Nectria haematococca mpVI 77-13-4]
MTTEGYELHFGLNYLGHALLARLLVPRLQQTAQSFGDDSKSSQGSTPSSRDVRIVVVSSEGHAVAPKEGIRYDSLKTSCAEMSYAQRYGQSKLALIGLTRGLASRYPEIKSAAVHPGRVLTGMAESLKKESFLARVTIPIAPLFCVPVVVGIQNHLWAATSRDMVSGVYYEPVGVAATPSKAAQDDNMPDLLWEWTSTELKGRDVA

SEQ ID NO: 5495 - DNA, 348 bp, Muscodor strobelii
  misc_feature: SGI cDNA ID NO. 561548
  misc_feature: Encodes the peptide sequence at SEQ ID NO 5496
atgaatcaagtcgccatcatcactgccttgtgtttaatcgcctttgccttcagtatggttgagtttcgtgaaatgcttcgagtcacattgtttgggtcgagtaacaaagcgtcgtcagatggcaaacattttgagcctcggcgcgacattccctctttggctgacaaagtcatcctgatcacaggcgctgcaggcgatctaggcagacagaccgccatcgagcttgcacgacacggacggccggcaaagatctatatagcagatcttattgaccgtgtcataaacgaagcatacaacggtcgagaagacgactcctctaaacggagcattgtgcggtttatcaattag

SEQ ID NO: 5496 - protein, 115 aa, Muscodor strobelii
  misc_feature: SGI Peptide ID NO. 561548
  misc_feature (56)..(79): Pfam Id: PF00106 Pfam Desc: short chain dehydrogenase
  misc_feature (19)..(115): NCBI GI: 119490106 Blast Desc: NFIA_062320 [Neosartorya fischeri NRRL 181] gi|119411128|gb|EAW21071.1| NFIA_062320 [Neosartorya fischeri NRRL 181]
  misc_feature (19)..(89): NCBI GI: 115401510 Blast Desc: [Aspergillus terreus NIH2624] gi|114190284|gb|EAU31984.1| [Aspergillus terreus NIH2624]
  misc_feature (44)..(87): NCBI GI: 67527870 Blast Desc: AN4184.2 [Aspergillus nidulans FGSC A4] gi|40740093|gb|EAA59283.1| AN4184.2 [Aspergillus nidulans FGSC A4]
  misc_feature (44)..(87): NCBI GI: 259481216 Blast Desc: TPA: short-chain dehydrogenase/reductase family protein, (AFU_orthologue; AFUA_6G02770) [Aspergillus nidulans FGSC A4]
  misc_feature (43)..(87): NCBI GI: 39968045 Blast Desc: MGG_02115 [Magnaporthe grisea 70-15] gi|145012997|gb|EDJ97638.1| MGG_02115 [Magnaporthe grisea 70-15]
  misc_feature (44)..(86): NCBI GI: 46105170 Blast Desc: FG00213.1 [Gibberella zeae PH-1]
  misc_feature (38)..(87): NCBI GI: 145246022 Blast Desc: An12g01730 [Aspergillus niger] gi|134079972|emb|CAK48456.1| protein product [Aspergillus niger]
  misc_feature (41)..(87): NCBI GI: 238842418 Blast Desc: oxidoreductase [Microsporum canis CBS 113480]
  misc_feature (44)..(99): NCBI GI: 256731896 Blast Desc: [Nectria haematococca mpVI 77-13-4]
  misc_feature (41)..(87): NCBI GI: 169785867 Blast Desc: [Aspergillus oryzae RIB40] gi|238506775|ref|XP_002384589.1| short-chain dehydrogenase, [Aspergillus flavus NRRL3357] gi|83776142|dbj|BAE66261.1| protein
MNQVAIITALCLIAFAFSMVEFREMLRVTLFGSSNKASSDGKHFEPRRDIPSLADKVILITGAAGDLGRQTAIELARHGRPAKIYIADLIDRVINEAYNGREDDSSKRSIVRFIN

SEQ ID NO: 5497 - DNA, 875 bp, Muscodor strobelii
  misc_feature: SGI EST ID NO. CUFF.13914.0
  misc_feature: Variant of the nucleotide sequence at SEQ ID NO 5495
tatggaatgagtagcattagctgcaattgcctagattgacattatgtatcaaactttatcgaagcggtatgcctaccgttgatcaacgcactcgcgcgtattccattatcgtcaatcagtgacagatgatttgtggaagcggttcgtatattccaatgtgaactcttgttggtcttattctttacccctaactcttctttgttccatgcatcgtgttagagaactactatatcaaattcaatccttattgctggcggtgcatctgcgtacgtaggtataaggcgccatcaacatatcagactttgccgatctactacagttggttgtcttagcgatgtccaaaagaaacagttgactcgtcatgaagtgtggtaaattgggctctggctgagtgtgcggaagaatcgctgcctctatgggccgaacggcgccaattctctccatctatttatagctacgtgacttgtaccaaaggtttgctgtggttccagcgatgcggctggtcccgttgggtggttaggtcatccgagcatgctccgttgtttttctgggttcctcatcccttgccatgcctccaacaacatcagttcatacacctgtcatcacttctccaaaacaatgttcccgttctttgcaacatgaatcaagtcgccatcatcactgccttgtgtttaatcgcctttgccttcagtatggttgagtttcgtgaaatgcttcgagtcacattgtttgggtcgagtaacaaagcgtcgtcagatggcaaacattttgagcctcggcgcgacattccctctttggctgacaaagtcatcctgatcacaggcgctgcaggcgatctaggcagacagaccgccatcgagcttgcacgacacgga

SEQ ID NO: 5498 - DNA, 4197 bp, Muscodor strobelii
  misc_feature: SGI cDNA ID NO. 561549
  misc_feature: Reduced expression when VOC is produced
  misc_feature: Encodes the peptide sequence at SEQ ID NO 5499
atgctcaacccgcagcctcagggtggttggggtgctggcgcaaccaccactgctgctcccaaccccttcacctcagcaactcctcaagccggcaatccttttgtcgctcccctcagcaatccctttgcccagctcggcaaacctggaactcaaaataatggtgcaagcccattccctgctaatacatcggccaataacccttttgctacggccctgaagcaatctgcatctccttcaacatcggcacagccaaacggaagctccaccgctgcgaatcctttcctccaaactccgaaagcagcaaccagtgctcccagtttcgggcagcccgcaagctttggccagcccgcaaatggcacatcgtttggggcaaatggtacgaagaaggttgccgaatttatcaaaccagcatggcccaaggcctcagacgcagcgaattcgtcgacgaccgagacgacgatagccaagacgacaaagggaaactccaatctgaaaatggtgccaaatggcaaacctgtatccactcccaccggcttatctgcaaagcgcaagccagccattggctctgctcagccgtcgaaaccgaaaccgatgcggaagaatcaggagaaccacgatggccgagcgactgaccttgcccgccagatcaaacagcaacttgccaaagaccggatcaccccgcccaagtggcctgccaaccccggtcgttctgagcagcgcaaggcgatggaatctttcagagagtcatatcggatatatcgagaaaaggctaggaagtccctcatacgggccgagctgatcgacgacccagatgcacggcgaacattgcagcaggcccttgacttccgaggtatttcggaggacatgtgtccggaatgggaggccatcacacgtattgtcgagttcgacatcaggaaaccagagaggatggcggaggattccggagaactggttgcagttccatcgatcatggtcaaacggcttgctcgatcggctgctggtcaagatgcacctttgcctatggatgtccgttcctttgcgactttgcgacggaccctcgactatctaatcgatgacttggtcccctcagacgacgaacttgccctcaagcacaacttcctctgggatcgaacccgagccatccggatcgacttgtcagtccaaaaatataacctcacgccggatgagaggaccgatctgatttactgtttggaaactattgctcgtttccacgtcacttccttacatctgctgtctcaggatggagtcgctagtgaggacttctccgaacaacaggagattgagcagttagggaagacgctcatgtcattgaaggagctttacgacgactgtgtcgagcaaggcatcgactgcgccaacgaagccgaattccgtggatactacgtcgtgttcaatgctcataacccctctatcagggagaccgttgagagctggggacttcgcatgtggaattcagatggaatccggacggccatgtgcttagtcgagtctatccagaacacctggagtattcaagggcctttgacgccgtacgcgtccactaatctggccctcgatgctgctgctgtgttcttttccattgtcgctaaacctcaaatttcgtacacaatggcttgctttgccgagatccatttcaacagcgttcgcagggccatgttgcagattattcgaaagtcatattatcgaccccgagaagggcccaaggacattacacctcaatatctcaaagatcgactgcgtttcgactcggaggaacaggcagtccattttgcaggaatacatggctttgagtttggctgggaaggatccaacagatacgcgatcctaaatactcggcaggtcatccccgacgcccgtgttcgtcatgccttttcccagagtattgttgagcgtaagcgctctggacgttctcttcccaatgttatacacaagaccgtttatgagatttcatcgactgagccaactcaaccggatgctgaggaggaagagagcttatttgttagccagtctgatgatgtgcccccggaaactcttagcgactcctcgcaacagaacagcaaccagcctataatccccatagcgactgccgcaacaaccaagtcatcggctgattcatctcaacaatcccaagtttcacaggcacctacggttgtttcgactcttgaaaaggccgtgccagcgacgggatcacaagcttcgtctttaacaagccctggtccaggtcctctcgcgccagttgaccagactcaaacccagccgaagagtattcttggagccccacagagccttgagtcgtcgaaaccagcaacggttgccaatgacaatatcgtccaggcccaagggagttcatggtttccaaaagccagcacaggaacggaacacactaatggatcaactgcccccagtcaggacaacacctctagtatattctcctttctcaacgcaaagtcccaagaatccaattcgatgcagccacaaacaaccccgagtatattctcttcattgggttcatcaagcgttacacctgatccggcgacgacaaaacccatcttcacatttcctcggccagcgactgagaatcagagcgcgtccggccctgctagtgatcccgcacattctgcgagcgtgctgttcccctccaatgcatcttctgcaacccagtctcaaagcaaggctgccgtgaatggagacgctgcctcacttttccaacaatctccgtccttcgcattgggatccaatcttggtgtaccccctaccgatacgaagtccaatagtgatgcacagttaccgacgatacccgcaccaccgactcaggcttctgacagtggacccaggaatacaatgctcaacatggtctcaagctcagccacttctcctgcttctgcccctgcgaagaaggactcaatgggtgacttcgtgcgatggtatgttctagccgatcgaggattaatgcaggatcaccttgaggagttcatgattgaacatatgctacatggtctatgggaagacttccaaatagcggaacaagagcgacttcagagggaagcggatgaaaagttagaggcagaagccaggtctctccgtcatcgcaatctccaacttaaatactactatcgctgggttgatacctttcgcagacagcgcgttgtcaagcgaattcggatggagaaagagaaggctcgcaaatggaggtcggccgaacaggcagccgagcgagaatcggctgcaaagactaaaaaggaacaggaagttgaggaagccaagcagctcatggagaggagggttaagagacgggcgtttgaaaatgacaagcggagagaatctattcaatcgcgggatagtctcgaggatgctctgcttgcgacgagagtgttcgacggcgtccgggacgaacgagccgctgtgcgaaatgcactccggaacgataacaacgattctgagagcgctataacccctgcatctctgattcgcttgagaaccgaaaatcaacgccgacggacccgaggcttaccacctctcaaacgtttccctgaacccttaatcgtaaaggaaggtaccaaaacagccaagcttcgtgctctttcgagtggcgctggccgagactcgatgtccatgtcaactggaagccttcgaaactcgacattcagttccagctatcgctcaagccttgggtacaatcaaagccgtgttgccaagcctcgggcctccaccacggacccatattggcgattgaaggccaatggactagtactaatgccgaatggggagtacctacacgagtctttggcgttacccatgctgcgagagggaaaacgattccctgggctaggagactatggcctgccaccgcggagctctcccagccactctcctcctgacgcggctgatgctgatatcatgcgaaacttcatgtcgcctacgccggaacatggaagaagtagactggccagtagatccccgtcagtcgttgatggggtcatgcaaaaacgcaagcgcattcatgccgatgacgacgatttaaccgcctatcgaagcgagccgcctgccagtcggaaacggccgaagagtgcaaacctaagcggagtagctagcccaagtgaagacgacgacttccttgcaagcatccaaaacctcctgactagggttgaagctgtgaccgactctgcagcttcctag

SEQ ID NO: 5499 - protein, 1398 aa, Muscodor strobelii
  misc_feature: SGI Peptide ID NO. 561549
  misc_feature (336)..(588): Pfam Id: PF03399 Pfam Desc: SAC3/GANP/Nin1/mts3/eIF-3 p25 family
  misc_feature (336)..(469): Pfam Id: PF03399 Pfam Desc: SAC3/GANP/Nin1/mts3/eIF-3 p25 family
  misc_feature (529)..(588): Pfam Id: PF03399 Pfam Desc: SAC3/GANP/Nin1/mts3/eIF-3 p25 family
  misc_feature (213)..(1346): NCBI GI: 256730972 Blast Desc: NECHADRAFT_49588 [Nectria haematococca mpVI 77-13-4]
  misc_feature (21)..(1323): NCBI GI: 116206692 Blast Desc: CHGG_02639 [Chaetomium globosum CBS 148.51] gi|88183236|gb|EAQ90704.1| CHGG_02639 [Chaetomium globosum CBS 148.51]
  misc_feature (213)..(1360): NCBI GI: 46125637 Blast Desc: FG07196.1 [Gibberella zeae PH-1]
  misc_feature (215)..(1281): NCBI GI: 85099645 Blast Desc: NCU01288 [Neurospora crassa OR74A] gi|28922351|gb|EAA31589.1| NCU01288 [Neurospora crassa OR74A] gi|28950088|emb|CAD70851.1| related to leucine permease regulator
  misc_feature (213)..(655): NCBI GI: 261351653 Blast Desc: 80 kD MCM3-associated protein [Verticillium albo-atrum VaMs.102]
  misc_feature (30)..(676): NCBI GI: 171692271 Blast Desc: protein product [Podospora anserina] gi|170946084|emb|CAP72885.1| protein product [Podospora anserina]
  misc_feature (209)..(1284): NCBI GI: 156048186 Blast Desc: SS1G_08824 [Sclerotinia sclerotiorum 1980] gi|154693221|gb|EDN92959.1| SS1G_08824 [Sclerotinia sclerotiorum 1980]
  misc_feature (19)..(1375): NCBI GI: 145609343 Blast Desc: MGG_07523 [Magnaporthe grisea 70-15] gi|145016720|gb|EDK01150.1| MGG_07523 [Magnaporthe grisea 70-15]
  misc_feature (79)..(674): NCBI GI: 154302971 Blast Desc: BC1G_09229 [Botryotinia fuckeliana B05.10] gi|150855153|gb|EDN30345.1| BC1G_09229 [Botryotinia fuckeliana B05.10]
  misc_feature (114)..(875): NCBI GI: 145235253 Blast Desc: An03g03940 [Aspergillus niger] gi|134057956|emb|CAK47833.1| protein product [Aspergillus niger]
  misc_feature: Useful for introducing or modulating the production of volatile compounds
MLNPQPQGGWGAGATTTAAPNPFTSATPQAGNPFVAPLSNPFAQLGKPGTQNNGASPFPANTSANNPFATALKQSASPSTSAQPNGSSTAANPFLQTPKAATSAPSFGQPASFGQPANGTSFGANGTKKVAEFIKPAWPKASDAANSSTTETTIAKTTKGNSNLKMVPNGKPVSTPTGLSAKRKPAIGSAQPSKPKPMRKNQENHDGRATDLARQIKQQLAKDRITPPKWPANPGRSEQRKAMESFRESYRIYREKARKSLIRAELIDDPDARRTLQQALDFRGISEDMCPEWEAITRIVEFDIRKPERMAEDSGELVAVPSIMVKRLARSAAGQDAPLPMDVRSFATLRRTLDYLIDDLVPSDDELALKHNFLWDRTRAIRIDLSVQKYNLTPDERTDLIYCLETIARFHVTSLHLLSQDGVASEDFSEQQEIEQLGKTLMSLKELYDDCVEQGIDCANEAEFRGYYVVFNAHNPSIRETVESWGLRMWNSDGIRTAMCLVESIQNTWSIQGPLTPYASTNLALDAAAVFFSIVAKPQISYTMACFAEIHFNSVRRAMLQIIRKSYYRPREGPKDITPQYLKDRLRFDSEEQAVHFAGIHGFEFGWEGSNRYAILNTRQVIPDARVRHAFSQSIVERKRSGRSLPNVIHKTVYEISSTEPTQPDAEEEESLFVSQSDDVPPETLSDSSQQNSNQPIIPIATAATTKSSADSSQQSQVSQAPTVVSTLEKAVPATGSQASSLTSPGPGPLAPVDQTQTQPKSILGAPQSLESSKPATVANDNIVQAQGSSWFPKASTGTEHTNGSTAPSQDNTSSIFSFLNAKSQESNSMQPQTTPSIFSSLGSSSVTPDPATTKPIFTFPRPATENQSASGPASDPAHSASVLFPSNASSATQSQSKAAVNGDAASLFQQSPSFALGSNLGVPPTDTKSNSDAQLPTIPAPPTQASDSGPRNTMLNMVSSSATSPASAPAKKDSMGDFVRWYVLADRGLMQDHLEEFMIEHMLHGLWEDFQIAEQERLQREADEKLEAEARSLRHRNLQLKYYYRWVDTFRRQRVVKRIRMEKEKARKWRSAEQAAERESAAKTKKEQEVEEAKQLMERRVKRRAFENDKRRESIQSRDSLEDALLATRVFDGVRDERAAVRNALRNDNNDSESAITPASLIRLRTENQRRRTRGLPPLKRFPEPLIVKEGTKTAKLRALSSGAGRDSMSMSTGSLRNSTFSSSYRSSLGYNQSRVAKPRASTTDPYWRLKANGLVLMPNGEYLHESLALPMLREGKRFPGLGDYGLPPRSSPSHSPPDAADADIMRNFMSPTPEHGRSRLASRSPSVVDGVMQKRKRIHADDDDLTAYRSEPPASRKRPKSANLSGVASPSEDDDFLASIQNLLTRVEAVTDSAAS

SEQ ID NO: 5500 - DNA, 5085 bp, Muscodor strobelii
  misc_feature: SGI EST ID NO. CUFF.14003.1
  misc_feature: Variant of the nucleotide sequence at SEQ ID NO 5498
ctaagacgccgacgagaagcaacaccaccgaacaaggcggcgccagcagaagaaccacgcaccactccacaacacacgttctcaacccatctcttccacgccttcacacacaacaaccacctgcgactgcgtctgctactgtgctgcgtctgcatctaccatctgtcatcttgcatctttccgcccaaactcgcattccccatctcgagagcaccactaaaagcgctccgactttccttcaactcaccgcggcatctcttgactcctccaactcaatcaccaccatcgccgcccatcagcctctcactacatccgtgctccagctctcaatccgccggccatcaccactgcaagcgtcatcatcagtcttctctgcagctctcgctctatctcgacatccatgagcgcccttcgcgagtgaggcgccatgctcaacccgcagcctcagggtggttggggtgctggcgcaaccaccactgctgctcccaaccccttcacctcagcaactcctcaagccggcaatccttttgtcgctcccctcagcaatccctttgcccagctcggcaaacctggaactcaaaataatggtgcaagcccattccctgctaatacatcggccaataacccttttgctacggccctgaagcaatctgcatctccttcaacatcggcacagccaaacggaagctccaccgctgcgaatcctttcctccaaactccgaaagcagcaaccagtgctcccagtttcgggcagcccgcaagctttggccagcccgcaaatggcacatcgtttggggcaaatggtacgaagaaggttgccgaatttatcaaaccagcatggcccaaggcctcagacgcagcgaattcgtcgacgaccgagacgacgatagccaagacgacaaagggaaactccaatctgaaaatggtgccaaatggcaaacctgtatccactcccaccggcttatctgcaaagcgcaagccagccattggctctgctcagccgtcgaaaccgaaaccgatgcggaagaatcaggagaaccacgatggccgagcgactgaccttgcccgccagatcaaacagcaacttgccaaagaccggatcaccccgcccaagtggcctgccaaccccggtcgttctgagcagcgcaaggcgatggaatctttcagagagtcatatcggatatatcgagaaaaggctaggaagtccctcatacgggccgagctgatcgacgacccagatgcacggcgaacattgcagcaggcccttgacttccgaggtatttcggaggacatgtgtccggaatgggaggccatcacacgtattgtcgagttcgacatcaggaaaccagagaggatggcggaggattccggagaactggttgcagttccatcgatcatggtcaaacggcttgctcgatcggctgctggtcaagatgcacctttgcctatggatgtccgttcctttgcgactttgcgacggaccctcgactatctaatcgatgacttggtcccctcagacgacgaacttgccctcaagcacaacttcctctgggatcgaacccgagccatccggatcgacttgtcagtccaaaaatataacctcacgccggatgagaggaccgatctgatttactgtttggaaactattgctcgtttccacgtcacttccttacatctgctgtctcaggatggagtcgctagtgaggacttctccgaacaacaggagattgagcagttagggaagacgctcatgtcattgaaggagctttacgacgactgtgtcgagcaaggcatcgactgcgccaacgaagccgaattccgtggatactacgtcgtgttcaatgctcataacccctctatcagggagaccgttgagagctggggacttcgcatgtggaattcagatggaatccggacggccatgtgcttagtcgagtctatccagaacacctggagtattcaagggcctttgacgccgtacgcgtccactaatctggccctcgatgctgctgctgtgttcttttccattgtcgctaaacctcaaatttcgtacacaatggcttgctttgccgagatccatttcaacagcgttcgcagggccatgttgcagattattcgaaagtcatattatcgaccccgagaagggcccaaggacattacacctcaatatctcaaagatcgactgcgtttcgactcggaggaacaggcagtccattttgcaggaatacatggctttgagtttggctgggaaggatccaacagatacgcgatcctaaatactcggcaggtcatccccgacgcccgtgttcgtcatgccttttcccagagtattgttgagcgtaagcgctctggacgttctcttcccaatgttatacacaagaccgtttatgagatttcatcgactgagccaactcaaccggatgctgaggaggaagagagcttatttgttagccagtctgatgatgtgcccccggaaactcttagcgactcctcgcaacagaacagcaaccagcctataatccccatagcgactgccgcaacaaccaagtcatcggctgattcatctcaacaatcccaagtttcacaggcacctacggttgtttcgactcttgaaaaggccgtgccagcgacgggatcacaagcttcgtctttaacaagccctggtccaggtcctctcgcgccagttgaccagactcaaacccagccgaagagtattcttggagccccacagagccttgagtcgtcgaaaccagcaacggttgccaatgacaatatcgtccaggcccaagggagttcatggtttccaaaagccagcacaggaacggaacacactaatggatcaactgcccccagtcaggacaacacctctagtatattctcctttctcaacgcaaagtcccaagaatccaattcgatgcagccacaaacaaccccgagtatattctcttcattgggttcatcaagcgttacacctgatccggcgacgacaaaacccatcttcacatttcctcggccagcgactgagaatcagagcgcgtccggccctgctagtgatcccgcacattctgcgagcgtgctgttcccctccaatgcatcttctgcaacccagtctcaaagcaaggctgccgtgaatggagacgctgcctcacttttccaacaatctccgtccttcgcattgggatccaatcttggtgtaccccctaccgatacgaagtccaatagtgatgcacagttaccgacgatacccgcaccaccgactcaggcttctgacagtggacccaggaatacaatgctcaacatggtctcaagctcagccacttctcctgcttctgcccctgcgaagaaggactcaatgggtgacttcgtgcgatggtatgttctagccgatcgaggattaatgcaggatcaccttgaggagttcatgattgaacatatgctacatggtctatgggaagacttccaaatagcggaacaagagcgacttcagagggaagcggatgaaaagttagaggcagaagccaggtctctccgtcatcgcaatctccaacttaaatactactatcgctgggttgatacctttcgcagacagcgcgttgtcaagcgaattcggatggagaaagagaaggctcgcaaatggaggtcggccgaacaggcagccgagcgagaatcggctgcaaagactaaaaaggaacaggaagttgaggaagccaagcagctcatggagaggagggttaagagacgggcgtttgaaaatgacaagcggagagaatctattcaatcgcgggatagtctcgaggatgctctgcttgcgacgagagtgttcgacggcgtccgggacgaacgagccgctgtgcgaaatgcactccggaacgataacaacgattctgagagcgctataacccctgcatctctgattcgcttgagaaccgaaaatcaacgccgacggacccgaggcttaccacctctcaaacgtttccctgaacccttaatcgtaaaggaaggtaccaaaacagccaagcttcgtgctctttcgagtggcgctggccgagactcgatgtccatgtcaactggaagccttcgaaactcgacattcagttccagctatcgctcaagccttgggtacaatcaaagccgtgttgccaagcctcgggcctccaccacggacccatattggcgattgaaggccaatggactagtactaatgccgaatggggagtacctacacgagtctttggcgttacccatgctgcgagagggaaaacgattccctgggctaggagactatggcctgccaccgcggagctctcccagccactctcctcctgacgcggctgatgctgatatcatgcgaaacttcatgtcgcctacgccggaacatggaagaagtagactggccagtagatccccgtcagtcgttgatggggtcatgcaaaaacgcaagcgcattcatgccgatgacgacgatttaaccgcctatcgaagcgagccgcctgccagtcggaaacggccgaagagtgcaaacctaagcggagtagctagcccaagtgaagacgacgacttccttgcaagcatccaaaacctcctgactagggttgaagctgtgaccgactctgcagcttcctaggcactattatacaatcaacataccagacgaagacagaagagtttcccaacccgtcaacagcccgtggtgcattgactcgtggcattgatctctttaaggacaggaataattgcattggtcggcgttcatgtatgatcaaactcgaatcaggggcgacgttacaagctctgtattgatcacaagtggcattaaggaacatattttcgtgaaagggatattgtacataggagatgataggcgtttttggggccggattttctgctttttgttttctttttcttaaggtcaacttcattcggaggaaggaggcagtgttctgccacgatatcgttcatgatgatacccaagcgaaataggatgatccggggataagaggggaggttcagatagatacctacgagagcacagcaatcaaaccgattttgtgccgaagcttcagcttcggcacacgctctcagcat

SEQ ID NO: 5501 - DNA, 1332 bp, Muscodor strobelii
  misc_feature: SGI cDNA ID NO. 561550
  misc_feature: Encodes the peptide sequence at SEQ ID NO 5502
atggccttcttcgaggacccccgccttcgccagcgctggaaccgaatctcccagaccaccgagaccgtaaccgagtcagccgccgccgggatctggtcctttggccacaactacatcaccccatgcctcggctccgtcggctccgcattcgacagctgcactgccctctgtctgggcgaccgtgaagagcgcgcccgacgagcgagagagcgccagcgcacgcgagggagggccgagttcagcttcgatttctacgatgactgggacgaggagttcggcgagcaagatggaggaggattactaggcggatggagaggcgaggactgggatcgattggttggtggctctcggaagagcactggcgaagtgacagaccaacccaggactaggaaccgagcgatgagttatggcacaagaggcacacggaggagggctagcatccacgaagatccaaccatcatccccagcacctcggcccttggattcttaggtcgtcttcccttcaagattggtggaacactgcgatacaagcccagcgcagccgatctacaggagcacccggggtctatgaagcatgcgacagaaggcgaacgagcaccactgctgggcggcagtgatgatgagtacgaagtgcttcctcagactatgccgacacagtctaggaagcggagtggcacgaccggcagtggagataccagcgactcataccggtcccgaggcgacttgttccccagtgatgaagaaggggacgaggatgctgtacctctagatgacgaattcagcattgcgctagatcatcatgacgatcgctcaagtagccggacgaagagtagcaaagggaagcgcatagcacaataccgcgtttcacggagcgaatcaaggacaactatagattctgcaagaccttccctacggcgtgatacgtattcgacctcagatccgcctagtccggctattcttccaccgccgtcactcgaggacttggaaagagaggagttgcgactcgagctagaggaagaagaagaggttgagaagaaacgacagtcggctgcggaacttgccctccaccgtggattgagtatggagaatctccagatcgaagccgttccggatgtgaagtcggaaattgtcgaggtcacgaatataccagctccacagtctgcaatcctcgacgacgtgaggaatatcaccagcacagaagttgagacggcggccccaacggaagtagacactggagcctcgagggacgaatctcggcccccgactttgttatcgtctcaggcatcgacgaaggacgattttgttccggcgcggctgcctcacttccgctga

SEQ ID NO: 5502 - protein, 443 aa, Muscodor strobelii
  misc_feature: SGI Peptide ID NO. 561550
  misc_feature (1)..(442): NCBI GI: 46123081 Blast Desc: FG05918.1 [Gibberella zeae PH-1]
  misc_feature (1)..(443): NCBI GI: 256731144 Blast Desc: NECHADRAFT_105388 [Nectria haematococca mpVI 77-13-4]
  misc_feature (3)..(443): NCBI GI: 156042870 Blast Desc: SS1G_11234 [Sclerotinia sclerotiorum 1980] gi|154695619|gb|EDN95357.1| SS1G_11234 [Sclerotinia sclerotiorum 1980]
  misc_feature (3)..(362): NCBI GI: 154313454 Blast Desc: BC1G_05424 [Botryotinia fuckeliana B05.10] gi|150849493|gb|EDN24686.1| BC1G_05424 [Botryotinia fuckeliana B05.10]
  misc_feature (1)..(442): NCBI GI: 171692177 Blast Desc: protein product [Podospora anserina] gi|170946037|emb|CAP72838.1| protein product [Podospora anserina]
  misc_feature (1)..(442): NCBI GI: 85099310 Blast Desc: NCU01274 [Neurospora crassa OR74A] gi|28922273|gb|EAA31516.1| [Neurospora crassa OR74A] gi|38566811|emb|CAE76119.1| [Neurospora crassa]
  misc_feature (102)..(359): NCBI GI: 145606252 Blast Desc: MGG_11908 [Magnaporthe grisea 70-15] gi|145013959|gb|EDJ98600.1| MGG_11908 [Magnaporthe grisea 70-15]
  misc_feature (6)..(359): NCBI GI: 255936305 Blast Desc: Pc13g07490 [Penicillium chrysogenum Wisconsin 54-1255] gi|211583799|emb|CAP91818.1| Pc13g07490 [Penicillium chrysogenum Wisconsin 54-1255]
  misc_feature (101)..(443): NCBI GI: 261355499 Blast Desc: conserved [Verticillium albo-atrum VaMs.102]
  misc_feature (12)..(442): NCBI GI: 189205419 Blast Desc: conserved [Pyrenophora tritici-repentis Pt-1C-BFP] gi|187975137|gb|EDU41763.1| conserved [Pyrenophora tritici-repentis Pt-1C-BFP]
MAFFEDPRLRQRWNRISQTTETVTESAAAGIWSFGHNYITPCLGSVGSAFDSCTALCLGDREERARRARERQRTRGRAEFSFDFYDDWDEEFGEQDGGGLLGGWRGEDWDRLVGGSRKSTGEVTDQPRTRNRAMSYGTRGTRRRASIHEDPTIIPSTSALGFLGRLPFKIGGTLRYKPSAADLQEHPGSMKHATEGERAPLLGGSDDEYEVLPQTMPTQSRKRSGTTGSGDTSDSYRSRGDLFPSDEEGDEDAVPLDDEFSIALDHHDDRSSSRTKSSKGKRIAQYRVSRSESRTTIDSARPSLRRDTYSTSDPPSPAILPPPSLEDLEREELRLELEEEEEVEKKRQSAAELALHRGLSMENLQIEAVPDVKSEIVEVTNIPAPQSAILDDVRNITSTEVETAAPTEVDTGASRDESRPPTLLSSQASTKDDFVPARLPHFR

SEQ ID NO: 5503 - DNA, 4354 bp, Muscodor strobelii
  misc_feature: SGI EST ID NO. CUFF.13929.0
  misc_feature: Variant of the nucleotide sequence at SEQ ID NO 5501
gtacgctgcagcatttgtttcaccgtagtataatgggtcgcttgtgaggcttcaagtcttgctttcactagatgtcttgttcctggaatctgcggaaatagcctcctgccggcaggcgtcgatcacttgacctaagcaatgaatgcatgcatgagcccatttggaattccctagcctcaaccgcccaaacttagtaccacgtcgtcccaaactacccaaaagctccaattcttatcagcctgtcgcaaatctggcacttgaaaccaaacaacgcttctcgactttcaataacaggacagatatttgacgattgcgctactggtttttaagcgagcacaccttggtgcctcacccctggagactggcagatgcattcatcagcctattttttacatctgccgcctttccgtcgcaatactcaaccagccctacagccctatccgtcagccgacattaggcatctctctacggctttgcacccaccgctgtcgccatcgggaacatcgactggagcatcgacccattgaaagcctgtttcacatcgaagtcgccattcttcctgagacatctctattcatgggcggcccgagatggccttcttcgaggacccccgccttcgccagcgctggaaccgaatctcccagaccaccgagaccgtaaccgagtcagccgccgccgggatctggtcctttggccacaactacatcaccccatgcctcggctccgtcggctccgcattcgacagctgcactgccctctgtctgggcgaccgtgaagagcgcgcccgacgagcgagagagcgccagcgcacgcgagggagggccgagttcagcttcgatttctacgatgactgggacgaggagttcggcgagcaagatggaggaggattactaggcggatggagaggcgaggactgggatcgattggttggtggctctcggaagagcactggcgaagtgacagaccaacccaggactaggaaccgagcgatgagttatggcacaagaggcacacggaggagggctagcatccacgaagatccaaccatcatccccagcacctcggcccttggattcttaggtcgtcttcccttcaagattggtggaacactgcgatacaagcccagcgcagccgatctacaggagcacccggggtctatgaagcatgcgacagaaggcgaacgagcaccactgctgggcggcagtgatgatgagtacgaagtgcttcctcagactatgccgacacagtctaggaagcggagtggcacgaccggcagtggagataccagcgactcataccggtcccgaggcgacttgttccccagtgatgaagaaggggacgaggatgctgtacctctagatgacgaattcagcattgcgctagatcatcatgacgatcgctcaagtagccggacgaagagtagcaaagggaagcgcatagcacaataccgcgtttcacggagcgaatcaaggacaactatagattctgcaagaccttccctacggcgtgatacgtattcgacctcagatccgcctagtccggctattcttccaccgccgtcactcgaggacttggaaagagaggagttgcgactcgagctagaggaagaagaagaggttgagaagaaacgacagtcggctgcggaacttgccctccaccgtggattgagtatggagaatctccagatcgaagccgttccggatgtgaagtcggaaattgtcgaggtcacgaatataccagctccacagtctgcaatcctcgacgacgtgaggaatatcaccagcacagaagttgagacggcggccccaacggaagtagacactggagcctcgagggacgaatctcggcccccgactttgttatcgtctcaggcatcgacgaaggacgattttgttccggcgcggctgcctcacttccgctgatcacaggtttcaagtggtgaagactttgaacctttcaatctgtatactatagcgacggcgtcccgggcatagggatctgtgttttagggaaatgaatgataccggctcacgggcctatgaattggaagattcttgctttcgatgatatttcatgacttgcgatgtgagacttgactgatttgctgcgaggctggccactatccagtcggcgaggtgtgactttgatatctcactgatgaacacacacaaaccatgagcacattcaagtcgatcccagatttattctcctcaagatcaaacccggactactcaggcaagacagctcatatccaacccccctccttcccatccaactcaacgcaatgattatgataatgcaacacactactcttactcatatcctccaccaactcttcaccatcaaacacaatctcaacaataacatatggtctttctctaccctcaagaccagcataatggaatgtcttccaccctgcccctgcccaccctgaccctagccccccatcaccaatgatatgcgttctcgcggcaacgatgcaatgccccatatgatcataatgttcccacttctcacttctagtctcgaatggccagtcctgtacagccatgtcgtagtataacggggaaggcgaccggacaagatgacataaccatcgacattcctgccctacatacgtctgcgccagataaacaccaactctcctcaacgaattcgaattctgagggagagtcctctcagtgctcatcgtaagattcgtatcagtccgcatgatatcggtaccgtccccccactcctcaaaaaccaccataccctgtctaaatggatacttacttcccggtgtatacgcaggcgtaaaaagagaagtctccatctccagggcatctctggggtaactttcgacgactctccatccttttaagcttcgcgggaaagtaagcatgaaactaaatttctggatcgattcgtcgccaaatcctcggatcagactatcgagttctacgccgaaggctgggtagacgcgtgtgaagtatgttattagatagggggttacggtggtggttgttagatccccgatctcgtgctgaaacccggatttggcttcttgcaggggttttttgattaggtatgttgggtggcgcgcgcgcatgaatgtgttgtcttttccgaataatgggagacagatttggaggaggcgctccccgtgtgcggtgtcgatctcgaaacagtttagtactgcgatcacccagtatggtgataatgtctttatgagtggtgttgagagagataatccgacgtttgttagttggaagggaggtgttatcttagatttgaaggttggtaggatggaaccgcagtttcggaagagagatggggagtgtgctatgatggagtcgtgggatagtatggtgtcgaaggctaggatgctgtggtcgtcggatgacttgatgatttcttcttggagtcggcggaatgctttagaaccttcgccgtagagaaggggcatgttgatgttgaatattcctaggaggctgtatgcgatgtcttcttctcgcgttgttgatctgtctgccgcccaagacatacgttgtgcgatgctgtattctcggagtcgcttttctttgcatagacattgttggtctataccagtcacgtctgagatggagctcgcgagtgcctttttggtgcccaggactacccaatccgcagtgaagaacaagatgtgttgaggtgccagcaattcttgaagtgtccaacctcgtgtgaaccatcggcttttcttaagtaagtccgtagcctcgacttgttgaggtggctggcttggcacatcctcgagtatcacgtagcagattgctgcgtcgcgataccatgcgaacatagagttgattgcttctgatagctcggaagagcttgatttatcgatgcagactgtgtctacccagacgtatttgtgtccgtcttgtcgcgcgcggcgacatgttgaacggatcttgagaaatcctggggttcgagccttacgtagtcgtgagacgcgagatgaccattctgcgaaggatggttctgcattaccccatgtgtgagagagaatggcgtacgaggggatattacgcccagagaagtcttcggctttgagcgtgctagtgttgattaacctcattgtcgctgcaaacccgcgagacggagttcaatggtatctggagttgtgagcgagaggtgctcctctgtactatcgtgaagagggagctgccgatccctgctcagccccctgcctcatacacaatgcaacgcaacctcatctcgtaagacataaccaagctgagccagtgagcaacgagagcacatagctcggtaagatagtcgccaggtttataagcaagaaattctgcatacaatgtatgcttctttgtagcgg

SEQ ID NO: 5504 - DNA, 1854 bp, Muscodor strobelii
  misc_feature: SGI cDNA ID NO. 561551
  misc_feature: Encodes the peptide sequence at SEQ ID NO 5505
atgaggttaatcaacactagcacgctcaaagccgaagacttctctgggcgtaatatcccctcgtacgccattctctctcacacatggggtaatgcagaaccatccttcgcagaatggtcatctcgcgtctcacgactacgtaaggctcgaaccccaggatttctcaagatccgttcaacatgtcgccgcgcgcgacaagacggacacaaatacgtctgggtagacacagtctgcatcgataaatcaagctcttccgagctatcagaagcaatcaactctatgttcgcatggtatcgcgacgcagcaatctgctacgtgatactcgaggatgtgccaagccagccacctcaacaagtcgaggctacggacttacttaagaaaagccgatggttcacacgaggttggacacttcaagaattgctggcacctcaacacatcttgttcttcactgcggattgggtagtcctgggcaccaaaaaggcactcgcgagctccatctcagacgtgactggtatagaccaacaatgtctatgcaaagaaaagcgactccgagaatacagcatcgcacaacgtatgtcttgggcggcagacagatcaacaacgcgagaagaagacatcgcatacagcctcctaggaatattcaacatcaacatgccccttctctacggcgaaggttctaaagcattccgccgactccaagaagaaatcatcaagtcatccgacgaccacagcatcctagccttcgacaccatactatcccacgactccatcatagcacactccccatctctcttccgaaactgcggttccatcctaccaaccttcaaatctaagataacacctcccttccaactaacaaacgtcggattatctctctcaacaccactcataaagacattatcaccatactgggtgatcgcagtactaaactgtttcgagatcgacaccgcacacggggagcgcctcctccaaatctgtctcccattattcggaaaagacaacacattcatgcgcgcgcgccacccaacatacctaatcaaaaaacccctgcaagaagccaaatccgggtttcagcacgagatcggggatctaacaaccaccaccgtaaccccctatctaataacatacttcacacgcgtctacccagccttcggcgtagaactcgatagtctgatccgaggatttggcgacgaatcgatccagaaatttagtttcatgcttactttcccgcgaagcttaaaaggatggagagtcgtcgaaagttaccccagagatgccctggagatggagacttctctttttacgcctgcgtatacaccgggaagtaagtatccatttagacagggtatggtggtttttgaggagtggggggacggtaccgatatcatgcggactgatacgaatcttacgatgagcactgagaggactctccctcagaattcgaattcgttgaggagagttggtgtttatctggcgcagacgtatgtagggcaggaatgtcgatggttatgtcatcttgtccggtcgccttccccgttatactacgacatggctgtacaggactggccattcgagactagaagtgagaagtgggaacattatgatcatatggggcattgcatcgttgccgcgagaacgcatatcattggtgatggggggctagggtcagggtgggcaggggcagggtggaagacattccattatgctggtcttgagggtagagaaagaccatatgttattgttgagattgtgtttgatggtgaagagttggtggaggatatgagtaagagtagtgtgttgcattatcataatcattgcgttgagttggatgggaaggaggggggttggatatga

SEQ ID NO: 5505 - protein, 617 aa, Muscodor strobelii
  misc_feature: SGI Peptide ID NO. 561551
  misc_feature (22)..(139): Pfam Id: PF06985 Pfam Desc: Heterokaryon incompatibility protein (HET)
  misc_feature (22)..(106): Pfam Id: PF06985 Pfam Desc: Heterokaryon incompatibility protein (HET)
  misc_feature (122)..(139): Pfam Id: PF06985 Pfam Desc: Heterokaryon incompatibility protein (HET)
  misc_feature (1)..(593): NCBI GI: 85092369 Blast Desc: NCU04912 [Neurospora crassa OR74A] gi|28920765|gb|EAA30124.1| [Neurospora crassa OR74A]
  misc_feature (1)..(593): NCBI GI: 171688186 Blast Desc: protein product [Podospora anserina] gi|170944055|emb|CAP70165.1| protein product [Podospora anserina]
  misc_feature (1)..(345): NCBI GI: 145228631 Blast Desc: An01g01850 [Aspergillus niger] gi|134054715|emb|CAK43556.1| protein product [Aspergillus niger]
  misc_feature (1)..(296): NCBI GI: 256723740 Blast Desc: NECHADRAFT_52245 [Nectria haematococca mpVI 77-13-4]
  misc_feature (1)..(296): NCBI GI: 169770123 Blast Desc: [Aspergillus oryzae RIB40] gi|83767390|dbj|BAE57529.1| protein product [Aspergillus oryzae]
  misc_feature (1)..(339): NCBI GI: 121715886 Blast Desc: HET domain protein [Aspergillus clavatus NRRL 1] gi|119403709|gb|EAW14126.1| HET domain protein [Aspergillus clavatus NRRL 1]
  misc_feature (1)..(316): NCBI GI: 169776259 Blast Desc: [Aspergillus oryzae RIB40] gi|83771331|dbj|BAE61463.1| protein product [Aspergillus oryzae]
  misc_feature (1)..(342): NCBI GI: 46126489 Blast Desc: FG07622.1 [Gibberella zeae PH-1]
  misc_feature (1)..(314): NCBI GI: 46139867 Blast Desc: FG11448.1 [Gibberella zeae PH-1]
  misc_feature (1)..(338): NCBI GI: 238493477 Blast Desc: conserved [Aspergillus flavus NRRL3357] gi|220696469|gb|EED52811.1| conserved [Aspergillus flavus NRRL3357]
MRLINTSTLKAEDFSGRNIPSYAILSHTWGNAEPSFAEWSSRVSRLRKARTPGFLKIRSTCRRARQDGHKYVWVDTVCIDKSSSSELSEAINSMFAWYRDAAICYVILEDVPSQPPQQVEATDLLKKSRWFTRGWTLQELLAPQHILFFTADWVVLGTKKALASSISDVTGIDQQCLCKEKRLREYSIAQRMSWAADRSTTREEDIAYSLLGIFNINMPLLYGEGSKAFRRLQEEIIKSSDDHSILAFDTILSHDSIIAHSPSLFRNCGSILPTFKSKITPPFQLTNVGLSLSTPLIKTLSPYWVIAVLNCFEIDTAHGERLLQICLPLFGKDNTFMRARHPTYLIKKPLQEAKSGFQHEIGDLTTTTVTPYLITYFTRVYPAFGVELDSLIRGFGDESIQKFSFMLTFPRSLKGWRVVESYPRDALEMETSLFTPAYTPGSKYPFRQGMVVFEEWGDGTDIMRTDTNLTMSTERTLPQNSNSLRRVGVYLAQTYVGQECRWLCHLVRSPSPLYYDMAVQDWPFETRSEKWEHYDHMGHCIVAARTHIIGDGGLGSGWAGAGWKTFHYAGLEGRERPYVIVEIVFDGEELVEDMSKSSVLHYHNHCVELDGKEGGWI

SEQ ID NO: 5506 - DNA, 4354 bp, Muscodor strobelii
  misc_feature: SGI EST ID NO. CUFF.13929.0
  misc_feature: Variant of the nucleotide sequence at SEQ ID NO 5504
ccgctacaaagaagcatacattgtatgcagaatttcttgcttataaacctggcgactatcttaccgagctatgtgctctcgttgctcactggctcagcttggttatgtcttacgagatgaggttgcgttgcattgtgtatgaggcagggggctgagcagggatcggcagctccctcttcacgatagtacagaggagcacctctcgctcacaactccagataccattgaactccgtctcgcgggtttgcagcgacaatgaggttaatcaacactagcacgctcaaagccgaagacttctctgggcgtaatatcccctcgtacgccattctctctcacacatggggtaatgcagaaccatccttcgcagaatggtcatctcgcgtctcacgactacgtaaggctcgaaccccaggatttctcaagatccgttcaacatgtcgccgcgcgcgacaagacggacacaaatacgtctgggtagacacagtctgcatcgataaatcaagctcttccgagctatcagaagcaatcaactctatgttcgcatggtatcgcgacgcagcaatctgctacgtgatactcgaggatgtgccaagccagccacctcaacaagtcgaggctacggacttacttaagaaaagccgatggttcacacgaggttggacacttcaagaattgctggcacctcaacacatcttgttcttcactgcggattgggtagtcctgggcaccaaaaaggcactcgcgagctccatctcagacgtgactggtatagaccaacaatgtctatgcaaagaaaagcgactccgagaatacagcatcgcacaacgtatgtcttgggcggcagacagatcaacaacgcgagaagaagacatcgcatacagcctcctaggaatattcaacatcaacatgccccttctctacggcgaaggttctaaagcattccgccgactccaagaagaaatcatcaagtcatccgacgaccacagcatcctagccttcgacaccatactatcccacgactccatcatagcacactccccatctctcttccgaaactgcggttccatcctaccaaccttcaaatctaagataacacctcccttccaactaacaaacgtcggattatctctctcaacaccactcataaagacattatcaccatactgggtgatcgcagtactaaactgtttcgagatcgacaccgcacacggggagcgcctcctccaaatctgtctcccattattcggaaaagacaacacattcatgcgcgcgcgccacccaacatacctaatcaaaaaacccctgcaagaagccaaatccgggtttcagcacgagatcggggatctaacaaccaccaccgtaaccccctatctaataacatacttcacacgcgtctacccagccttcggcgtagaactcgatagtctgatccgaggatttggcgacgaatcgatccagaaatttagtttcatgcttactttcccgcgaagcttaaaaggatggagagtcgtcgaaagttaccccagagatgccctggagatggagacttctctttttacgcctgcgtatacaccgggaagtaagtatccatttagacagggtatggtggtttttgaggagtggggggacggtaccgatatcatgcggactgatacgaatcttacgatgagcactgagaggactctccctcagaattcgaattcgttgaggagagttggtgtttatctggcgcagacgtatgtagggcaggaatgtcgatggttatgtcatcttgtccggtcgccttccccgttatactacgacatggctgtacaggactggccattcgagactagaagtgagaagtgggaacattatgatcatatggggcattgcatcgttgccgcgagaacgcatatcattggtgatggggggctagggtcagggtgggcaggggcagggtggaagacattccattatgctggtcttgagggtagagaaagaccatatgttattgttgagattgtgtttgatggtgaagagttggtggaggatatgagtaagagtagtgtgttgcattatcataatcattgcgttgagttggatgggaaggaggggggttggatatgagctgtcttgcctgagtagtccgggtttgatcttgaggagaataaatctgggatcgacttgaatgtgctcatggtttgtgtgtgttcatcagtgagatatcaaagtcacacctcgccgactggatagtggccagcctcgcagcaaatcagtcaagtctcacatcgcaagtcatgaaatatcatcgaaagcaagaatcttccaattcataggcccgtgagccggtatcattcatttccctaaaacacagatccctatgcccgggacgccgtcgctatagtatacagattgaaaggttcaaagtcttcaccacttgaaacctgtgatcagcggaagtgaggcagccgcgccggaacaaaatcgtccttcgtcgatgcctgagacgataacaaagtcgggggccgagattcgtccctcgaggctccagtgtctacttccgttggggccgccgtctcaacttctgtgctggtgatattcctcacgtcgtcgaggattgcagactgtggagctggtatattcgtgacctcgacaatttccgacttcacatccggaacggcttcgatctggagattctccatactcaatccacggtggagggcaagttccgcagccgactgtcgtttcttctcaacctcttcttcttcctctagctcgagtcgcaactcctctctttccaagtcctcgagtgacggcggtggaagaatagccggactaggcggatctgaggtcgaatacgtatcacgccgtagggaaggtcttgcagaatctatagttgtccttgattcgctccgtgaaacgcggtattgtgctatgcgcttccctttgctactcttcgtccggctacttgagcgatcgtcatgatgatctagcgcaatgctgaattcgtcatctagaggtacagcatcctcgtccccttcttcatcactggggaacaagtcgcctcgggaccggtatgagtcgctggtatctccactgccggtcgtgccactccgcttcctagactgtgtcggcatagtctgaggaagcacttcgtactcatcatcactgccgcccagcagtggtgctcgttcgccttctgtcgcatgcttcatagaccccgggtgctcctgtagatcggctgcgctgggcttgtatcgcagtgttccaccaatcttgaagggaagacgacctaagaatccaagggccgaggtgctggggatgatggttggatcttcgtggatgctagccctcctccgtgtgcctcttgtgccataactcatcgctcggttcctagtcctgggttggtctgtcacttcgccagtgctcttccgagagccaccaaccaatcgatcccagtcctcgcctctccatccgcctagtaatcctcctccatcttgctcgccgaactcctcgtcccagtcatcgtagaaatcgaagctgaactcggccctccctcgcgtgcgctggcgctctctcgctcgtcgggcgcgctcttcacggtcgcccagacagagggcagtgcagctgtcgaatgcggagccgacggagccgaggcatggggtgatgtagttgtggccaaaggaccagatcccggcggcggctgactcggttacggtctcggtggtctgggagattcggttccagcgctggcgaaggcgggggtcctcgaagaaggccatctcgggccgcccatgaatagagatgtctcaggaagaatggcgacttcgatgtgaaacaggctttcaatgggtcgatgctccagtcgatgttcccgatggcgacagcggtgggtgcaaagccgtagagagatgcctaatgtcggctgacggatagggctgtagggctggttgagtattgcgacggaaaggcggcagatgtaaaaaataggctgatgaatgcatctgccagtctccaggggtgaggcaccaaggtgtgctcgcttaaaaaccagtagcgcaatcgtcaaatatctgtcctgttattgaaagtcgagaagcgttgtttggtttcaagtgccagatttgcgacaggctgataagaattggagcttttgggtagtttgggacgacgtggtactaagtttgggcggttgaggctagggaattccaaatgggctcatgcatgcattcattgcttaggtcaagtgatcgacgcctgccggcaggaggctatttccgcagattccaggaacaagacatctagtgaaagcaagacttgaagcctcacaagcgacccattatactacggtgaaacaaatgctgcagcgtac

SEQ ID NO: 5507 - DNA, 1059 bp, Muscodor strobelii
  misc_feature: SGI cDNA ID NO. 561552
  misc_feature: Elevated expression when VOC is produced
  misc_feature: Encodes the peptide sequence at SEQ ID NO 5508
atggcacccaaaggccccatcacaacccctctaacaacccttttgggtatctcacatcccataatcctcgctggtatggcgaggacatccggcgggctcctcgcggccgcagtatccaatgccggcggattaggcgtcatcggaggtttcatgtacacaccagaccaactacgctccatcatcgcagagatgaaagccaacttcaaacacccagatatgccattcggcgttgatctggcgctaccacaaatcggcggtagcgcacggaagacaaatcacgactacaccggaggaaagttggacgaactgatcgacatcacaattgactctggcgcaaagctattcgtatgcgctgtcggtgtcccgccgaaacatgtcatcaagagattacatggtgccggtatcctgatcatgaacatggttggtgcaccgaaacacgctgtcaaggctttggatcttggcgtggatatggtctgtcctcagggcggcgagggaggtggacatacgggcgagatcgcgaattcagtgctcatcccagctgtcgtcgatgtagcgaggaagtataagccccctatgctgaaaggctctacggcgatggtcgttgccgctggtggaatagggaatggccgtgcgttggcttcgagtttgatgcaaggtgcggtcggtgtatgggttgggactcgatttgttgcttctgaagaggcgaactgtgcagaagagcataagaagagtgtcgtggattgcggcttcacagagacggatcgcacgcttgtgttgtctggtcggccgttgcgcatgcgcgtgaatgagtatatcgctgggtggcatgcgaagcccgacaagatcaaggagttgacggagaagggtattgttccgattgaatgggacttcgatcagggcaatgatgttgaccctccgcatctcatgggtcaagttgcgggctacattgataagatacagcctgcaaaggagattgttgatgatatggtcagtgaggcggttaccatgttgaagattggcggttcatatctcaacggtggaagcgctagcaagttgtaa

SEQ ID NO: 5508 - protein, 352 aa, Muscodor strobelii
  misc_feature: SGI Peptide ID NO. 561552
  misc_feature (8)..(332): Pfam Id: PF03060 Pfam Desc: 2-nitropropane dioxygenase
  misc_feature (2)..(352): NCBI GI: 164426345 Blast Desc: NCU01275 [Neurospora crassa OR74A] gi|157071298|gb|EAA31517.2| NCU01275 [Neurospora crassa OR74A]
  misc_feature (1)..(352): NCBI GI: 171692179 Blast Desc: protein product [Podospora anserina] gi|170946038|emb|CAP72839.1| protein product [Podospora anserina]
  misc_feature (1)..(345): NCBI GI: 46123083 Blast Desc: FG05919.1 [Gibberella zeae PH-1]
  misc_feature (6)..(345): NCBI GI: 261355498 Blast Desc: 2-nitropropane dioxygenase [Verticillium albo-atrum VaMs.102]
  misc_feature (1)..(345): NCBI GI: 256731145 Blast Desc: [Nectria haematococca mpVI 77-13-4]
  misc_feature (1)..(352): NCBI GI: 145606254 Blast Desc: MGG_02439 [Magnaporthe grisea 70-15] gi|145013960|gb|EDJ98601.1| MGG_02439 [Magnaporthe grisea 70-15]
  misc_feature (26)..(352): NCBI GI: 38566810 Blast Desc: conserved [Neurospora crassa]
  misc_feature (1)..(352): NCBI GI: 156042872 Blast Desc: SS1G_11235 [Sclerotinia sclerotiorum 1980] gi|154695620|gb|EDN95358.1| SS1G_11235 [Sclerotinia sclerotiorum 1980]
  misc_feature (1)..(346): NCBI GI: 154313456 Blast Desc: BC1G_05425 [Botryotinia fuckeliana B05.10] gi|150849494|gb|EDN24687.1| BC1G_05425 [Botryotinia fuckeliana B05.10]
  misc_feature (7)..(352): NCBI GI: 169601344 Blast Desc: SNOG_03536 [Phaeosphaeria nodorum SN15] gi|111067621|gb|EAT88741.1| SNOG_03536 [Phaeosphaeria nodorum SN15]
  misc_feature (19)..(282): SWISSPROT Homolog: EC 1.13.11.32 2-nitropropane dioxygenase
  misc_feature: Useful for introducing or modulating the production of volatile compounds
MAPKGPITTPLTTLLGISHPIILAGMARTSGGLLAAAVSNAGGLGVIGGFMYTPDQLRSIIAEMKANFKHPDMPFGVDLALPQIGGSARKTNHDYTGGKLDELIDITIDSGAKLFVCAVGVPPKHVIKRLHGAGILIMNMVGAPKHAVKALDLGVDMVCPQGGEGGGHTGEIANSVLIPAVVDVARKYKPPMLKGSTAMVVAAGGIGNGRALASSLMQGAVGVWVGTRFVASEEANCAEEHKKSVVDCGFTETDRTLVLSGRPLRMRVNEYIAGWHAKPDKIKELTEKGIVPIEWDFDQGNDVDPPHLMGQVAGYIDKIQPAKEIVDDMVSEAVTMLKIGGSYLNGGSASKL

SEQ ID NO: 5509 - DNA, 2304 bp, Muscodor strobelii
  misc_feature: SGI EST ID NO. CUFF.13935.0
  misc_feature: Variant of the nucleotide sequence at SEQ ID NO 5507
ccggggtacttacgatgagttgaaagctcttgacgtctcaccgtctcaattcatcttcattcctagttttcaactcctcatattcatgtcttctatgtgaccgtgtgtaatagcatctgtgaagcgtactgttgattgctggcatcacattgatctcgtaactcacctcttccgcgctcaatcccagaacctctcatcaccctaacgaccacatcttttggcttttacaactaaccttcaagatggcacccaaaggccccatcacaacccctctaacaacccttttgggtatctcacatcccataatcctcgctggtatggcgaggacatccggcgggctcctcgcggccgcagtatccaatgccggcggattaggcgtcatcggaggtttcatgtacacaccagaccaactacgctccatcatcgcagagatgaaagccaacttcaaacacccagatatgccattcggcgttgatctggcgctaccacaaatcggcggtagcgcacggaagacaaatcacgactacaccggaggaaagttggacgaactgatcgacatcacaattgactctggcgcaaagctattcgtatgcgctgtcggtgtcccgccgaaacatgtcatcaagagattacatggtgccggtatcctgatcatgaacatggttggtgcaccgaaacacgctgtcaaggctttggatcttggcgtggatatggtctgtcctcagggcggcgagggaggtggacatacgggcgagatcgcgaattcagtgctcatcccagctgtcgtcgatgtagcgaggaagtataagccccctatgctgaaaggctctacggcgatggtcgttgccgctggtggaatagggaatggccgtgcgttggcttcgagtttgatgcaaggtgcggtcggtgtatgggttgggactcgatttgttgcttctgaagaggcgaactgtgcagaagagcataagaagagtgtcgtggattgcggcttcacagagacggatcgcacgcttgtgttgtctggtcggccgttgcgcatgcgcgtgaatgagtatatcgctgggtggcatgcgaagcccgacaagatcaaggagttgacggagaagggtattgttccgattgaatgggacttcgatcagggcaatgatgttgaccctccgcatctcatgggtcaagttgcgggctacattgataagatacagcctgcaaaggagattgttgatgatatggtcagtgaggcggttaccatgttgaagattggcggttcatatctcaacggtggaagcgctagcaagttgtaaagagatctggcatttgaaatattatatgcgcaagcaggttggtgtttgtatgtatgaatgaaaattgctgcatttacaaccctgataaaattctccggcacttgtctgcaagcttcggtatacagtaatgataaatcacaccaattttctattataagtggacggattgttcatgcccatccttgccagaagtgtcctgaggcagcagctgacgagggagccaaggtcgttccaatcaaaagggctattcgaccgctggggatgttcatattgatgtccggccctggggaatccccaacacacctccgacaagaagactgctgccctgcagaatacgagctgaaataagaggataaagaaccccagagcttgaattaagtctggggcttcctttcgataccttatgtaaagtactataagaagtctggcaggcgcgtgctaagtcgccttccgcaccttctcccagtacattcaatctgcgaagaaagaagagccaacagccaatcacaacgcgccgacacgactgtatatgggggtcaataaggcgacagcctttcgacgttcccaactgggccggtgaccaccgaggccgccaccagttggtcaagttagtcaggttgaaacggagctagactacgtttcagatagcgtctgggtgcagagaacaccggttcgaaccgaggcattatccttttgcaaagtttttttctcctcaacccattcctgcgctgctcctcgctgttgctactgatgcatttcaacgtccattgctagcgtatagtgctcaaatacgcggaaatgcgacaagactgaataacgagggagtgtgcatcaacacatgcagtaataagcgcattgccgttctgtgacaagatagacgacatttacaaaacacttcattgcctcctcactgatttcgaattgcttatccgatcggacaatatctcaacagaaaggatgctcgtatagcaccgaatcttggttcaagatgggtgacttgttg

SEQ ID NO: 5510 - DNA, 828 bp, Muscodor strobelii
  misc_feature: SGI cDNA ID NO. 561553
  misc_feature: Encodes the peptide sequence at SEQ ID NO 5511
atggagcacacctcttcactcatcaccaagctccaaggagcgaccagctttaccaagttcaacgaactaccgcctgagctacgcatcaaaatctggcaacatgccatgcccgacgcaaggacagtggttgtcaggtccccattttcgcaacagaaggaaagccctgcctcactcgaggacgtattgccgcaaatattcgacgaggagcagacatggcaatctacaactcagattcccgccctcttacatgtcaatgccgaagctcgttacgaagctctaaagcactacacactatcacttgccgttggtaaatgccaaccaaggatatatgtcgactttaagcgcgacactattttctttggaaacacagagatcaagcaagagtgttcatctttgtgggctgagacacaagaccttgacaaagttcaacgtcttgccgtcgtacctgagggcgcatggagggtgctccgctggaagaaagtggatctcaactctcttcaaaagatgatcttcgtccacgacacagacaaagtcaggttgggtcctcttcctcaactcgtggaagatggtgaatctgagggcgagatgaatttggagacagagctcgaacagcaaatcaagttactcgagactacatcgaccacatcaacggaggggacggaggaaacgctgccgcatgcgcacgactctcctatgaagaagcgtatgcaagctgcaagagaagagctcgatactctcatgatggtcctaccaacgcaatgggaaaaggagccagccattacaacggcggtgttcaaaaagagttggggcgatagatgggtgtgctga

SEQ ID NO: 5511 - protein, 275 aa, Muscodor strobelii
  misc_feature: SGI Peptide ID NO. 561553
  misc_feature (12)..(147): NCBI GI: 256729928 Blast Desc: NECHADRAFT_83863 [Nectria haematococca mpVI 77-13-4]
  misc_feature (70)..(148): NCBI GI: 39968691 Blast Desc: [Magnaporthe grisea 70-15] gi|145013961|gb|EDJ98602.1| [Magnaporthe grisea 70-15]
  misc_feature (15)..(181): NCBI GI: 156047988 Blast Desc: [Sclerotinia sclerotiorum 1980] gi|154693122|gb|EDN92860.1| [Sclerotinia sclerotiorum 1980]
  misc_feature (8)..(120): NCBI GI: 156060897 Blast Desc: [Sclerotinia sclerotiorum 1980] gi|154699995|gb|EDN99733.1| [Sclerotinia sclerotiorum 1980]
  misc_feature (15)..(153): NCBI GI: 154307966 Blast Desc: [Botryotinia fuckeliana B05.10] gi|150853099|gb|EDN28291.1| [Botryotinia fuckeliana B05.10]
  misc_feature (20)..(146): NCBI GI: 154295453 Blast Desc: [Botryotinia fuckeliana B05.10] gi|150844073|gb|EDN19266.1| [Botryotinia fuckeliana B05.10]
  misc_feature (15)..(121): NCBI GI: 46107912 Blast Desc: FG00839.1 [Gibberella zeae PH-1]
  misc_feature (2)..(101): NCBI GI: 256734646 Blast Desc: NECHADRAFT_31225 [Nectria haematococca mpVI 77-13-4]
  misc_feature (14)..(147): NCBI GI: 154318570 Blast Desc: [Botryotinia fuckeliana B05.10] gi|150857804|gb|EDN32996.1| [Botryotinia fuckeliana B05.10]
  misc_feature (13)..(132): NCBI GI: 156040511 Blast Desc: SS1G_12272 [Sclerotinia sclerotiorum 1980] gi|154696328|gb|EDN96066.1| SS1G_12272 [Sclerotinia sclerotiorum 1980]
MEHTSSLITKLQGATSFTKFNELPPELRIKIWQHAMPDARTVVVRSPFSQQKESPASLEDVLPQIFDEEQTWQSTTQIPALLHVNAEARYEALKHYTLSLAVGKCQPRIYVDFKRDTIFFGNTEIKQECSSLWAETQDLDKVQRLAVVPEGAWRVLRWKKVDLNSLQKMIFVHDTDKVRLGPLPQLVEDGESEGEMNLETELEQQIKLLETTSTTSTEGTEETLPHAHDSPMKKRMQAAREELDTLMMVLPTQWEKEPAITTAVFKKSWGDRWVC

SEQ ID NO: 5512 - DNA, 1909 bp, Muscodor strobelii
  misc_feature: SGI EST ID NO. CUFF.13944.0
  misc_feature: Variant of the nucleotide sequence at SEQ ID NO 5510
gcgacctgtagcatcccgcagccatgggtcaccagatatcctacgctagaggaagcaaagaaagggagaaagatgtgccaagatctatgtgcaacttgaattcgtctattggatacgtacacaagtgatgcaaggcatcataggtatctgcggtcagttcgggtcgcgggggcgggcaattcggtgcccgtgccgactctcgcgtctgaggattagtcttctgtggcgctctgtcgctcatctaaccacgttccagtcgtcgtgttccagtcagtgacgtctgcgataccagctgactggtatctcgtgctactctaatcaatgtatatcattcgtccttgctgcgctgctctcatctggaccctgcgaactcagatttggcgtccccaggttgtcatgtgcgacaagagcaaagtaccaatatgggatgatacagcaaagtatctcatataagtcaggcagctctcgcacgacctcaaagtggcttgtttaaaagtccatcatttaatacagcgaatcgtctgctcctcaaaaggtacataggttttctcggcactatccaagccacaacgaatcagcatttcaaatttttggtactttgggcgttgtgctaccacacacttggacggaaggctagctacagccctgctacacactacttgactcgacttggacggtggccagacgtctgagatcatgccaagcaactcagcccagctcaacgacctatatcatgaggtcccatcctctcttgctcccctcttgaagtcgatattgatcattgtaagactcgacaactggcaaagatcacagtactatcaactccttaaccttgtcgacactacaatggagcacacctcttcactcatcaccaagctccaaggagcgaccagctttaccaagttcaacgaactaccgcctgagctacgcatcaaaatctggcaacatgccatgcccgacgcaaggacagtggttgtcaggtccccattttcgcaacagaaggaaagccctgcctcactcgaggacgtattgccgcaaatattcgacgaggagcagacatggcaatctacaactcagattcccgccctcttacatgtcaatgccgaagctcgttacgaagctctaaagcactacacactatcacttgccgttggtaaatgccaaccaaggatatatgtcgactttaagcgcgacactattttctttggaaacacagagatcaagcaagagtgttcatctttgtgggctgagacacaagaccttgacaaagttcaacgtcttgccgtcgtacctgagggcgcatggagggtgctccgctggaagaaagtggatctcaactctcttcaaaagatgatcttcgtccacgacacagacaaagtcaggttgggtcctcttcctcaactcgtggaagatggtgaatctgagggcgagatgaatttggagacagagctcgaacagcaaatcaagttactcgagactacatcgaccacatcaacggaggggacggaggaaacgctgccgcatgcgcacgactctcctatgaagaagcgtatgcaagctgcaagagaagagctcgatactctcatgatggtcctaccaacgcaatgggaaaaggagccagccattacaacggcggtgttcaaaaagagttggggcgatagatgggtgtgctgaacaggcatttgcccatgcatggcgaatgaggtcactgacatatggccgttttcttttactttgtagtttgcaacctcgctcgactcgatacccaattagcattctcatctcaaaatcagatcattgctcttccaatcaggtgttcgtgatgccagtgaattctgttatgttattggacgcactctggacgccacgtctccgccaccatccacctaatcagaaaactcaatcttgc

SEQ ID NO: 5513 - DNA, 870 bp, Muscodor strobelii
  misc_feature: SGI cDNA ID NO. 561554
  misc_feature: Encodes the peptide sequence at SEQ ID NO 5514
atgcatttggcccacatcacattactaaatacattggcaactgtgatcgatgcgagttccgcgacgagaaaatatgtacgcgatgcgaacaccactggcgttaccttgaccgcccacttcgaccaatggaatacggacggcggcggagcagcgcaattctcggtctcagcgccagcaaattatgttctgggtgcgcctgcatttgatgtcacctgctacaccggttttgcgaccacgggtgaatgcgagtggaatagtgacaagccatcagaatggggcgactacacgacagtatcggcctccttccatggcatcagcctcaacgtcactcttacaacccaattcgttaccagccaaaggctgcgtaccactagaacggctacaggccatatcgacgcgggcgggctcaatgaacctccgaatagctatgatttcccattaattgttagcgatgatgtgcaaacaatccccggagttctgggtaattacggaacttggagcgcagccaacgcgacgcaaccgtcgcaagttgtcagcgaacccaaccagccttggctgaactactcactcacgactcctgatgggtatgcacccgacgccccgggcttcagcgtggagtgcttttacgatatcacccaacaccaaggcaccactttctatgagacgtgtactccgattggcgacagcgccctcgatacaaatgtcacagcgctcgcatactgccagggacctagcgactgcagtgtgaaggtgcgccatacatgggccgcagccaacggctcgaggtacgaagttgaaggtgacggcgaagtattctttttccaaggcaattcattcaacatcaacccgcatgtgttattaagcgtatag

SEQ ID NO: 5514 - protein, 289 aa, Muscodor strobelii
  misc_feature: SGI Peptide ID NO. 561554
MHLAHITLLNTLATVIDASSATRKYVRDANTTGVTLTAHFDQWNTDGGGAAQFSVSAPANYVLGAPAFDVTCYTGFATTGECEWNSDKPSEWGDYTTVSASFHGISLNVTLTTQFVTSQRLRTTRTATGHIDAGGLNEPPNSYDFPLIVSDDVQTIPGVLGNYGTWSAANATQPSQVVSEPNQPWLNYSLTTPDGYAPDAPGFSVECFYDITQHQGTTFYETCTPIGDSALDTNVTALAYCQGPSDCSVKVRHTWAAANGSRYEVEGDGEVFFFQGNSFNINPHVLLSV

SEQ ID NO: 5515 - DNA, 3303 bp, Muscodor strobelii
  misc_feature: SGI cDNA ID NO. 561555
  misc_feature: Encodes the peptide sequence at SEQ ID NO 5516
atggcgacatttcaaggctattgccgagacgtggggtattgcgaacacgatgttcgagtgtattgtaacttcggccagtctttgacgcgctgcgactgtgaactgggtctgtgcttcttcgaaaagtacaggttcatcatttggctcttatatttgcagcagaatcatagcctggaagatacaattcggcgggttgtgacggtttacggactgcggacaagaagtaaaaaggaatacgaagaagggttattacacctggggtattccaagaagctacacatcaaggagtgggtcaaggtcggggtccatgtcgagaagagaaagagggatggaaaggatacagagatctttttgagtggcgtcaagagacgccgggacttcctgaaggagatcttgcggaagaacaagcaatctcatagactaggcttagagttgacggatgcgcctaccccagatctgccactaggcgtaacgttgaagacaccaccacggtctcctgttcttcctgtgcgctctcatactcttatattgtgggaagctagcagcagccccgggggcaacgagacgtcttctgttttacgatcagcaatgttgaccaacccgcactccacagtgcagtggttggtggacgtaccaacaagtcaactttggagcttgggctctcaacacttcgcggttcctttacgagagttatatatccacaagaattcccgagactcagatgccgcgaacgagatcactctttcaccaaacaatggagtcattgcaccacctacggcaaattcgctggacctaattaaatacgtcatgaaactatgcacaatggtcgcaaacggaggcgacatccgcaatattgtggaaactgcgcacccagcaggcggtttatctttactcaagaccaagcggaatctaccagtactgaaacttttcttttcccttgaatccctggcagtagaagcgacctggaatggactcatcacattcgtgagcacggagcaggacctagaggcatttgaagttctcttagggatagccacggaagttcacggcggcgcttggatggataagtatctacaaaaggttatcgcaagcgcagtacagtcgcgattttttcggcgcggaaatgttgtggctcgactcatcacggtagattttattcagtcgttgtcgtacaggaaactagaggagatactactcatggccgctttcaatctcgacaaaagcttgttggaagtcttggtcagcgttggtgctcgatttcgcgatcctggctcttcggacaccccctcgattgctgagagaatcctaaatatgtaccatagagagctagagaccatggatcataagcggtttgtctcacttttggtcatggcggatttcagggtcgatatgcaagtttctttacggaaactgcctggctacgacgagctcgaaaactggccgagcgctatgataaacagcccaagagacgctctgaggggtaatcaagcgtataatgctcaccagattgagttcatcgacttcctttggcttaatgggtactctatactgtacagagccatggtcacccatagtcgacatgcaaacgagcacctcaccatatcagggacagttattgcagcgaatggtggtagagaaaggctcgacacttatcttgggtctagagaagaacacccgacgcttgctaggcaggctactctcgaagttgcactgtctacagcggcgcgaatgaataatacttctgccattagagccctcgtagactttggagtcgaccccgacaccccaggaatccgcgatgaattcagacccatggtcatagcaagcagattctcccgagaagattctctcaagatccttgtccagtgcggagttaaaaggatccaattgcgcacccattcccaaaaaacccgccttcctaaatgctcgctcgagcttcatagtttattagctgatgaaggttttatagagccattgggggccgactccatgttgatagctctcgccggaaaaagaccagacaacgaacttgtcacagacaggttgttcgggacgaggatactcgccaacaccatgtcagatgggatcaacctcatacacatggccattcgtaggcagtcagatgtgcgctctattcggttcttacacgctcgcggggtcgaaatacactctcgcccctgtccaatgacggggctcactcagctgcatgaggcgatgtcaagtaatattccctataaggccaagtctgagcttgtcgaatttctcctggacaatggggcagactgtacacaggaatacggtacggccacggtcctagagctctgggctagttgttacagacatggcatggataacaacttgcactgctttggcactctgattgatagaggagctcaagtcaagggcccgagcaagcgttttgctgaaaaatggccttcgcttttggtcactcttatgagagtgagtccaactttgcccgataacttcctactagagttcatagtaaagaacggggccgatattcacacgagagatatgggcatggacactcctttgcagtacgcgattcgccggagacgatacaggatcgctcgcgagcttctcgccttaggagctgatatcaatgcgccagcagccgtgtcttatggattgacggcgctgcaggctgcgtgcgatggagcctcagatctggatgaatcgataggcttcgtacagtccctactcgatgcaaatgcagatatcaatgcacccggtgctgctatacaggggctcactgcactgcaatgtgccatccgatccggctccatcgtcgtcttctgcctgctgctcgatgcgggtgcaaacatcaacgcgaacgcctgcaaggaatttatattcaaggaggaccgcgatttcaacgccctagacattgctgtcttttatggcagaattgatatggtaagtatacttctcaagatgaaggcgcgaagcgcggaggctggcgatacaccctatgacggcgcaatcaagattgcaaagaaggagcgaaactacgctatcgtaaagatgctgaggaacacgcacttggatgcggttgatagatcggactgggccggcgcggatcaaggaaggatcgttgaagttcttgatgctgctgaggaagttgactgcgaggaatctgacacttcgaaggtttcaaatgcaccaaggacaattgctacgcaaagacctgcggcttttcatggcgagattgcagagacttgcgaagaaactgaggactatggccaagttgttttggctgagttggaccgacagttttcgtga

SEQ ID NO: 5516 - protein, 1100 aa, Muscodor strobelii
  misc_feature: SGI Peptide ID NO. 561555
  misc_feature (922)..(954): Pfam Id: PF00023 Pfam Desc: Ankyrin repeat
  misc_feature (847)..(879): Pfam Id: PF00023 Pfam Desc: Ankyrin repeat
  misc_feature (568)..(1026): NCBI GI: 238843722 Blast Desc: ankyrin repeat protein [Microsporum canis CBS 113480]
  misc_feature (719)..(1026): NCBI GI: 258565299 Blast Desc: [Uncinocarpus reesii 1704] gi|237907095|gb|EEP81496.1| [Uncinocarpus reesii 1704]
  misc_feature (570)..(1016): NCBI GI: 258565299 Blast Desc: [Uncinocarpus reesii 1704] gi|237907095|gb|EEP81496.1| [Uncinocarpus reesii 1704]
  misc_feature (570)..(1017): NCBI GI: 189502738 Blast Desc: Aasi_1435 [Candidatus Amoebophilus asiaticus 5a2] gi|189498179|gb|ACE06726.1| Aasi_1435 [Candidatus Amoebophilus asiaticus 5a2]
  misc_feature (834)..(1034): NCBI GI: 225684431 Blast Desc: conserved [Paracoccidioides brasiliensis Pb03]
  misc_feature (570)..(1017): NCBI GI: 189502738 Blast Desc: Aasi_1435 [Candidatus Amoebophilus asiaticus 5a2] gi|189498179|gb|ACE06726.1| Aasi_1435 [Candidatus Amoebophilus asiaticus 5a2]
  misc_feature (834)..(1034): NCBI GI: 226294082 Blast Desc: [Paracoccidioides brasiliensis Pb18]
  misc_feature (725)..(1017): NCBI GI: 242827177 Blast Desc: multiple ankyrin repeats single kh domain protein, [Talaromyces stipitatus ATCC 10500] gi|218712034|gb|EED11462.1| multiple ankyrin repeats single kh domain protein, [Talaromyces
  misc_feature (598)..(1030): NCBI GI: 189502738 Blast Desc: Aasi_1435 [Candidatus Amoebophilus asiaticus 5a2] gi|189498179|gb|ACE06726.1| Aasi_1435 [Candidatus Amoebophilus asiaticus 5a2]
  misc_feature (834)..(1037): NCBI GI: 226284810 Blast Desc: [Paracoccidioides brasiliensis Pb01]
MATFQGYCRDVGYCEHDVRVYCNFGQSLTRCDCELGLCFFEKYRFIIWLLYLQQNHSLEDTIRRVVTVYGLRTRSKKEYEEGLLHLGYSKKLHIKEWVKVGVHVEKRKRDGKDTEIFLSGVKRRRDFLKEILRKNKQSHRLGLELTDAPTPDLPLGVTLKTPPRSPVLPVRSHTLILWEASSSPGGNETSSVLRSAMLTNPHSTVQWLVDVPTSQLWSLGSQHFAVPLRELYIHKNSRDSDAANEITLSPNNGVIAPPTANSLDLIKYVMKLCTMVANGGDIRNIVETAHPAGGLSLLKTKRNLPVLKLFFSLESLAVEATWNGLITFVSTEQDLEAFEVLLGIATEVHGGAWMDKYLQKVIASAVQSRFFRRGNVVARLITVDFIQSLSYRKLEEILLMAAFNLDKSLLEVLVSVGARFRDPGSSDTPSIAERILNMYHRELETMDHKRFVSLLVMADFRVDMQVSLRKLPGYDELENWPSAMINSPRDALRGNQAYNAHQIEFIDFLWLNGYSILYRAMVTHSRHANEHLTISGTVIAANGGRERLDTYLGSREEHPTLARQATLEVALSTAARMNNTSAIRALVDFGVDPDTPGIRDEFRPMVIASRFSREDSLKILVQCGVKRIQLRTHSQKTRLPKCSLELHSLLADEGFIEPLGADSMLIALAGKRPDNELVTDRLFGTRILANTMSDGINLIHMAIRRQSDVRSIRFLHARGVEIHSRPCPMTGLTQLHEAMSSNIPYKAKSELVEFLLDNGADCTQEYGTATVLELWASCYRHGMDNNLHCFGTLIDRGAQVKGPSKRFAEKWPSLLVTLMRVSPTLPDNFLLEFIVKNGADIHTRDMGMDTPLQYAIRRRRYRIARELLALGADINAPAAVSYGLTALQAACDGASDLDESIGFVQSLLDANADINAPGAAIQGLTALQCAIRSGSIVVFCLLLDAGANINANACKEFIFKEDRDFNALDIAVFYGRIDMVSILLKMKARSAEAGDTPYDGAIKIAKKERNYAIVKMLRNTHLDAVDRSDWAGADQGRIVEVLDAAEEVDCEESDTSKVSNAPRTIATQRPAAFHGEIAETCEETEDYGQVVLAELDRQFS

SEQ ID NO: 5517 - DNA, 787 bp, Muscodor strobelii
  misc_feature: SGI EST ID NO. CUFF.13965.0
  misc_feature: Variant of the nucleotide sequence at SEQ ID NO 5515
gccacattctatagacccacataaaccaagtcaaaaacacatacctttttccccctacaacagtaccttaagtaggtagcatagtagggctgtatacctgcacatcttatgcagctaccatcaggcatcagcactcgtcaaggcggtcagagcctgactagagatgaatctctgcaaagcctcgccttaccattcttattttggtttatatctcgccaattccctccccttcatcatgacatccatatatgtggggattgttcagagtcctcttcaagatggcgacatttcaaggctattgccgagacgtggggtattgcgaacacgatgttcgagtgtattgtaacttcggccagtctttgacgcgctgcgactgtgaactgggtctgtgcttcttcgaaaagtacaggttcatcatttggctcttatatttgcagcagaatcatagcctggaagatacaattcggcgggttgtgacggtttacggactgcggacaagaagtaaaaaggaatacgaagaagggttattacacctggggtattccaagaagctacacatcaaggagtgggtcaaggtcggggtccatgtcgagaagagaaagagggatggaaaggatacagagatctttttgagtggcgtcaagagacgccgggacttcctgaaggagatcttgcggaagaacaagcaatctcatagactaggcttagagttgacggatggtacgtcgaggtcaaaacggcacagttcttgcaacacgtgttcattctattctagcgcctaccccag

SEQ ID NO: 5518 - DNA, 1347 bp, Muscodor strobelii
  misc_feature: SGI cDNA ID NO. 561556
  misc_feature: Encodes the peptide sequence at SEQ ID NO 5519
atgttcgcatttgaatcgcctcccgacccgcccgacgatgacgacggtggcagtagcggagggggaggaggacccggtggcccgagtccgagacagagcttcaattttgcgcctgggtactttggaatggtttatcgtgctgaggtcccagactggagttctgtctttcgatcgatgtctgagcttgatgattacggacgaccacgtgacgatctagataaacggcgcgacaaaggtgacgaaaaaggcgatgacgacacagacaacccaaaagacacgagatataaacttcagtcgatgaaatggggcctggtaccctcctggacgaagagaaatccgggttatgggggcatgatgaagacgataaactgtcgatccgagagtttggcacagggaggtggcctgtggagtagtatgaaggcgaagaagaggtgtattgttgttgcggagggattctacgagtggttgaagaaagatggggcgcgggatagggacaaggttccacattatgttaagaggaaggatggaaggttgatgtgttttgctggcttgtgggatggggtcatttttgaagacgaggaaaccaagcaaacgctctacacatacacaatcatcacgacggactcgaataagcagctgagcttcctgcatgaccggatgccagttatcttcgacaacggatccgaagagctacgcacatggcttgatccgaaccgcaatgagtggtcgattgagttacaatcactgcttaagccgtttaccggggcactagaagtctatccggtgagcaaagatgtgggcaaagtcggaaataatagaccggatttcgtcgttccggtcgactcaaaggacaacaagaggaacattgcgaacttcttcgctaatgcggcggtcaagaaggagatcaagcaggaggttaagcaggaagtgaaagaggaggaacaggtcaagaaagaggaagataacgaaaagtcacacgtcaagaaggaaaccgaagacgagaaaagacccaagaccgagcaacccgagatcgtcatcacgaaagacaaaggcttcgttgcggaagatgagccttatatcaaagctgagaagctcgaggatgacgacagcaatgtacttgccggtatcaagaggaaagctgacgaggagcaagatgagaaaccggctaagaagggacctgctgctgcaccgttaagtaaaggtgcaaatgctgcgacggcgagtgggaagaagacttcgccggtgaagggaaggcagaagatcagcgctacgagtaatggtacgaagagcccaatgaagaagactggcgagcagaagattacgaagtttttcggtaatagccaataa

SEQ ID NO: 5519 - protein, 448 aa, Muscodor strobelii
  misc_feature: SGI Peptide ID NO. 561556
  misc_feature (45)..(275): Pfam Id: PF02586 Pfam Desc: Uncharacterised ACR, COG2135
  misc_feature (100)..(275): Pfam Id: PF02586 Pfam Desc: Uncharacterised ACR, COG2135
  misc_feature (26)..(444): NCBI GI: 156065757 Blast Desc: SS1G_00889 [Sclerotinia sclerotiorum 1980] gi|154691748|gb|EDN91486.1| SS1G_00889 [Sclerotinia sclerotiorum 1980]
  misc_feature (26)..(444): NCBI GI: 154304827 Blast Desc: BC1G_08999 [Botryotinia fuckeliana B05.10] gi|150853861|gb|EDN29053.1| BC1G_08999 [Botryotinia fuckeliana B05.10]
  misc_feature (26)..(447): NCBI GI: 261358495 Blast Desc: yoqW [Verticillium albo-atrum VaMs.102]
  misc_feature (31)..(444): NCBI GI: 119174254 Blast Desc: CIMG_09109 [Coccidioides immitis RS]
  misc_feature (31)..(444): NCBI GI: 240106748 Blast Desc: CPC735_015330 [Coccidioides posadasii C735 delta SOWgp]
  misc_feature (31)..(444): NCBI GI: 225559025 Blast Desc: DUF159 domain-containing protein [Ajellomyces capsulatus G186AR]
  misc_feature (31)..(446): NCBI GI: 169622274 Blast Desc: SNOG_14356 [Phaeosphaeria nodorum SN15] gi|160704737|gb|EAT78227.2| SNOG_14356 [Phaeosphaeria nodorum SN15]
  misc_feature (31)..(444): NCBI GI: 121708545 Blast Desc: DUF159 domain protein [Aspergillus clavatus NRRL 1] gi|119400315|gb|EAW10741.1| DUF159 domain protein [Aspergillus clavatus NRRL 1]
  misc_feature (31)..(444): NCBI GI: 239611248 Blast Desc: DUF159 domain-containing protein [Ajellomyces dermatitidis ER-3]
  misc_feature (31)..(445): NCBI GI: 145229995 Blast Desc: An01g08840 [Aspergillus niger] gi|134055420|emb|CAK37129.1| protein product [Aspergillus niger]
MFAFESPPDPPDDDDGGSSGGGGGPGGPSPRQSFNFAPGYFGMVYRAEVPDWSSVFRSMSELDDYGRPRDDLDKRRDKGDEKGDDDTDNPKDTRYKLQSMKWGLVPSWTKRNPGYGGMMKTINCRSESLAQGGGLWSSMKAKKRCIVVAEGFYEWLKKDGARDRDKVPHYVKRKDGRLMCFAGLWDGVIFEDEETKQTLYTYTIITTDSNKQLSFLHDRMPVIFDNGSEELRTWLDPNRNEWSIELQSLLKPFTGALEVYPVSKDVGKVGNNRPDFVVPVDSKDNKRNIANFFANAAVKKEIKQEVKQEVKEEEQVKKEEDNEKSHVKKETEDEKRPKTEQPEIVITKDKGFVAEDEPYIKAEKLEDDDSNVLAGIKRKADEEQDEKPAKKGPAAAPLSKGANAATASGKKTSPVKGRQKISATSNGTKSPMKKTGEQKITKFFGNSQ

SEQ ID NO: 5520 - DNA, 1971 bp, Muscodor strobelii
  misc_feature: SGI EST ID NO. CUFF.13984.0
  misc_feature: Variant of the nucleotide sequence at SEQ ID NO 5518
ccgcacctccatttcgtcattgaacatcaactcattcaacagcgaacgctctgctcgtcaaacacatatcctgcctcacgctacgccagactgccgtgtaccatatcaactgagatcagcttaaattcttcttgttacttaattccgccaacaactcacctgttatccgccttcaattgaatcgaatctcactccacctcatagactgcgacgactggagaaaccgttcgtgggtgaagggaaagaacgctgatcatcgatgggggagaggagaggaagttaaaatgtgtggacgttactcgctgcatctgcgcccaagcgaaataaggcgaagattacaagatgacaatatgttcgcatttgaatcgcctcccgacccgcccgacgatgacgacggtggcagtagcggagggggaggaggacccggtggcccgagtccgagacagagcttcaattttgcgcctgggtactttggaatggtttatcgtgctgaggtcccagactggagttctgtctttcgatcgatgtctgagcttgatgattacggacgaccacgtgacgatctagataaacggcgcgacaaaggtgacgaaaaaggcgatgacgacacagacaacccaaaagacacgagatataaacttcagtcgatgaaatggggcctggtaccctcctggacgaagagaaatccgggttatgggggcatgatgaagacgataaactgtcgatccgagagtttggcacagggaggtggcctgtggagtagtatgaaggcgaagaagaggtgtattgttgttgcggagggattctacgagtggttgaagaaagatggggcgcgggatagggacaaggttccacattatgttaagaggaaggatggaaggttgatgtgttttgctggcttgtgggatggggtcatttttgaagacgaggaaaccaagcaaacgctctacacatacacaatcatcacgacggactcgaataagcagctgagcttcctgcatgaccggatgccagttatcttcgacaacggatccgaagagctacgcacatggcttgatccgaaccgcaatgagtggtcgattgagttacaatcactgcttaagccgtttaccggggcactagaagtctatccggtgagcaaagatgtgggcaaagtcggaaataatagaccggatttcgtcgttccggtcgactcaaaggacaacaagaggaacattgcgaacttcttcgctaatgcggcggtcaagaaggagatcaagcaggaggttaagcaggaagtgaaagaggaggaacaggtcaagaaagaggaagataacgaaaagtcacacgtcaagaaggaaaccgaagacgagaaaagacccaagaccgagcaacccgagatcgtcatcacgaaagacaaaggcttcgttgcggaagatgagccttatatcaaagctgagaagctcgaggatgacgacagcaatgtacttgccggtatcaagaggaaagctgacgaggagcaagatgagaaaccggctaagaagggacctgctgctgcaccgttaagtaaaggtgcaaatgctgcgacggcgagtgggaagaagacttcgccggtgaagggaaggcagaagatcagcgctacgagtaatggtacgaagagcccaatgaagaagactggcgagcagaagattacgaagtttttcggtaatagccaataagctcatggctggatctttgagcagactgtcagagataatggtgaataaattcgctagacagtaatgtctatttgttctagcaagaatctggacttgtatatatgcgaggtgagatttacattatgaaaaactcggtcggttcggatgaaaagaattggtcctctcttggggcaccttttggggcatagtttcaagaggaacagcattaccatagtatttacagcagatgacctagtgtggtccccatatgaatatgatccttagcagacggaat

SEQ ID NO: 5521 - DNA, 330 bp, Muscodor strobelii
  misc_feature: SGI cDNA ID NO. 561557
  misc_feature: Encodes the peptide sequence at SEQ ID NO 5522
gagcaacccgagatcgtcatcacgaaagacaaaggcttcgttgcggaagatgagccttatatcaaagctgagaagctcgaggatgacgacagcaatgtacttgccggtatcaagaggaaagctgacgaggagcaagatgagaaaccggctaagaagggacctgctgctgcaccgttaagtaaaggtgcaaatgctgcgacggcgagtgggaagaagacttcgccggtgaagggaaggcagaagatcagcgctacgagtaatggtacgaagagcccaatgaagaagactggcgagcagaagattacgaagtttttcggtaatagccaataa

SEQ ID NO: 5522 - protein, 109 aa, Muscodor strobelii
  misc_feature: SGI Peptide ID NO. 561557
EQPEIVITKDKGFVAEDEPYIKAEKLEDDDSNVLAGIKRKADEEQDEKPAKKGPAAAPLSKGANAATASGKKTSPVKGRQKISATSNGTKSPMKKTGEQKITKFFGNSQ

SEQ ID NO: 5523 - DNA, 1971 bp, Muscodor strobelii; identical to SEQ ID NO: 5520
  misc_feature: SGI EST ID NO. CUFF.13984.0
  misc_feature: Variant of the nucleotide sequence at SEQ ID NO 5521

SEQ ID NO: 5524 - DNA, 1413 bp, Muscodor strobelii
  misc_feature: SGI cDNA ID NO. 561558
  misc_feature: Encodes the peptide sequence at SEQ ID NO 5525
atgtgtggacgttactcgctgcatctgcgcccaagcgaaataaggcgaagattacaagatgacaatatgttcgcatttgaatcgcctcccgacccgcccgacgatgacgacggtggcagtagcggagggggaggaggacccggtggcccgagtccgagacagagcttcaattttgcgcctgggtactttggaatggtttatcgtgctgaggtcccagactggagttctgtctttcgatcgatgtctgagcttgatgattacggacgaccacgtgacgatctagataaacggcgcgacaaaggtgacgaaaaaggcgatgacgacacagacaacccaaaagacacgagatataaacttcagtcgatgaaatggggcctggtaccctcctggacgaagagaaatccgggttatgggggcatgatgaagacgataaactgtcgatccgagagtttggcacagggaggtggcctgtggagtagtatgaaggcgaagaagaggtgtattgttgttgcggagggattctacgagtggttgaagaaagatggggcgcgggatagggacaaggttccacattatgttaagaggaaggatggaaggttgatgtgttttgctggcttgtgggatggggtcatttttgaagacgaggaaaccaagcaaacgctctacacatacacaatcatcacgacggactcgaataagcagctgagcttcctgcatgaccggatgccagttatcttcgacaacggatccgaagagctacgcacatggcttgatccgaaccgcaatgagtggtcgattgagttacaatcactgcttaagccgtttaccggggcactagaagtctatccggtgagcaaagatgtgggcaaagtcggaaataatagaccggatttcgtcgttccggtcgactcaaaggacaacaagaggaacattgcgaacttcttcgctaatgcggcggtcaagaaggagatcaagcaggaggttaagcaggaagtgaaagaggaggaacaggtcaagaaagaggaagataacgaaaagtcacacgtcaagaaggaaaccgaagacgagaaaagacccaagaccgagcaacccgagatcgtcatcacgaaagacaaaggcttcgttgcggaagatgagccttatatcaaagctgagaagctcgaggatgacgacagcaatgtacttgccggtatcaagaggaaagctgacgaggagcaagatgagaaaccggctaagaagggacctgctgctgcaccgttaagtaaaggtgcaaatgctgcgacggcgagtgggaagaagacttcgccggtgaagggaaggcagaagatcagcgctacgagtaatggtacgaagagcccaatgaagaagactggcgagcagaagattacgaagtttttcggtaatagccaataa

SEQ ID NO: 5525 - protein, 470 aa, Muscodor strobelii
  misc_feature: SGI Peptide ID NO. 561558
  misc_feature (1)..(297): Pfam Id: PF02586 Pfam Desc: Uncharacterised ACR, COG2135
  misc_feature (122)..(297): Pfam Id: PF02586 Pfam Desc: Uncharacterised ACR, COG2135
  misc_feature (1)..(57): Pfam Id: PF02586 Pfam Desc: Uncharacterised ACR, COG2135
  misc_feature (1)..(466): NCBI GI: 154304827 Blast Desc: BC1G_08999 [Botryotinia fuckeliana B05.10] gi|150853861|gb|EDN29053.1| BC1G_08999 [Botryotinia fuckeliana B05.10]
  misc_feature (6)..(469): NCBI GI: 261358495 Blast Desc: yoqW [Verticillium albo-atrum VaMs.102]
  misc_feature (48)..(466): NCBI GI: 156065757 Blast Desc: SS1G_00889 [Sclerotinia sclerotiorum 1980] gi|154691748|gb|EDN91486.1| SS1G_00889 [Sclerotinia sclerotiorum 1980]
  misc_feature (1)..(468): NCBI GI: 169622274 Blast Desc: SNOG_14356 [Phaeosphaeria nodorum SN15] gi|160704737|gb|EAT78227.2| SNOG_14356 [Phaeosphaeria nodorum SN15]
  misc_feature (1)..(467): NCBI GI: 145229995 Blast Desc: An01g08840 [Aspergillus niger] gi|134055420|emb|CAK37129.1| protein product [Aspergillus niger]
  misc_feature (1)..(466): NCBI GI: 121708545 Blast Desc: DUF159 domain protein [Aspergillus clavatus NRRL 1] gi|119400315|gb|EAW10741.1| DUF159 domain protein [Aspergillus clavatus NRRL 1]
  misc_feature (1)..(469): NCBI GI: 171677845 Blast Desc: protein product [Podospora anserina] gi|170936991|emb|CAP61649.1| protein product [Podospora anserina]
  misc_feature (1)..(466): NCBI GI: 225559025 Blast Desc: DUF159 domain-containing protein [Ajellomyces capsulatus G186AR]
  misc_feature (1)..(466): NCBI GI: 240106748 Blast Desc: CPC735_015330 [Coccidioides posadasii C735 delta SOWgp]
  misc_feature (1)..(468): NCBI GI: 212535066 Blast Desc: DUF159 domain protein [Penicillium marneffei ATCC 18224] gi|210070088|gb|EEA24178.1| DUF159 domain protein [Penicillium marneffei ATCC 18224]
MCGRYSLHLRPSEIRRRLQDDNMFAFESPPDPPDDDDGGSSGGGGGPGGPSPRQSFNFAPGYFGMVYRAEVPDWSSVFRSMSELDDYGRPRDDLDKRRDKGDEKGDDDTDNPKDTRYKLQSMKWGLVPSWTKRNPGYGGMMKTINCRSESLAQGGGLWSSMKAKKRCIVVAEGFYEWLKKDGARDRDKVPHYVKRKDGRLMCFAGLWDGVIFEDEETKQTLYTYTIITTDSNKQLSFLHDRMPVIFDNGSEELRTWLDPNRNEWSIELQSLLKPFTGALEVYPVSKDVGKVGNNRPDFVVPVDSKDNKRNIANFFANAAVKKEIKQEVKQEVKEEEQVKKEEDNEKSHVKKETEDEKRPKTEQPEIVITKDKGFVAEDEPYIKAEKLEDDDSNVLAGIKRKADEEQDEKPAKKGPAAAPLSKGANAATASGKKTSPVKGRQKISATSNGTKSPMKKTGEQKITKFFGNSQ

SEQ ID NO: 5526 - DNA, 1971 bp, Muscodor strobelii; identical to SEQ ID NO: 5520
  misc_feature: SGI EST ID NO. CUFF.13984.0
  misc_feature: Variant of the nucleotide sequence at SEQ ID NO 5524

SEQ ID NO: 5527 - DNA, 552 bp, Muscodor strobelii
  misc_feature: SGI cDNA ID NO. 561559
  misc_feature: Reduced expression when VOC is produced
  misc_feature: Encodes the peptide sequence at SEQ ID NO 5528
atggggattgacgtgactcggcatcatgtgcgcggcacacacagaaaggcgcccaagtcggacaatgtctacctcaagctcctcgtgaagctgtaccgcttcctagcccgccgcaccgactccaacttcaacaaggtcatcctgcgtcgcctcttcatgtcccgcatcaaccgacctcccgtctccctgtcacgtgtcaagagccaaatcggtgacaacaatgacaagaccgtcgtcgttgtcggcaccatcaccgacgacaaccgcctgctcgaggtccccaaggtgaccatcgccgccctgcgcttcaccgccaccgcccgtgcccgcatcctcgctgccggcggtgagaccctgactctcgaccagcttgctctccgtgcccccactggaagcaacactcttctcctccgtggccccaagaacgcccgtgagtccgtcaagcacttcggcttcggtccccacaagcacaagaaacccttcgtccagtccaagggccgcaagttcgagaaggcccgtggtcgcagacgatctcgtggtttcaaggtctaa

SEQ ID NO: 5528 - protein, 183 aa, Muscodor strobelii
  misc_feature: SGI Peptide ID NO. 561559
  misc_feature (11)..(181): Pfam Id: PF00828 Pfam Desc: Eukaryotic ribosomal protein L18
  misc_feature (1)..(183): NCBI GI: 154301020 Blast Desc: BC1G_10648 [Botryotinia fuckeliana B05.10] gi|150856396|gb|EDN31588.1| BC1G_10648 [Botryotinia fuckeliana B05.10]
  misc_feature (1)..(183): NCBI GI: 156043165 Blast Desc: SS1G_10585 [Sclerotinia sclerotiorum 1980] gi|154694973|gb|EDN94711.1| SS1G_10585 [Sclerotinia sclerotiorum 1980]
  misc_feature (1)..(183): NCBI GI: 115385984 Blast Desc: 60S ribosomal protein L18 [Aspergillus terreus NIH2624] gi|114190531|gb|EAU32231.1| 60S ribosomal protein L18 [Aspergillus terreus NIH2624]
  misc_feature (1)..(183): NCBI GI: 255935923 Blast Desc: Pc13g05540 [Penicillium chrysogenum Wisconsin 54-1255] gi|211583608|emb|CAP91623.1| Pc13g05540 [Penicillium chrysogenum Wisconsin 54-1255]
  misc_feature (1)..(183): NCBI GI: 39945004 Blast Desc: MGG_04484 [Magnaporthe grisea 70-15] gi|145011408|gb|EDJ96064.1| MGG_04484 [Magnaporthe grisea 70-15]
  misc_feature (1)..(183): NCBI GI: 46136701 Blast Desc: FG09866.1 [Gibberella zeae PH-1]
  misc_feature (1)..(183): NCBI GI: 67539260 Blast Desc: AN5800.2 [Aspergillus nidulans FGSC A4] gi|40739119|gb|EAA58309.1| conserved [Aspergillus nidulans FGSC A4] gi|259480047|tpe|CBF70823.1| TPA: 60S ribosomal protein L18
  misc_feature (1)..(183): NCBI GI: 121698001 Blast Desc: 60S ribosomal protein L18 [Aspergillus clavatus NRRL 1] gi|119395824|gb|EAW06256.1| 60S ribosomal protein L18 [Aspergillus clavatus NRRL 1]
  misc_feature (1)..(183): NCBI GI: 119480463 Blast Desc: 60S ribosomal protein L18 [Neosartorya fischeri NRRL 181] gi|119408414|gb|EAW18363.1| 60S ribosomal protein L18 [Neosartorya fischeri NRRL 181]
  misc_feature (1)..(183): NCBI GI: 169784098 Blast Desc: [Aspergillus oryzae RIB40] gi|83775255|dbj|BAE65378.1| protein product [Aspergillus oryzae]
  misc_feature: Useful for introducing or modulating the production of volatile compounds
MGIDVTRHHVRGTHRKAPKSDNVYLKLLVKLYRFLARRTDSNFNKVILRRLFMSRINRPPVSLSRVKSQIGDNNDKTVVVVGTITDDNRLLEVPKVTIAALRFTATARARILAAGGETLTLDQLALRAPTGSNTLLLRGPKNARESVKHFGFGPHKHKKPFVQSKGRKFEKARGRRRSRGFKV

SEQ ID NO: 5529 - DNA, 1027 bp, Muscodor strobelii
  misc_feature: SGI EST ID NO. CUFF.14097.1
  misc_feature: Variant of the nucleotide sequence at SEQ ID NO 5527
caattttgaaccaattcgcaacttttcccacacacccgccgcatttgtctggtgtgaacttcttcttcctcatccaccactactaaccaccaacaccacagccaacgagccaacatcaagatggggattgacgtgactcggcatcatgtgcgcggcacacacagaaaggcgcccaagtcggacaatgtctacctcaagctcctcgtgaagctgtaccgcttcctagcccgccgcaccgactccaacttcaacaaggtcatcctgcgtcgcctcttcatgtcccgcatcaaccgacctcccgtctccctgtcacgtgtcaagagccaaatcggtgacaacaatgacaagaccgtcgtcgttgtcggcaccatcaccgacgacaaccgcctgctcgaggtccccaaggtgaccatcgccgccctgcgcttcaccgccaccgcccgtgcccgcatcctcgctgccggcggtgagaccctgactctcgaccagcttgctctccgtgcccccactggaagcaacactcttctcctccgtggccccaagaacgcccgtgagtccgtcaagcacttcggcttcggtccccacaagcacaagaaacccttcgtccagtccaagggccgcaagttcgagaaggcccgtggtcgcagacgatctcgtggtttcaaggtctaagcgaaagcttagctggagttggttgtggaccgggtctcttccgttataccatgaaagcagatgttctgcttctgggagggatgatgttgtctgtttgggactgggatttgcattgctggcgtgtttcggtatcagggaaaacgttcttatgaattgagacgcaatgccatgaaaatatggcttaacacataatctgatcggaatgcaacatgttgtgacccaacactgagtaaattgtgcctgtgaactccatgtttcaactgcctgtgcacgttgtcccgatacggaggcggtaagcatgtaatagccaagagatttcgcatatgacaatgggaaacttgacacgattaagcgg

SEQ ID NO: 5530 - DNA, 987 bp, Muscodor strobelii
  misc_feature: SGI cDNA ID NO. 561560
  misc_feature: Reduced expression when VOC is produced
  misc_feature: Encodes the peptide sequence at SEQ ID NO 5531
atggccaccagctcggaagatgtcatcaaggccaagtactcccctggcaatcgcagcgcgcagctcaaagaattcttctcacaacccgttgtcgcctcgttctgcggcggtggtgtagccggagccgtgtcccgaaccgtcgtatcccccctcgagcgtctcaagatcctcttccaggtgcagagtgccggccacaatgaatacaagctgtcggtgggcaaggccctgggcaaaatgtggcaggaagaaggctggaggggcttcatgcgcggcaacggtaccaactgcattcgcatagtcccctactcggccgtccagttcggcagttacaatctatataggaggcacatcttcgaaagggatgggatagtcatgagccccctggcgaggctttgctgcggtggtgtcgcaggtatcacatccgtttgcttcacgtacccactcgacatcgtccgaacccgactttccatacaatctgcgtcgttcgctgcgctcggcgacggaccgaaaaacaacggcatgtggacaaccttgagattgatgtacaagaatgaaggtggtcttgcagcgttataccgtggcatagtgcctacgatagcgggtgtagctccatacgtcggattaaatttcatgacgtacgagttcgtccgcaagactcttacaccagaaggcgaggagaaccctaacgctggccggaagctgctcgccggtgctatctccggtgctgtggcacagacatgcacctacccatttgacgtgttaaggcggagattccagatcaacaccatgtccggcatgggctatcaatacaagggacttggagacgccatcaaagtcatcgtggcacaagagggcgttagaggcttatataagggcctcgtgccgaacttactcaaggtggccccaagtatggcggctaactggctgagcttcgaaatgacgcgagacttcctggtcagcctcaaggctgagcctatcaacttatag

SEQ ID NO: 5531 - protein, 328 aa, Muscodor strobelii
  misc_feature: SGI Peptide ID NO. 561560
  misc_feature (229)..(322): Pfam Id: PF00153 Pfam Desc: Mitochondrial carrier protein
  misc_feature (29)..(121): Pfam Id: PF00153 Pfam Desc: Mitochondrial carrier protein
  misc_feature (126)..(224): Pfam Id: PF00153 Pfam Desc: Mitochondrial carrier protein
  misc_feature (4)..(321): NCBI GI: 261358503 Blast Desc: solute carrier family 25 member 42 [Verticillium albo-atrum VaMs.102]
  misc_feature (1)..(328): NCBI GI: 256731636 Blast Desc: [Nectria haematococca mpVI 77-13-4]
  misc_feature (20)..(325): NCBI GI: 46136699 Blast Desc: FG09865.1 [Gibberella zeae PH-1]
  misc_feature (15)..(324): NCBI GI: 145603083 Blast Desc: conserved [Magnaporthe grisea 70-15] gi|145011409|gb|EDJ96065.1| conserved [Magnaporthe grisea 70-15]
  misc_feature (1)..(328): NCBI GI: 154301018 Blast Desc: BC1G_10647 [Botryotinia fuckeliana B05.10] gi|150856395|gb|EDN31587.1| BC1G_10647 [Botryotinia fuckeliana B05.10]
  misc_feature (1)..(328): NCBI GI: 156043167 Blast Desc: SS1G_10586 [Sclerotinia sclerotiorum 1980] gi|154694974|gb|EDN94712.1| SS1G_10586 [Sclerotinia sclerotiorum 1980]
  misc_feature (21)..(328): NCBI GI: 85080618 Blast Desc: NCU03989 [Neurospora crassa OR74A] gi|28917643|gb|EAA27338.1| conserved [Neurospora crassa OR74A]
  misc_feature (26)..(321): NCBI GI: 238838815 Blast Desc: Lpz11p [Microsporum canis CBS 113480]
  misc_feature (9)..(321): NCBI GI: 119188381 Blast Desc: CIMG_04238 [Coccidioides immitis RS]
  misc_feature (9)..(321): NCBI GI: 240107854 Blast Desc: Mitochondrial carrier protein [Coccidioides posadasii C735 delta SOWgp]
  misc_feature: Useful for introducing or modulating the production of volatile compounds
MATSSEDVIKAKYSPGNRSAQLKEFFSQPVVASFCGGGVAGAVSRTVVSPLERLKILFQVQSAGHNEYKLSVGKALGKMWQEEGWRGFMRGNGTNCIRIVPYSAVQFGSYNLYRRHIFERDGIVMSPLARLCCGGVAGITSVCFTYPLDIVRTRLSIQSASFAALGDGPKNNGMWTTLRLMYKNEGGLAALYRGIVPTIAGVAPYVGLNFMTYEFVRKTLTPEGEENPNAGRKLLAGAISGAVAQTCTYPFDVLRRRFQINTMSGMGYQYKGLGDAIKVIVAQEGVRGLYKGLVPNLLKVAPSMAANWLSFEMTRDFLVSLKAEPINL

SEQ ID NO: 5532 - DNA, 2123 bp, Muscodor strobelii
  misc_feature: SGI EST ID NO. CUFF.14100.0
  misc_feature: Variant of the nucleotide sequence at SEQ ID NO 5530
cggcaggtaaaaggcttttccttcaaacctaatcgcctccctcacacctacaattttctgctactgttgcattgcagactaaggtgactcttacatgtattattgcttgcaaatgttcagctactactgattttttctctctcttcctctcattgctcacccaccgctccaccgcagttttacgtgatttcttttccagcatcataccaacactcgtttccaatacggccgactcccttagggaccaacaaccctggcatcgcagcagcggcgtctctccacgatcgtgactaaaaaaagcccgccccgagaaacccacccgagctcgcgcctcagcccgggcaacgtcccgactacagccgccgacttgtgatcctctgcgcaagtgactgcaattgtccgacctgcacgacctctgctctacgccctattcctatgcgactctctgcccgggcgatctctgcacgactgactatgtcgccgacaccgctggcgcacccttaacttgcagcattgcgttactacgccgcccctcgctggcgcacccagcatacgttattcctagcatcatcagcttgtttttggagaagctctcaacgaatgctctctcaatctagacaccaataatcagactctccattccctacggagaccctctccactccccccagagccttgcgcttcttcttcctggatcgccatattcccattggatattcaatatggccaccagctcggaagatgtcatcaaggccaagtactcccctggcaatcgcagcgcgcagctcaaagaattcttctcacaacccgttgtcgcctcgttctgcggcggtggtgtagccggagccgtgtcccgaaccgtcgtatcccccctcgagcgtctcaagatcctcttccaggtgcagagtgccggccacaatgaatacaagctgtcggtgggcaaggccctgggcaaaatgtggcaggaagaaggctggaggggcttcatgcgcggcaacggtaccaactgcattcgcatagtcccctactcggccgtccagttcggcagttacaatctatataggaggcacatcttcgaaagggatgggatagtcatgagccccctggcgaggctttgctgcggtggtgtcgcaggtatcacatccgtttgcttcacgtacccactcgacatcgtccgaacccgactttccatacaatctgcgtcgttcgctgcgctcggcgacggaccgaaaaacaacggcatgtggacaaccttgagattgatgtacaagaatgaaggtggtcttgcagcgttataccgtggcatagtgcctacgatagcgggtgtagctccatacgtcggattaaatttcatgacgtacgagttcgtccgcaagactcttacaccagaaggcgaggagaaccctaacgctggccggaagctgctcgccggtgctatctccggtgctgtggcacagacatgcacctacccatttgacgtgttaaggcggagattccagatcaacaccatgtccggcatgggctatcaatacaagggacttggagacgccatcaaagtcatcgtggcacaagagggcgttagaggcttatataagggcctcgtgccgaacttactcaaggtggccccaagtatggcggctaactggctgagcttcgaaatgacgcgagacttcctggtcagcctcaaggctgagcctatcaacttatagacttgcagcaacatcatcgccagcgagtgcatccttattatccaacgactacagtcaaactacttgttatattagatataaacattacgaccatcatgccttatacggagcaggcgatagatcggctgaaggagtttgctgagagccaatccacaagaccggggacagggaagtgaggtcgaaccgcgtgcaacgcacagcatgggacatagagcaatccggaaaaggattcacattgcagaagcaacttgaggatttgtattggatcccgaagacagctagaggaggcctacataccgttgtaccaggacaacaggggcgcatattactacgtagaggagcgggagcttatggtatgggccttgcatatagacggtgtgaataaaccgaatgcatttagagagccatgttctg

SEQ ID NO: 5533 - DNA, 609 bp, Muscodor strobelii
  misc_feature: SGI cDNA ID NO. 561561
  misc_feature: Reduced expression when VOC is produced
  misc_feature: Encodes the peptide sequence at SEQ ID NO 5534
atgggctcccgtggtggcacgactctgtacgtgactggcttcagccagggcacccgcgctcgcgacctcgcctacgagttcgaacgctatggccgccttgttcgttgtgacattccggcccctcgcagcgcctcatcccgtctcttcgcctttgtcgagtatgaggatcgccgcgatgccgatgatgcgtaccacgagatgcacaataaacgaatcggtcgagacgataccttgaagatcgagtgggctcgcacccctccttctgcctcgtggcgcttcgactctggtcgtgaccgcgatcgtcgtgatggcggtcgtggtggtcgctctccccgccgcggtcgctctccctcgccccgtcgcagcacccgcgactactcgccccgcaaggatgaccgtaccgaccgcagcgaccgtcgtgaccgcgaccgtgactatgaccgtgaccgtcgcgacacccgcgatcgctctcgcagccctgacactcgtgaccgagaccgggatgaccgggacgatcgtgatcgccgaacagagacagcaaatggtgatgatcgcaaagcggctgactcccctccaccacaacacgatgacctggacgttgctgattga

SEQ ID NO: 5534 - protein, 202 aa, Muscodor strobelii
  misc_feature: SGI Peptide ID NO. 561561
  misc_feature (9)..(80): Pfam Id: PF00076 Pfam Desc: RNA recognition motif. (a.k.a. RRM, RBD, or RNP domain)
  misc_feature (3)..(202): NCBI GI: 156043169 Blast Desc: SS1G_10587 [Sclerotinia sclerotiorum 1980] gi|154694975|gb|EDN94713.1| SS1G_10587 [Sclerotinia sclerotiorum 1980]
  misc_feature (3)..(202): NCBI GI: 145603085 Blast Desc: MGG_04482 [Magnaporthe grisea 70-15] gi|145011410|gb|EDJ96066.1| MGG_04482 [Magnaporthe grisea 70-15]
  misc_feature (3)..(202): NCBI GI: 46136697 Blast Desc: FG09864.1 [Gibberella zeae PH-1]
  misc_feature (1)..(202): NCBI GI: 238838817 Blast Desc: pre-mRNA-splicing factor srp1 [Microsporum canis CBS 113480]
  misc_feature (3)..(202): NCBI GI: 171677875 Blast Desc: protein product [Podospora anserina] gi|170937006|emb|CAP61664.1| protein product [Podospora anserina]
  misc_feature (3)..(202): NCBI GI: 256731635 Blast Desc: NECHADRAFT_102628 [Nectria haematococca mpVI 77-13-4]
  misc_feature (3)..(202): NCBI GI: 164426673 Blast Desc: NCU11265 [Neurospora crassa OR74A] gi|157071430|gb|EAA27339.2| [Neurospora crassa OR74A]
  misc_feature (1)..(101): NCBI GI: 169612718 Blast Desc: SNOG_09484 [Phaeosphaeria nodorum SN15] gi|160702568|gb|EAT82749.2| SNOG_09484 [Phaeosphaeria nodorum SN15]
  misc_feature (3)..(106): NCBI GI: 154301034 Blast Desc: BC1G_10655 [Botryotinia fuckeliana B05.10] gi|150856403|gb|EDN31595.1| BC1G_10655 [Botryotinia fuckeliana B05.10]
  misc_feature (1)..(100): NCBI GI: 255935919 Blast Desc: Pc13g05520 [Penicillium chrysogenum Wisconsin 54-1255] gi|211583606|emb|CAP91621.1| Pc13g05520 [Penicillium chrysogenum Wisconsin 54-1255]
  misc_feature: Useful for introducing or modulating the production of volatile compounds
MGSRGGTTLYVTGFSQGTRARDLAYEFERYGRLVRCDIPAPRSASSRLFAFVEYEDRRDADDAYHEMHNKRIGRDDTLKIEWARTPPSASWRFDSGRDRDRRDGGRGGRSPRRGRSPSPRRSTRDYSPRKDDRTDRSDRRDRDRDYDRDRRDTRDRSRSPDTRDRDRDDRDDRDRRTETANGDDRKAADSPPPQHDDLDVAD

SEQ ID NO: 5535 - DNA, 1512 bp, Muscodor strobelii
  misc_feature: SGI EST ID NO. CUFF.14213.3
  misc_feature: Variant of the nucleotide sequence at SEQ ID NO 5533
aaaacatcatcacctctgcggctgggagttcttcctctagtcatccacaacatcttctcgcagcatcagcgcctgcgcagacatccccgcgcgtcatcaacattacataacccatccctctaatcgtcctttggacctcctcttcatcactcctatcagtcacttcaacgctgcccgttgctgctgctaagcgacgatgggctcccgtggtggcacgactctgtacgtgactggcttcagccagggcacccgcgctcgcgacctcgcctacgagttcgaacggtatgtcagctatcctcgtcgtccagtcgtccacggccgccctgatccccggtgatcatcctcgatcgaccgcccctctcgccctccccccttctgcccatccatctgccacggctactcggcatctcgcggcttgctgtcccccgtcccctccgtcgtccgcgcccgcgtcctcgtcatcgtccccccgtcgttcgttgctgccctagccggtcgtcacgccatgtctttctctaccgccaccccacgccctctcgcccgcgcgcccatcctccatctctgccccgtcgatcgagcggtcggtcgttgtcgcagttgtctcgcgcgcgccgtgcagcctgtctctcgtgccacggccacgatgccatcacgcacatgatgcgcattaccgggaaagtacgcaagcctctggagatgctgacgtcgttgtccctctagctatggccgccttgttcgttgtgacattccggcccctcgcagcgcctcatcccgtctcttcgcctttgtcgagtatgaggatcgccgcgatgccgatgatgcgtaccacgagatgcacaataaacgaatcggtcgagacgataccttgaagatcgagtgggctcgcacccctccttctgcctcgtggcgcttcgactctggtcgtgaccgcgatcgtcgtgatggcggtcgtggtggtcgctctccccgccgcggtcgctctccctcgccccgtcgcagcacccgcgactactcgccccgcaaggatgaccgtaccgaccgcagcgaccgtcgtgaccgcgaccgtgactatgaccgtgaccgtcgcgacacccgcgatcgctctcgcagccctgacactcgtgaccgagaccgggatgaccgggacgatcgtgatcgccgaacagagacagcaaatggtgatgatcgcaaagcggctgactcccctccaccacaacacgatgacctggacgttgctgattgataggtccacactaccgagtgaccgttacgtatgttgttccgtgcaagatagcaagcagcagaggatgtggtgggtagccggcgtgggtatacggtctcgctttcttatctctcttacgtctagcccgggaaaaatgtatttgtaggttaaacacatgcttcaccttgagtgcttcgggtttcattgtagcgtggccgcgacttgcgagccaatgggaaaagaaaaagatagctaccaaaatgacaagttcaagtgtacagtgagcgccg

SEQ ID NO: 5536 - DNA, 1065 bp, Muscodor strobelii
  misc_feature: SGI cDNA ID NO. 561562
  misc_feature: Encodes the peptide sequence at SEQ ID NO 5537
atgttactaccacccaccaagtctgtagatgctcagaatccgtcctcttctgatgcaaaccaggctgaaaaccgatatcgcaaaaacatatttgcagagctcaccaagaatgcaacccctagacacatgtccaggaaccagtattcctcaaagaacgtcaattcaaggggtcctcgctacggcacgtgggcagaactgagccaatatgagccccctacttcccatcacatccgaacagagctaccaaaatcaagaccttttcttcacgagcttgtgggggcatcttcccggatgactgggaagcgaaagcccatctgtacagaggacagactcgactgctccaaggagcaaaggataccaagaagatgccagacgaaatctcctcaattagggaaaaattgtcctagctatgctgaaaaactggctcaggacggccaagtgtgttgtcgcgcgaagatcttccttcgcgacgtatacgaagtcctcaacgccaagcctggactcaaagcccgcttgcccaacgacttccgccgtactgtcatcacggactgcatcttcaattacaaagtcgatggcggaaaattcaagatcgagctagatgagctcagcatcaaggagatcctcgatgacaacattacccaccagggatctaccatcacctctctagatgaagaggatggagccaacgaagtcaatggagatggtattggtgcttcgggtccttctggcgctcacactgcctgggatgaagtatgcgctacatatctgcgtctcagaaaccagtatctagccgatggatccgacaacaccaagctcatcaacgagcgccgcgacttgcccagtatgcgaaggctacagaacgcgctgcggagagacgtcagggcccaggatctcggaacttccacgaaggccgcgaaggggaaaacgacgatgggagggttggagtttctcggagacatcattctgaagactcttgcaacaatagcagtcatggtgcagtatcccatctaccctgagggcggaaggcggcaagcgagtttttgcctgcgccaattgcgctggtag

SEQ ID NO: 5537 - protein, 354 aa, Muscodor strobelii
  misc_feature: SGI Peptide ID NO. 561562
MLLPPTKSVDAQNPSSSDANQAENRYRKNIFAELTKNATPRHMSRNQYSSKNVNSRGPRYGTWAELSQYEPPTSHHIRTELPKSRPFLHELVGASSRMTGKRKPICTEDRLDCSKEQRIPRRCQTKSPQLGKNCPSYAEKLAQDGQVCCRAKIFLRDVYEVLNAKPGLKARLPNDFRRTVITDCIFNYKVDGGKFKIELDELSIKEILDDNITHQGSTITSLDEEDGANEVNGDGIGASGPSGAHTAWDEVCATYLRLRNQYLADGSDNTKLINERRDLPSMRRLQNALRRDVRAQDLGTSTKAAKGKTTMGGLEFLGDIILKTLATIAVMVQYPIYPEGGRRQASFCLRQLRW

SEQ ID NO: 5538 - DNA, 1143 bp, Muscodor strobelii
  misc_feature: SGI cDNA ID NO. 561563
  misc_feature: Encodes the peptide sequence at SEQ ID NO 5539
atggttgccttctcgaagttcgccgtcggtgcggcctccttgttcgctagctacacgaccgctcaccccggtgagaagcatagtgattctcacatcaagcgtgagattcttgctcgggacaatgctgctgctgtgggggctcgttcactctcatcctgctctaatggagcagcagctcaggctttgaaggcgcgctctattaagcggcgtgctgagcagctgaagaacatccgtcaaaagcgtggtatcatgactcagtcgagaaaaggcaagaggacattcgaagaccttcaggcttacgaggccatcaaccacaatatgaccgacgccgtctcgtacaacccatttactcctctcgaagacgtcttctctgccaacacaagctgcgtcatggcgccatatatcaccgacggaccatactacgtcgtaggcgagaagcttcggtcaaatgtgaaggaatccgagttcagcgagggtgtcgacttgttccttgagattcagtacatcgacgtcaacacctgcgaagcaatcccatccatggcgatcgatatctggaactgcaacgcaactggtgtctactcgggtgttgaatccggtcagggtggactgaacactacgttcctgcgcggcattcagctcactgactttgagggcgtcgctacgttcgagacgattttccccggccactacgaggggcgcgctccgcacacccatctcctagcgcacacaaacgcctcggtgcaatcaaacggcaccatttccgtctacggagcccccgtctcacacattggtcaactcttctggccagaggacctccgtgccgaagttgaggtgaacgagccatatgcaagtaacacccaagagttgactacgaacgacgaggacatgtggtcgatcctgcaagccgactctaattttgatcctatcccacaattcgtgtacctaggcgacagtattgaggatgggctgttcgcgtggattcagattggtatcaatggttccgctgactacaccacggatgattattatggtattgctgcgtactatgatagtgaaggtggtcactcaacgggcttcacgattggtggtgggggcagtaatggaacggcaccaggcaatgggactgctcctccctcgtcttaa

SEQ ID NO: 5539 - protein, 380 aa, Muscodor strobelii
  misc_feature: SGI Peptide ID NO. 561563
  misc_feature (136)..(277): Pfam Id: PF00775 Pfam Desc: Dioxygenase
  misc_feature (5)..(356): NCBI GI: 256721882 Blast Desc: NECHADRAFT_92188 [Nectria haematococca mpVI 77-13-4]
  misc_feature (14)..(356): NCBI GI: 46118107 Blast Desc: FG04685.1 [Gibberella zeae PH-1]
  misc_feature (1)..(379): NCBI GI: 154299611 Blast Desc: BC1G_10768 [Botryotinia fuckeliana B05.10] gi|150857260|gb|EDN32452.1| BC1G_10768 [Botryotinia fuckeliana B05.10]
  misc_feature (22)..(377): NCBI GI: 70985996 Blast Desc: GPI anchored dioxygenase [Aspergillus fumigatus Af293] gi|66846130|gb|EAL86463.1| GPI anchored dioxygenase, [Aspergillus fumigatus Af293] gi|159128367|gb|EDP53482.1| GPI anchored A1163]
  misc_feature (4)..(355): NCBI GI: 238482919 Blast Desc: GPI anchored dioxygenase, [Aspergillus flavus NRRL3357] gi|220700748|gb|EED57086.1| GPI anchored dioxygenase, [Aspergillus flavus NRRL3357]
  misc_feature (4)..(355): NCBI GI: 169766220 Blast Desc: [Aspergillus oryzae RIB40] gi|83765436|dbj|BAE55579.1| protein product [Aspergillus oryzae]
  misc_feature (22)..(377): NCBI GI: 119473919 Blast Desc: GPI anchored dioxygenase, [Neosartorya fischeri NRRL 181] gi|119406988|gb|EAW16938.1| GPI anchored dioxygenase, [Neosartorya fischeri NRRL 181]
  misc_feature (21)..(355): NCBI GI: 145236403 Blast Desc: An06g00210 [Aspergillus niger] gi|134075303|emb|CAK44937.1| protein product [Aspergillus niger]
  misc_feature (22)..(355): NCBI GI: 67538316 Blast Desc: AN5328.2 [Aspergillus nidulans FGSC A4] gi|40743298|gb|EAA62488.1| AN5328.2 [Aspergillus nidulans FGSC A4] gi|259485231|tpe|CBF82093.1| TPA: GPI anchored dioxygenase,
  misc_feature (1)..(357): NCBI GI: 156030764 Blast Desc: SS1G_14321 [Sclerotinia sclerotiorum 1980] gi|154700712|gb|EDO00451.1| SS1G_14321 [Sclerotinia sclerotiorum 1980]
MVAFSKFAVGAASLFASYTTAHPGEKHSDSHIKREILARDNAAAVGARSLSSCSNGAAAQALKARSIKRRAEQLKNIRQKRGIMTQSRKGKRTFEDLQAYEAINHNMTDAVSYNPFTPLEDVFSANTSCVMAPYITDGPYYVVGEKLRSNVKESEFSEGVDLFLEIQYIDVNTCEAIPSMAIDIWNCNATGVYSGVESGQGGLNTTFLRGIQLTDFEGVATFETIFPGHYEGRAPHTHLLAHTNASVQSNGTISVYGAPVSHIGQLFWPEDLRAEVEVNEPYASNTQELTTNDEDMWSILQADSNFDPIPQFVYLGDSIEDGLFAWIQIGINGSADYTTDDYYGIAAYYDSEGGHSTGFTIGGGGSNGTAPGNGTAPPSS

SEQ ID NO: 5540 - DNA, 2160 bp, Muscodor strobelii
  misc_feature: SGI EST ID NO. CUFF.14018.0
  misc_feature: Variant of the nucleotide sequence at SEQ ID NO 5538
tttccacccccggtcatcaaatgccgtacgagcctcaaaaaacctcagtacttcaaggttatacataggctctcgtcgttgtttcctacacgctcactggtcaatggcaagctggcagggtcgaattcctgtcaacggagatccttgcagaccacattactaccgcccctctcgatcatctccacaggacgatatttcatgcacattcgacccatcttgcgaatcatgaacggccaaatttcgaagtgggctagcattgcctccttcatgattggagcgtgaagagggcgacggcgacttgcgcatacgtacgtctagaaaatagtcctgggtctatgccactgcgccattagagtgatgcgaatacattggagtgtcgagagtgtcaaagtagaccagtatggagaaccagtgtgttgtcagggggaaatgtcgatgtagaaaggcgaatcgaaacattatttaagattcagacgatcttctctttgacagccaaccttgatacaccatcctcactcgtgaaccagtcgtgacattgatcttcactgctcaatcacttgctctcgtttcatcttctcagccttacgacctgtataagtccctcgctccaacatcatggttgccttctcgaagttcgccgtcggtgcggcctccttgttcgctagctacacgaccgctcaccccggtgagaagcatagtgattctcacatcaagcgtgagattcttgctcgggacaatgctgctgctgtgggggctcgttcactctcatcctgctctaatggagcagcagctcaggctttgaaggcgcgctctattaagcggcgtgctgagcagctgaagaacatccgtcaaaagcgtggtatcatgactcagtcgagaaaaggcaagaggacattcgaagaccttcaggcttacgaggccatcaaccacaatatgaccgacgccgtctcgtacaacccatttactcctctcgaagacgtcttctctgccaacacaagctgcgtcatggcgccatatatcaccgacggaccatactacgtcgtaggcgagaagcttcggtcaaatgtgaaggaatccgagttcagcgagggtgtcgacttgttccttgagattcagtacatcgacgtcaacacctgcgaagcaatcccatccatggcgatcgatatctggaactgcaacgcaactggtgtctactcgggtgttgaatccggtcagggtggactgaacactacgttcctgcgcggcattcagctcactgactttgagggcgtcgctacgttcgagacgattttccccggccactacgaggggcgcgctccgcacacccatctcctagcgcacacaaacgcctcggtgcaatcaaacggcaccatttccgtctacggagcccccgtctcacacattggtcaactcttctggccagaggacctccgtgccgaagttgaggtgaacgagccatatgcaagtaacacccaagagttgactacgaacgacgaggacatgtggtcgatcctgcaagccgactctaattttgatcctatcccacaattcgtgtacctaggcgacagtattgaggatgggctgttcgcgtggattcagattggtatcaatggttccgctgactacaccacggatgattattatggtattgctgcgtactatgatagtgaaggtggtcactcaacgggcttcacgattggtggtgggggcagtaatggaacggcaccaggcaatgggactgctcctccctcgtcttaagacatcgataggagaggtgtgacagaagtggtagaaccaaactgtgaatcatcgggcatatgagtttggatacaagtggcatatagatttcaaaatattgtctcaattagacggtcagcatcagacgacgattatcatctcatcaatatttcgcactgatattacagtcagagagccaccaatcacgctagagtgggcctcaaggtgtcttgcaaatttgttcttacggaggcgggagactcgtgatcgtggaaccgggaggaagtgctgcacatacccatctggaagggaaagcaattaggatgactgtatctgactaccgaattggcttccggataatcaacgtatatagacactcctgaaccccaatgttaggtttcaccgagcatggcgtattacctc

SEQ ID NO: 5541 - DNA, 1953 bp, Muscodor strobelii
  misc_feature: SGI cDNA ID NO. 561564
  misc_feature: Encodes the peptide sequence at SEQ ID NO 5542
atgaatgttcttaagttgcagaggaaatatcctcaattccagcaagatgtcatcttcagcctcagcgatgctttccggaaactagacgtcgacgataaaggctatattgatgaagccactgccatcaaggccacccagcagagcgagagacagccgtacgatgtcgtcagacaggccctgaaggaagtcgagctcgattcatcgcggagagtcgagttagaagactacgttgatcttgtcgcaaaactccgagaatcctcacccgcgcagaagcgcatgagcactggcggctccggacccttatcgcccgcaggtgttgtcgcacagaggacaggtggcggtggccatgtatccaaaggtagtgtcggaaagatccatgtccagggctccaatgccaatgtcacccatactattaacgaagacgagcgcaccgaattcacgcgtcatatcaatgctgttctcgcaggcgatgcagacattggcgcccgcctgccattccctacagacactttcgagatgttcgacgagtgcaaggacgggttggtgctcgccaagctcatcaacgacagtgtgcccgacaccatcgacgagcgtgtgctcaatgtagcagggagaaagatcaagtcgctcaatgctttccacatgactgagaacaacaacatagtcatcgaatcagccaagggtattggctgctctgtagtcaacattggtagtggtgatatcatcgagggccgtgagcatctgatcttgggtcttatttggcagatcattcgcagaggtctccttggcaagattgatatcaaactccaccccgagttgtaccgacttctcgaggaggacgagaccctggagcagttccttcgcctccccccagagcaaatcctcctgcgatggttcaactaccaactcaaggcagctggatggcaccgaacagtttcgaacttctcgagcgatgtgaaggatggcgagaactacgcagttctccttgcacaaattggaaaggattatggctgctcacgagcacctctgcagacgcgcgatctactacagcgtgccgaggaggttttggttgactcggacaagctagactgccgcaagttcctgactccaacatcgttagttgctggaaacccgaagctcaatttggcctttgttgccaatctgttcaacaaccacccgtcgctcgatcctatcacagaggaggagaagcaagaagtggaagacttcgatgccgagggagaacgagaggcacgagtcttcacgctgtggctcaacagtctggacgtccaacccgctatcgtatccttcttcgatgaccttagagacggtactattctgatgcaagcttacgataaggtcatcaagggctccgtgaactggagacacgtgaacaagcggcccgccaacggtagtgaacttatgagattcaaggccgtcgagaacaccaactatgccgttgaacttggcaagcagaatggcttctcccttgttggtattcagggtgcagacattaccgacggccaaaagatgttgaccttgggattggtctggcagctcatgcgaaaggacatcactttgacgctttccgcactcgcccaacgcctaggcaagcgtgagattacggacgcggagatggtgaagtgggcgaatggcatgtctcaaaagggtggaagaaactcgtcagttcgatctttcaaggacgcttcaatcggcagtggtgtcttcttccttgatgtgcttaacggcatgaagagcagttacgttgactatgacctcgtgacccctggccgcacggatgaggaggcatatatgaatgccaagctcagtatcagtattgccagaaagatgggtgcgacgatctggcttgtccctgaggatatttgccaggttcgcagccgattagtcaccacattcatcggttctttaatggctacgagcgagaggatgcagtag

SEQ ID NO: 5542 - protein, 650 aa, Muscodor strobelii
  misc_feature: SGI Peptide ID NO. 561564
  misc_feature (141)..(261): Pfam Id: PF00307 Pfam Desc: Calponin homology (CH) domain
  misc_feature (415)..(524): Pfam Id: PF00307 Pfam Desc: Calponin homology (CH) domain
  misc_feature (290)..(393): Pfam Id: PF00307 Pfam Desc: Calponin homology (CH) domain
  misc_feature (540)..(647): Pfam Id: PF00307 Pfam Desc: Calponin homology (CH) domain
  misc_feature (1)..(649): NCBI GI: 145603093 Blast Desc: MGG_04478 [Magnaporthe grisea 70-15] gi|145011414|gb|EDJ96070.1| MGG_04478 [Magnaporthe grisea 70-15]
  misc_feature (1)..(649): NCBI GI: 256731634 Blast Desc: [Nectria haematococca mpVI 77-13-4]
  misc_feature (1)..(650): NCBI GI: 164426677 Blast Desc: fimbrin [Neurospora crassa OR74A] gi|157071432|gb|EAA27341.2| fimbrin [Neurospora crassa OR74A]
  misc_feature (1)..(650): NCBI GI: 154310094 Blast Desc: BC1G_06967 [Botryotinia fuckeliana B05.10] gi|150851528|gb|EDN26721.1| BC1G_06967 [Botryotinia fuckeliana B05.10]
  misc_feature (1)..(650): NCBI GI: 156043183 Blast Desc: conserved [Sclerotinia sclerotiorum 1980] gi|154694982|gb|EDN94720.1| conserved [Sclerotinia sclerotiorum 1980]
  misc_feature (1)..(649): NCBI GI: 240272940 Blast Desc: fimbrin [Ajellomyces capsulatus H143]
  misc_feature (1)..(649): NCBI GI: 226281974 Blast Desc: fimbrin [Paracoccidioides brasiliensis Pb01]
  misc_feature (1)..(649): NCBI GI: 261197105 Blast Desc: actin-bundling protein Sac6 [Ajellomyces dermatitidis SLH14081] gi|239595585|gb|EEQ78166.1| actin-bundling protein Sac6 [Ajellomyces dermatitidis SLH14081]
  misc_feature (1)..(649): NCBI GI: 225559520 Blast Desc: fimbrin [Ajellomyces capsulatus G186AR]
  misc_feature (1)..(649): NCBI GI: 239606509 Blast Desc: actin-bundling protein Sac6 [Ajellomyces dermatitidis ER-3]
MNVLKLQRKYPQFQQDVIFSLSDAFRKLDVDDKGYIDEATAIKATQQSERQPYDVVRQALKEVELDSSRRVELEDYVDLVAKLRESSPAQKRMSTGGSGPLSPAGVVAQRTGGGGHVSKGSVGKIHVQGSNANVTHTINEDERTEFTRHINAVLAGDADIGARLPFPTDTFEMFDECKDGLVLAKLINDSVPDTIDERVLNVAGRKIKSLNAFHMTENNNIVIESAKGIGCSVVNIGSGDIIEGREHLILGLIWQIIRRGLLGKIDIKLHPELYRLLEEDETLEQFLRLPPEQILLRWFNYQLKAAGWHRTVSNFSSDVKDGENYAVLLAQIGKDYGCSRAPLQTRDLLQRAEEVLVDSDKLDCRKFLTPTSLVAGNPKLNLAFVANLFNNHPSLDPITEEEKQEVEDFDAEGEREARVFTLWLNSLDVQPAIVSFFDDLRDGTILMQAYDKVIKGSVNWRHVNKRPANGSELMRFKAVENTNYAVELGKQNGFSLVGIQGADITDGQKMLTLGLVWQLMRKDITLTLSALAQRLGKREITDAEMVKWANGMSQKGGRNSSVRSFKDASIGSGVFFLDVLNGMKSSYVDYDLVTPGRTDEEAYMNAKLSISIARKMGATIWLVPEDICQVRSRLVTTFIGSLMATSERMQ

SEQ ID NO: 5543 - DNA, 2674 bp, Muscodor strobelii
  misc_feature: SGI EST ID NO. CUFF.14164.2
  misc_feature: Variant of the nucleotide sequence at SEQ ID NO 5541
caactttctgcctcaaccacgttggacctgactgttggatggatacgccggattctcataatccacgcgcctcgattcctttccattcccaataaatattctgctagaggcatccattgttgcaccttcattaaagggctccaaaagtcctgcgcaaatcccaaatcctgggtcttcgttccaattaaaatctacgcaatcatcactctcctcactttgcgccatacttgtcccatccgcgcatcgccgcaatcatgaatgttcttaagttgcagaggaaatatcctcaattccagcaagatgtcatcttcagcctcagcgatgctttccggaaactagacgtcgacgataaaggctatattgatgaagccactgccatcaaggccacccagcagagcgagagacagccgtacgatgtcgtcagacaggccctgaaggaagtcgagctcgattcatcgcggagagtcgagttagaagactacgttgatcttgtcgcaaaactccgagaatcctcacccgcgcagaagcgcatgagcactggcggctccggacccttatcgcccgcaggtgttgtcgcacagaggacaggtggcggtggccatgtatccaaaggtagtgtcggaaagatccatgtccagggctccaatgccaatgtcacccatactattaacgaagacgagcgcaccgaattcacgcgtcatatcaatgctgttctcgcaggcgatgcagacattggcgcccgcctgccattccctacagacactttcgagatgttcgacgagtgcaaggacgggttggtgctcgccaagctcatcaacgacagtgtgcccgacaccatcgacgagcgtgtgctcaatgtagcagggagaaagatcaagtcgctcaatgctttccacatgactgagaacaacaacatagtcatcgaatcagccaagggtattggctgctctgtagtcaacattggtagtggtgatatcatcgagggccgtgagcatctgatcttgggtcttatttggcagatcattcgcagaggtctccttggcaagattgatatcaaactccaccccgagttgtaccgacttctcgaggaggacgagaccctggagcagttccttcgcctccccccagagcaaatcctcctgcgatggttcaactaccaactcaaggcagctggatggcaccgaacagtttcgaacttctcgagcgatgtgaaggatggcgagaactacgcagttctccttgcacaaattggaaaggattatggctgctcacgagcacctctgcagacgcgcgatctactacagcgtgccgaggaggttttggttgactcggacaagctagactgccgcaagttcctgactccaacatcgttagttgctggaaacccgaagctcaatttggcctttgttgccaatctgttcaacaaccacccgtcgctcgatcctatcacagaggaggagaagcaagaagtggaagacttcgatgccgagggagaacgagaggcacgagtcttcacgctgtggctcaacagtctggacgtccaacccgctatcgtatccttcttcgatgaccttagagacggtactattctgatgcaagcttacgataaggtcatcaagggctccgtgaactggagacacgtgaacaagcggcccgccaacggtagtgaacttatgagattcaaggccgtcgagaacaccaactatgccgttgaacttggcaagcagaatggcttctcccttgttggtattcagggtgcagacattaccgacggccaaaagatgttgaccttgggattggtctggcagctcatgcgaaaggacatcactttgacgctttccgcactcgcccaacgcctaggcaagcgtgagattacggacgcggagatggtgaagtgggcgaatggcatgtctcaaaagggtggaagaaactcgtcagttcgatctttcaaggacgcttcaatcggcagtggtgtcttcttccttgatgtgcttaacggcatgaagagcagttacgttgactatgacctcgtgacccctggccgcacggatgaggaggcatatatgaatgccaagctcagtatcagtattgccagaaagatgggtgcgacgatctggcttgtccctgaggatatttgccaggttcgcagccgattagtcaccacattcatcggttctttaatggctacgagcgagaggatgcagtagatgccatcagttctctataaatttggggcctcgtactcgccttagtgttacagtacgacagataaacggtatcggaaaagttccttgggtggtacgaagagatgtcaacacgaatggaaatgattattagccttgttgtattgagagacttgaatttcaattcaagaaatgggaagaaaaatgtttgaaggacagtgaaaccgtcgtcatgtacacgtgatcccgcatatcatctctatttgggggcatgttagcccctgaacatgcattcgtacgcgtctctggaactctagctcgcctagtgattccaagagcatctgtcatcccatgtcaagcggcactcacaatactcgtggttcttttcaggtagtctgagacttgccattcacttatagatgaatcgatcagttcgcgattcgatgatttcaagggcaagttacaattgatacacatggggagcggcgtcg

SEQ ID NO: 5544 - DNA, 1968 bp, Muscodor strobelii
  misc_feature: SGI cDNA ID NO. 561565
  misc_feature: Elevated expression when VOC is produced
  misc_feature: Encodes the peptide sequence at SEQ ID NO 5545
atgaatgttcttaagttgcagaggaaatatcctcaattccagcaagatgtcatcttcagcctcagcgatgctttccggaaactagacgtcgacgataaaggctatattgatgaagccactgccatcaaggccacccagcagagcgagagacagccgtacgatgtcgtcagacaggccctgaaggaagtcgagctcgattcatcgcggagagtcgagttagaagactacgttgatcttgtcgcaaaactccgagaatcctcacccgcgcagaagcgcatgagcactggcggctccggacccttatcgcccgcaggtgttgtcgcacagaggacaggtggcggtggccatgtatccaaaggtagtgtcggaaagatccatgtccagggctccaatgccaatgtcacccatactattaacgaagacgagcgcaccgaattcacgcgtcatatcaatgctgttctcgcaggcgatgcagacattggcgcccgcctgccattccctacagacactttcgagatgttcgacgagtgcaaggacgggttggtgctcgccaagctcatcaacgacagtgtgcccgacaccatcgacgagcgtgtgctcaatgtagcagggagaaagatcaagtcgctcaatgctttccacatgactgagaacaacaacatagtcatcgaatcagccaagggtattggctgctctgtagtcaacattggtagtggtgatatcatcgagggccgtgagcatctgatcttgggtcttatttggcagatcattcgcagaggtctccttggcaagattgatatcaaactccaccccgagttgtaccgacttctcgaggaggacgagaccctggagcagttccttcgcctccccccagagcaaatcctcctgcgatggttcaactaccaactcaaggcagctggatggcaccgaacagtttcgaacttctcgagcgatgtgaaggatggcgagaactacgcagttctccttgcacaaattggaaaggattatggctgctcacgagcacctctgcagacgcgcgatctactacagcgtgccgaggaggttttggttgactcggacaagctagactgccgcaagttcctgactccaacatcgttagttgctggaaacccgaagctcaatttggcctttgttgccaatctgttcaacaaccacccgtcgctcgatcctatcacagaggaggagaagcaagaagtggaagacttcgatgccgagggagaacgagaggcacgagtcttcacgctgtggctcaacagtctggacgtccaacccgctatcgtatccttcttcgatgaccttagagacggtactattctgatgcaagcttacgataaggtcatcaagggctccgtgaactggagacacgtgaacaagcggcccgccaacggtagtgaacttatgagattcaaggccgtcgagaacaccaactatgccgttgaacttggcaagcagaatggcttctcccttgttggtattcagggtgcagacattaccgacggccaaaagatgttgaccttgggattggtctggcagctcatgcgaaaggacatcactttgacgctttccgcactcgcccaacgcctaggcaagcgtgagattacggacgcggagatggtgaagtgggcgaatggcatgtctcaaaagggtggaagaaactcgtcagttcgatctttcaaggacgcttcaatcggcagtggtgtcttcttccttgatgtgcttaacggcatgaagagcagttacgttgactatgacctcgtgacccctggccgcacggatgaggaggcatatatgaatgccaagctcagtatcagtattgccagaaagatgggtgcgacgatctggcttgtccctgaggatatttgccaggttcgcagccgattagtcaccacattcatcggtaagaaaccctttcgttgcgcaagacaaatgcagcattcttcaaactaa

SEQ ID NO: 5545 - protein, 655 aa, Muscodor strobelii
  misc_feature: SGI Peptide ID NO. 561565
  misc_feature (141)..(261): Pfam Id: PF00307 Pfam Desc: Calponin homology (CH) domain
  misc_feature (415)..(524): Pfam Id: PF00307 Pfam Desc: Calponin homology (CH) domain
  misc_feature (290)..(393): Pfam Id: PF00307 Pfam Desc: Calponin homology (CH) domain
  misc_feature (540)..(643): Pfam Id: PF00307 Pfam Desc: Calponin homology (CH) domain
  misc_feature (540)..(639): Pfam Id: PF00307 Pfam Desc: Calponin homology (CH) domain
  misc_feature (1)..(640): NCBI GI: 256274418 Blast Desc: Sac6p [Saccharomyces cerevisiae JAY291]
  misc_feature (1)..(640): NCBI GI: 50285259 Blast Desc: protein product [Candida glabrata] gi|49524361|emb|CAG57958.1| protein product [Candida glabrata]
  misc_feature (1)..(640): NCBI GI: 50311873 Blast Desc: protein product [Kluyveromyces lactis] gi|49645104|emb|CAG98676.1| KLLA0F19778p [Kluyveromyces lactis]
  misc_feature (173)..(640): NCBI GI: 238493933 Blast Desc: actin-bundling protein Sac6, [Aspergillus flavus NRRL3357] gi|220696697|gb|EED53039.1| actin-bundling protein Sac6, [Aspergillus flavus NRRL3357]
  misc_feature (1)..(640): NCBI GI: 19113081 Blast Desc: fimbrin [Schizosaccharomyces pombe] gi|59799485|sp|O59945.1|FIMB_SCHPO RecName: Full=Fimbrin gi|3057144|gb|AAC14025.1| fimbrin [Schizosaccharomyces pombe]
  misc_feature (1)..(640): NCBI GI: 190347119 Blast Desc: conserved [Pichia guilliermondii ATCC 6260]
  misc_feature (1)..(640): NCBI GI: 146416165 Blast Desc: conserved [Pichia guilliermondii ATCC 6260]
  misc_feature (1)..(640): NCBI GI: 260941554 Blast Desc: conserved [Clavispora lusitaniae ATCC 42720] gi|238851366|gb|EEQ40830.1| conserved [Clavispora lusitaniae ATCC 42720]
  misc_feature (1)..(640): NCBI GI: 255733056 Blast Desc: fimbrin [Candida tropicalis MYA-3404] gi|240131192|gb|EER30753.1| fimbrin [Candida tropicalis MYA-3404]
  misc_feature (1)..(640): NCBI GI: 213406966 Blast Desc: fimbrin [Schizosaccharomyces japonicus yFS275] gi|212002301|gb|EEB07961.1| fimbrin [Schizosaccharomyces japonicus yFS275]
  misc_feature: Useful for introducing or modulating the production of volatile compounds
MNVLKLQRKYPQFQQDVIFSLSDAFRKLDVDDKGYIDEATAIKATQQSERQPYDVVRQALKEVELDSSRRVELEDYVDLVAKLRESSPAQKRMSTGGSGPLSPAGVVAQRTGGGGHVSKGSVGKIHVQGSNANVTHTINEDERTEFTRHINAVLAGDADIGARLPFPTDTFEMFDECKDGLVLAKLINDSVPDTIDERVLNVAGRKIKSLNAFHMTENNNIVIESAKGIGCSVVNIGSGDIIEGREHLILGLIWQIIRRGLLGKIDIKLHPELYRLLEEDETLEQFLRLPPEQILLRWFNYQLKAAGWHRTVSNFSSDVKDGENYAVLLAQIGKDYGCSRAPLQTRDLLQRAEEVLVDSDKLDCRKFLTPTSLVAGNPKLNLAFVANLFNNHPSLDPITEEEKQEVEDFDAEGEREARVFTLWLNSLDVQPAIVSFFDDLRDGTILMQAYDKVIKGSVNWRHVNKRPANGSELMRFKAVENTNYAVELGKQNGFSLVGIQGADITDGQKMLTLGLVWQLMRKDITLTLSALAQRLGKREITDAEMVKWANGMSQKGGRNSSVRSFKDASIGSGVFFLDVLNGMKSSYVDYDLVTPGRTDEEAYMNAKLSISIARKMGATIWLVPEDICQVRSRLVTTFIGKKPFRCARQMQHSSN

SEQ ID NO: 5546 - DNA, 2674 bp, Muscodor strobelii; identical to SEQ ID NO: 5543
  misc_feature: SGI EST ID NO. CUFF.14164.2
  misc_feature: Variant of the nucleotide sequence at SEQ ID NO 5544

SEQ ID NO: 5547 - DNA, 498 bp, Muscodor strobelii
  misc_feature: SGI cDNA ID NO. 561566
  misc_feature: Reduced expression when VOC is produced
  misc_feature: Encodes the peptide sequence at SEQ ID NO 5548
atgcgcttcgagactcttttcgccgtgctcgcagccgcctgcccagcggttggcacaacgctcatactggactccaaatttgttgcagccgcgaccctgaactacaattggcacgttaccgaatggaaagcaggttgtagcactggagaatgtgtctatgacttcaacattaccggcgccgcaaacgctacctcgagacctccaagacctgaattcaaggcttcctgtagcggccatggagaaggtgccaagtacgcgccatgcgagccgttgtttaacggcacgactccttatgcggttgttgcgaagctccaagaaaataaaaactccacaaccagcgggccgcgttccggaacaatccaagtctccctcatttacgacgttgattctgttagatacaattacactggacaggcgacatcggtctataacgaactgtcgcctacgcgcgcaaacttcgccatcactcccaatcagctgtcagccgtagcaaagtga

SEQ ID NO: 5548 - protein, 165 aa, Muscodor strobelii
  misc_feature: SGI Peptide ID NO. 561566
  misc_feature (3)..(164): NCBI GI: 169598106 Blast Desc: SNOG_01851 [Phaeosphaeria nodorum SN15] gi|111068943|gb|EAT90063.1| SNOG_01851 [Phaeosphaeria nodorum SN15]
  misc_feature (37)..(89): NCBI GI: 259479589 Blast Desc: TPA: [Aspergillus nidulans FGSC A4]
  misc_feature (37)..(89): NCBI GI: 67540084 Blast Desc: AN6212.2 [Aspergillus nidulans FGSC A4] gi|40738808|gb|EAA57998.1| AN6212.2 [Aspergillus nidulans FGSC A4]
  misc_feature (33)..(163): NCBI GI: 189210758 Blast Desc: conserved [Pyrenophora tritici-repentis Pt-1C-BFP] gi|187977803|gb|EDU44429.1| conserved [Pyrenophora tritici-repentis Pt-1C-BFP]
  misc_feature (37)..(89): NCBI GI: 121715746 Blast Desc: conserved [Aspergillus clavatus NRRL 1] gi|119403639|gb|EAW14056.1| conserved [Aspergillus clavatus NRRL 1]
  misc_feature (19)..(89): NCBI GI: 238496525 Blast Desc: conserved [Aspergillus flavus NRRL3357] gi|220694378|gb|EED50722.1| conserved [Aspergillus flavus NRRL3357]
  misc_feature (1)..(89): NCBI GI: 115383906 Blast Desc: conserved [Aspergillus terreus NIH2624] gi|114196192|gb|EAU37892.1| conserved [Aspergillus terreus NIH2624]
  misc_feature: Useful for introducing or modulating the production of volatile compounds
MRFETLFAVLAAACPAVGTTLILDSKFVAAATLNYNWHVTEWKAGCSTGECVYDFNITGAANATSRPPRPEFKASCSGHGEGAKYAPCEPLFNGTTPYAVVAKLQENKNSTTSGPRSGTIQVSLIYDVDSVRYNYTGQATSVYNELSPTRANFAITPNQLSAVAK

SEQ ID NO: 5549 - DNA, 1473 bp, Muscodor strobelii
  misc_feature: SGI EST ID NO. CUFF.14034.0
  misc_feature: Variant of the nucleotide sequence at SEQ ID NO 5547
actcacacggacgcattcctcgtaggcgcgctttgttaagaatgttaagtgttttaccaacagaaacaggagtgaatcttgaagatagtttgcgattcagcctctctgcacgtatttaagcaaaacgactccaattccacatttctacaacggttgaagatttgttagtttttctcagcccacatcaaactcaattacagcacacacgaaaagaacatccaccgatacctattgaatgccacgatgcgcttcgagactcttttcgccgtgctcgcagccgcctgcccagcggttggcacaacgctcatactggactccaaatttgttgcagccgcgaccctgaactacaattggcacgttaccgaatggaaagcaggttgtagcactggagaatgtgtctatgacttcaacattaccggcgccgcaaacgctacctcgagacctccaagacctgaattcaaggcttcctgtagcggccatggagaaggtgccaagtacgcgccatgcgagccgttgtttaacggcacgactccttatgcggttgttgcgaagctccaagaaaataaaaactccacaaccagcgggccgcgttccggaacaatccaagtctccctcatttacgacgttgattctgttagatacaattacactggacaggcgacatcggtctataacgaactgtcgcctacgcgcgcaaacttcgccatcactcccaatcagctgtcagccgtagcaaagtgaaggggttgaaaaactggttggtaactcgtgtaagacaatatgccgcctctcggaaagctgcagtagccccaggcccttgtgtagcgtaccgtgcagtgacagggaggcatgtccaaaaagagaggaatggaactcataatgaacaagtgaagtgggacgtgaccgagcacgagggtgaaggccctcctgacgaccatccgaaacccgtcattcacgatcaaaaattgtcaggtaaggcgcttggcattggaatacaactccgacttggaggtatttgggaatgtagtaataattgtgtggtaataccaattgcgtttcgtatgccatccacatacgcgctgccaaatgagagttaattgaactatcagattgagtgaccaaatgctggatgaacctcattcgccatcatgtttcgcataatgactaccatttcgacagatcagggctcatcgatgctcctcactgcgtgggcaattgggaacaaatgagattcaagtgaagggcgaggcattattccagacctgaggcatggatgggatctggcccggctgccagctttttacacgtggtgttttccagaccgtgtccttataggcgatatacaagaggagaatgcctgggcatagatctttatatgtatgtcgtgtgtcaagcgcggctgcgtaggaaatgtacaatgtctggcgaatgcggttgctccatgtatgatgtcgcgaccgcgatggagtcagc

SEQ ID NO: 5550 - DNA, 549 bp, Muscodor strobelii
  misc_feature: SGI cDNA ID NO. 561567
  misc_feature: Encodes the peptide sequence at SEQ ID NO 5551
atggcaggttccgattcacctcagccgccagccatcaattatgtagctggcttcctgcttgttgggattgcatggggcctcacaacccctttcatccgtcgcgcggcgaaagaccacaacccgccagctcatccgcttctagctagagacgacgtgaaagcaagcgtgatcaaaagcaaactttacggcgcattctttgctgtcattgaccttctcaagaaccctagatatgctgtgccgctacttatcaaccttacggggagtatatggtttttcctactcattggtcaagcagagctgagtttgacggttccgattgtgaatacgcttgcatttctgttcactgtgcttggtgactggtgggtggacaagaaagtcattagtcgcagtaagtgcttccccgatgcgtgggacaaggcgcttgttgactttcgtggcagacacttggattgggatgctcctctcgttatgtggtattgctttgtgtgtccagagcaagtcagggtgacgaaggttgcctcgcttctggtcgatttgcagctgaggtag

SEQ ID NO: 5551 - protein, 182 aa, Muscodor strobelii
  misc_feature: SGI Peptide ID NO. 561567
  misc_feature (8)..(129): NCBI GI: 261351969 Blast Desc: integral membrane protein [Verticillium albo-atrum VaMs.102]
  misc_feature (1)..(129): NCBI GI: 46137475 Blast Desc: FG10253.1 [Gibberella zeae PH-1]
  misc_feature (2)..(146): NCBI GI: 116197583 Blast Desc: CHGG_06947 [Chaetomium globosum CBS 148.51] gi|88178226|gb|EAQ85694.1| CHGG_06947 [Chaetomium globosum CBS 148.51]
  misc_feature (2)..(146): NCBI GI: 156055748 Blast Desc: SS1G_05226 [Sclerotinia sclerotiorum 1980] gi|154703010|gb|EDO02749.1| SS1G_05226 [Sclerotinia sclerotiorum 1980]
  misc_feature (5)..(146): NCBI GI: 154296305 Blast Desc: BC1G_12979 [Botryotinia fuckeliana B05.10] gi|150843437|gb|EDN18630.1| BC1G_12979 [Botryotinia fuckeliana B05.10]
  misc_feature (8)..(129): NCBI GI: 145610507 Blast Desc: MGG_01151 [Magnaporthe grisea 70-15] gi|145017876|gb|EDK02155.1| MGG_01151 [Magnaporthe grisea 70-15]
  misc_feature (4)..(129): NCBI GI: 256731681 Blast Desc: NECHADRAFT_80290 [Nectria haematococca mpVI 77-13-4]
  misc_feature (1)..(129): NCBI GI: 171694443 Blast Desc: protein product [Podospora anserina] gi|170947170|emb|CAP73975.1| protein product [Podospora anserina]
  misc_feature (12)..(129): NCBI GI: 164423774 Blast Desc: NCU11375 [Neurospora crassa OR74A] gi|157070228|gb|EDO64992.1| conserved [Neurospora crassa OR74A]
  misc_feature (4)..(129): NCBI GI: 189188212 Blast Desc: integral membrane protein [Pyrenophora tritici-repentis Pt-1C-BFP] gi|187972051|gb|EDU39550.1| integral membrane protein [Pyrenophora tritici-repentis Pt-1C-BFP]
MAGSDSPQPPAINYVAGFLLVGIAWGLTTPFIRRAAKDHNPPAHPLLARDDVKASVIKSKLYGAFFAVIDLLKNPRYAVPLLINLTGSIWFFLLIGQAELSLTVPIVNTLAFLFTVLGDWWVDKKVISRSKCFPDAWDKALVDFRGRHLDWDAPLVMWYCFVCPEQVRVTKVASLLVDLQLR

SEQ ID NO: 5552 - DNA, 1451 bp, Muscodor strobelii
  misc_feature: SGI EST ID NO. CUFF.14040.0
  misc_feature: Variant of the nucleotide sequence at SEQ ID NO 5550
tgcgcggacaactcagatactaccgcgaaagagagatcattagggagactgggcgttttggggagtggacagacatatttgggcatgatatatcggaaatgacgcgaagtgccgtacggattggtgttgcctcaagtcccgcagggataccttatatgataactacgatgtgaataatttcaaacggttcgcccgggaaatgttgcgtcacttggtactgagaaagtacctacctagtatttgtcctacctagtgacgcaacacgcgcgtgcgactttgggtacctggaatgatgtattgtaacactcgtggatgacacaagtttgggatttatatgtgctggcgtcatgtagtatcccatgttgtgcctaggtgtcgttgacataatcggtgcgtcaagatgagagggagagctggagtgaactggcataaggtaacctccagttacagctcaaggtcccccctgtacctaaatccatgttaccggccttagccacacctccgtctgttgcgccacagctcacttgaggtggccatgtagcttcatcaaaactctctattgaaacttcgatcccgcattcagggagagattacagcatttcagggggcaggatttacttgattattgcgagagataccttaatattcctttttactgaggtagttctgtaccgcctcaccatggcaggttccgattcacctcagccgccagccatcaattatgtagctggcttcctgcttgttgggattgcatggggcctcacaacccctttcatccgtcgcgcggcgaaagaccacaacccgccagctcatccgcttctagctagagacgacgtgaaagcaagcgtgatcaaaagcaaactttacggcgcattctttgctgtcattgaccttctcaagaaccctagatatgctgtgccgctacttatcaaccttacggggagtatatggtttttcctactcattggtcaagcagagctgagtttgacggttccgattgtgaatacgcttgcatttctgttcactgtgcttggtgactggtgggtggacaagaaagtcattagtcgcaacacttggattgggatgctcctctcgttatgtggtattgctttgtgtgtccagagcaagtcagggtgacgaaggttgcctcgcttctggtcgatttgcagctgaggtagtatggaaggatgagaatagtcaatttaaaaagtttatgatattgacgatttaatttccaaagtacctagtcagtcaatgatagacggacgagtgtgcgacacctgagctggaaaacatgacgagcgtggagggcgtcgtagaggatatgatcattctgggccatcaattcatatggtttgatgagtaattgtcagcggccttgcgtctttaagtcgagactgcacgtttgcagcaccagcaatcttcaacttgacgcaattgcggaactcaag

SEQ ID NO: 5553 - DNA, 252 bp, Muscodor strobelii
  misc_feature: SGI cDNA ID NO. 561568
  misc_feature: Encodes the peptide sequence at SEQ ID NO 5554
atgcctaccgaagctcagatcgccggcggccacaaggctaacatcaacaaccccaacacctccgaggagtccaagcagcactcccgcgaggtccttgacaacgagttcaacggtggcaatgttgccggagctggcgataacgaggacaagaaccccaacaacgtcgctggcggtctcaaggcgaccttgaagaaccccaacgtctcggatgaggccaagaagagtgctgaggagcgcctcaacaacatgtaa

SEQ ID NO: 5554 - protein, 83 aa, Muscodor strobelii
  misc_feature: SGI Peptide ID NO. 561568
  misc_feature (1)..(83): NCBI GI: 171694441 Blast Desc: protein product [Podospora anserina] gi|170947169|emb|CAP73974.1| protein product [Podospora anserina]
  misc_feature (3)..(81): NCBI GI: 46137473 Blast Desc: FG10252.1 [Gibberella zeae PH-1]
  misc_feature (1)..(83): NCBI GI: 261351970 Blast Desc: conserved [Verticillium albo-atrum VaMs.102]
  misc_feature (3)..(83): NCBI GI: 39968307 Blast Desc: MGG_02246 [Magnaporthe grisea 70-15] gi|145014193|gb|EDJ98834.1| MGG_02246 [Magnaporthe grisea 70-15]
  misc_feature (1)..(83): NCBI GI: 189208812 Blast Desc: conidiation-specific protein 6 [Pyrenophora tritici-repentis Pt-1C-BFP] gi|187976832|gb|EDU43458.1| conidiation-specific protein 6 [Pyrenophora tritici-repentis
  misc_feature (7)..(83): NCBI GI: 461773 Blast Desc: CON6_NEUCR RecName: Full=Conidiation-specific protein 6 gi|415714|gb|AAA33573.1| conidiation protein [Neurospora crassa] gi|28881217|emb|CAD70456.1| conidiation protein 6 (con-6)
  misc_feature (1)..(82): NCBI GI: 169862352 Blast Desc: [Coprinopsis cinerea okayama7#130] gi|116501117|gb|EAU84012.1| [Coprinopsis cinerea okayama7#130]
  misc_feature (10)..(80): NCBI GI: 119499714 Blast Desc: NFIA_102010 [Neosartorya fischeri NRRL 181] gi|119414779|gb|EAW24717.1| conserved [Neosartorya fischeri NRRL 181]
  misc_feature (10)..(83): NCBI GI: 119481721 Blast Desc: NFIA_089490 [Neosartorya fischeri NRRL 181] gi|119409043|gb|EAW18992.1| conserved [Neosartorya fischeri NRRL 181]
  misc_feature (10)..(83): NCBI GI: 121716216 Blast Desc: conserved [Aspergillus clavatus NRRL 1] gi|119403874|gb|EAW14291.1| conserved [Aspergillus clavatus NRRL 1]
MPTEAQIAGGHKANINNPNTSEESKQHSREVLDNEFNGGNVAGAGDNEDKNPNNVAGGLKATLKNPNVSDEAKKSAEERLNNM

SEQ ID NO: 5555 - DNA, 3405 bp, Muscodor strobelii
  misc_feature: SGI cDNA ID NO. 561569
  misc_feature: Encodes the peptide sequence at SEQ ID NO 5556
atgaataccttcttcctgaaaatcattgacagtctcgacgttgtggcgagtgagatatcttatttcactagagttcaaaaacaaatcgcccatctctcaaaggcgccaggtaaaatcagagacatactcaataaggcgtatgaacagctgttactctatctcactggtatcattcgaattttctatcggacgaccggagagagaaagagcactgccaggatactagtaaaagcaggctggaaacccttccgacggagttctatcatcgctaccttgaaaaatctcaaaataaagtttcaagaggagatcgatttacttactctcagcaaagggcatcggccagcgaagagaaataacgcaagggagcgacaggtgtttaatgagacccaacaggactttgccgagaaagtgaggcgctggttagcgccacccaagttcgcagacggatatgacagcgcaattcaacatagagctcaagggacgagcgagtggttgactgacaacccttcgttttctacatggttcgctcaatcaaggaccgatcccgggaataatcgtcaatcggccagacaggccttatggattttcgggaagcccggtgccggcaagacagtactcgcaggtactttagtcagtcaaatgaaacgcatctttcgcgacaatgcttattgtatggtttgctatttcttcttcgactcccgtttgaccgatcacagccgagcatcagatgcatatcgggcgatacttgcgcaactcgtgcagcgcagatccggccatccacgtcttatggatttattcgcctttgcaatgtggtcagacacggatggccagcttgaagcctcgcgatctgaggtgactgaccttcttcaagttgtaattggattactaggccaggatcggatatacttcgtgcttgatgggatcgatgagtgcgctgacctagcttcgggccttgagcttgtcctactacccccccgagaattattcgagctgaatcttgtttgtttcagtcgagataccgtcatcccgtacttgagcgacaagatcccgagagtggacatcaagattgggcatcataatctgccggatattcgcaaatacttgtctatcgagcttgagaaattcgtgtcgagtggaattctacccgttcagatcgatactcaggatgttgctcaatgtcttcatgagcggtctgatgtggatgtgtggcatttggaagaggctctcgtctgcacttcggagcgaaaatctaacaagcttcttgatcactttacaagctttcagcaagatatcttgacaatttgcggtggccttgtcgagatcagcacacactcagatgatggccctaaaacgactgcaaagtttattcattcgtccgtcaaagagtttctcgacgacgccgatctttacattccgcaatatcctgggatcaaccgagatattctaccgagtaaaaaatgggcgaatgcgcatattgcgagaatttgtctgcgatacatgatctaccaaatgccagcagagcccctgacaccacttatgaaaacacaatttagtggccagtgtggcaggccacagttgcggtctatgtttttgctcgcggaatatgcagccaagttttgggttcaccatctactggttacttattcaaccaaacaccggcttgcctatgatgaacatgtaggcgaggaagtggaaaatcttctaacagcattgggccagttcgtgtcacactcaaaagtgatcagtgcatggatagagacaatttctatctgcggtcaaacccttccggtagcctgtatcaaagaattcgtgcgcatatttaagtcgacaacaccgccaacctctacagacagccaacctcagactgatacaatgctcgaattttctacctacgtacagagcattaatgagaactggcactctcatttactgaaagaccctttttgtatatgggaagagataagtgcattccactcttcaaggttcaatgaagctattccaggaatctcagtgacatccttgactggaagggaggccgttccgaccgaactatggcccaagtcaactagcaacatttcgcggatgatatcgggcactacgattgacatttctttgactgtcttcgcaactagggacttcatgaactgttacgcccagtctcaccgccactcagagctgtttaaggacttgagattcacaacgggatggatcctgagagttgagcttgtggacaacgacaacgctgaagctttgatgaatatcaacatacccattgagtctcacgaaccgaccgtacagtacatctcttcaaacatacccttacatctgaataaggacatggcagaattctggactgtggctaaggatgagaaaaacatgttccgaatcagcgactattctcgctttcagagcccgactctaaactaccaagtgtacctttactgggtttattttgacgatcacggacgtgatattactgtcgtggaacaggtcaagggcatcccgattgccgtgaacgtcttccagttaggagagacaactcgaaacgcccaagcagtggatatgactgggataaatcgaaagcatctaccgtttagaccgcaggagagtgtgaaagatgaaagaagagccctgatccagaagttgttcgaagtgacatttcatccatgcctaccgataatggcgatcgcgacgagatcagcagcatatgtttgggactatacatcctcaaatggaaggccctttttgtctgtagccacatggcacgacgatgctgtcaagatacaattctcaaataatggaacaaatctactgatccgctcggatttgggcactacacgagtaggaattgaaaaatatctagagagtgtcaaagaagctattccagggcatgtttccgatgccagtaccgccgcctccaacaccaaccctgatttttctatttttaaatcagtaccctcaaatcattcaagtgctatcacgccatcaaatcgcgtcatacagtcggaaatagtcctacagaccaatcgaggtagaatagtcgctgcaacgaccaacattggcgataaagccgagctagttctcggaaatgcggacgaaggcagccacaaggacatcttattgactaggatcccgaatgttgaggaatccgagacgattgtgccttcgatcatattgcctcaaaatggggtaaggcatctcaaggtgatattagaccaaggaccaaagacctggaacagtcttggaaaagtcggctcattggaagacacggcaatgtcattcccgcgcgttgtctcacgcgacctatcaacactcccggatgcccagagactcatatcctttacagaaactcagacaaaagaggaacttgagatcaagactataaaccctttcccagctagttag

SEQ ID NO: 5556 - protein, 1134 aa, Muscodor strobelii
  misc_feature: SGI Peptide ID NO. 561569
  misc_feature (4)..(662): NCBI GI: 46105078 Blast Desc: FG00167.1 [Gibberella zeae PH-1]
  misc_feature (136)..(543): NCBI GI: 119473749 Blast Desc: Ankyrin repeat protein [Neosartorya fischeri NRRL 181] gi|119406903|gb|EAW16853.1| Ankyrin repeat protein [Neosartorya fischeri NRRL 181]
  misc_feature (7)..(311): NCBI GI: 85089980 Blast Desc: NCU09760 [Neurospora crassa OR74A] gi|28919536|gb|EAA28964.1| [Neurospora crassa OR74A]
  misc_feature (136)..(494): NCBI GI: 189208079 Blast Desc: vegetative incompatibility protein HET-E-1 [Pyrenophora tritici-repentis Pt-1C-BFP] gi|187976466|gb|EDU43092.1| vegetative incompatibility protein
  misc_feature (67)..(313): NCBI GI: 212545278 Blast Desc: NACHT domain protein [Penicillium marneffei ATCC 18224] gi|210065762|gb|EEA19856.1| NACHT domain protein [Penicillium marneffei ATCC 18224]
  misc_feature (5)..(392): NCBI GI: 145603741 Blast Desc: MGG_05856 [Magnaporthe grisea 70-15] gi|145011903|gb|EDJ96559.1| MGG_05856 [Magnaporthe grisea 70-15]
  misc_feature (122)..(314): NCBI GI: 242815175 Blast Desc: ankyrin repeat and socs box protein, [Talaromyces stipitatus ATCC 10500] gi|218714857|gb|EED14280.1| ankyrin repeat and socs box protein, [Talaromyces stipitatus ATCC 10500]
  misc_feature (136)..(311): NCBI GI: 169607437 Blast Desc: SNOG_06775 [Phaeosphaeria nodorum SN15] gi|160701409|gb|EAT85426.2| SNOG_06775 [Phaeosphaeria nodorum SN15]
  misc_feature (136)..(311): NCBI GI: 119467286 Blast Desc: Ankyrin repeat protein [Neosartorya fischeri NRRL 181] gi|119405601|gb|EAW15552.1| Ankyrin repeat protein [Neosartorya fischeri NRRL 181]
  misc_feature (135)..(379): NCBI GI: 154316971 Blast Desc: BC1G_03903 [Botryotinia fuckeliana B05.10] gi|150845515|gb|EDN20708.1| BC1G_03903 [Botryotinia fuckeliana B05.10]
MNTFFLKIIDSLDVVASEISYFTRVQKQIAHLSKAPGKIRDILNKAYEQLLLYLTGIIRIFYRTTGERKSTARILVKAGWKPFRRSSIIATLKNLKIKFQEEIDLLTLSKGHRPAKRNNARERQVFNETQQDFAEKVRRWLAPPKFADGYDSAIQHRAQGTSEWLTDNPSFSTWFAQSRTDPGNNRQSARQALWIFGKPGAGKTVLAGTLVSQMKRIFRDNAYCMVCYFFFDSRLTDHSRASDAYRAILAQLVQRRSGHPRLMDLFAFAMWSDTDGQLEASRSEVTDLLQVVIGLLGQDRIYFVLDGIDECADLASGLELVLLPPRELFELNLVCFSRDTVIPYLSDKIPRVDIKIGHHNLPDIRKYLSIELEKFVSSGILPVQIDTQDVAQCLHERSDVDVWHLEEALVCTSERKSNKLLDHFTSFQQDILTICGGLVEISTHSDDGPKTTAKFIHSSVKEFLDDADLYIPQYPGINRDILPSKKWANAHIARICLRYMIYQMPAEPLTPLMKTQFSGQCGRPQLRSMFLLAEYAAKFWVHHLLVTYSTKHRLAYDEHVGEEVENLLTALGQFVSHSKVISAWIETISICGQTLPVACIKEFVRIFKSTTPPTSTDSQPQTDTMLEFSTYVQSINENWHSHLLKDPFCIWEEISAFHSSRFNEAIPGISVTSLTGREAVPTELWPKSTSNISRMISGTTIDISLTVFATRDFMNCYAQSHRHSELFKDLRFTTGWILRVELVDNDNAEALMNINIPIESHEPTVQYISSNIPLHLNKDMAEFWTVAKDEKNMFRISDYSRFQSPTLNYQVYLYWVYFDDHGRDITVVEQVKGIPIAVNVFQLGETTRNAQAVDMTGINRKHLPFRPQESVKDERRALIQKLFEVTFHPCLPIMAIATRSAAYVWDYTSSNGRPFLSVATWHDDAVKIQFSNNGTNLLIRSDLGTTRVGIEKYLESVKEAIPGHVSDASTAASNTNPDFSIFKSVPSNHSSAITPSNRVIQSEIVLQTNRGRIVAATTNIGDKAELVLGNADEGSHKDILLTRIPNVEESETIVPSIILPQNGVRHLKVILDQGPKTWNSLGKVGSLEDTAMSFPRVVSRDLSTLPDAQRLISFTETQTKEELEIKTINPFPAS

SEQ ID NO: 5557 - DNA, 924 bp, Muscodor strobelii
  misc_feature: SGI EST ID NO. CUFF.14069.0
  misc_feature: Variant of the nucleotide sequence at SEQ ID NO 5555
ttccgaccgaactatggcccaagtcaactagcaacatttcgcggatgatatcgggcactacgattgacatttctttgactgtcttcgcaactagggacttcatgaactgttacgcccagtctcaccgccactcagagctgtttaaggacttgagattcacaacgggatggatcctgagagttgagcttgtggacaacgacaacgctgaagctttgatgaatatcaacatacccattgagtctcacgaagtgagtctccagctctaccaaacactgtgtctaggatcgttacactttcccctctctgttagtccgtctggtacccatttcgcatgtctacgaaccgtttacgcgctgaaaagagttcagccgaccgtacagtacatctcttcaaacatacccttacatctgaataaggacatggcagaattctggactgtggctaaggatgagaaaaacatgttccgaatcagcgactattctcgctttcagagcccgactctaaactaccaagtgtacctttactgggtttattttgacgatcacggacgtgatattactgtcgtggaacaggtcaagggcatcccgattgccgtgaacgtcttccagttaggagagacaactcgaaacgcccaagcagtggatatgactgggataaatcgaaagcatctaccgtttagaccgcaggagagtgtgaaagatgaaagaagagccctgatccagaagttgttcgaagtgacatttcatccatgcctaccgataatggcgatcgcgacgagatcagcagcatatgtttgggactatacatcctcaaatggaaggccctttttgtctgtagccacatggcacgacgatgctgtcaagatacaattctcaaataatggaacaaatctactgatccgctcggatttgggcactacacgag

SEQ ID NO: 5558 - DNA, 417 bp, Muscodor strobelii
  misc_feature: SGI cDNA ID NO. 561570
  misc_feature: Elevated expression when VOC is produced
  misc_feature: Encodes the peptide sequence at SEQ ID NO 5559
atgctcaagctcctcgccgcccttgcacccgcgctccttgcgaccacagtcgcggcgtatccagactatccagagtggaccgtagacattcccgacaacatcgtgatcggctccgagttctcgcttgagtgggtacctcaagatactactgaaacgttcaagcttaatctcggcgcctacaataccaccccttccggctactacaccggcccattaggtggtcaattccccatctacgactccaagggaatgtaccttgacgaagccgtacctttctccgctggtgtatataaatgggttgtccagccttttgagtcgacgtggaagggcgaagagttcaactatggcttcacggctgagttcgaaaatccgctctatgctagctcatctcctcgtcaattccacatcgtggactaa

SEQ ID NO: 5559 - protein, 138 aa, Muscodor strobelii
  misc_feature: SGI Peptide ID NO. 561570
  misc_feature: Useful for introducing or modulating the production of volatile compounds
MLKLLAALAPALLATTVAAYPDYPEWTVDIPDNIVIGSEFSLEWVPQDTTETFKLNLGAYNTTPSGYYTGPLGGQFPIYDSKGMYLDEAVPFSAGVYKWVVQPFESTWKGEEFNYGFTAEFENPLYASSSPRQFHIVD

SEQ ID NO: 5560 - DNA, 1083 bp, Muscodor strobelii
  misc_feature: SGI EST ID NO. CUFF.14076.0
  misc_feature: Variant of the nucleotide sequence at SEQ ID NO 5558
ctgagcattaccaggcaaagatgccggcgcactaccgcgatgaaggattaaacggatcttcaatttgtatagagcactggtgatagcaattggaacaattcgactataaaatagctttaagagtcgaagacgaacgttctttgaccctttctcgattattaactattagctatcaagtcttgatcaaaacatacgactttgctctcaaagattaagttagacgacatgatgctcaagctcctcgccgcccttgcacccgcgctccttgcgaccacagtcgcggcgtatccagactatccagagtggaccgtagacattcccgacaacatcgtgatcggctccgagttctcgcttgagtgggtacctcaagatactactgaaacgttcaagcttaatctcggcgcctacaataccaccccttccggctactacaccggcccattaggtggtcaattccccatctacgactccaagggaatgtaccttgacgaagccgtacctttctccgctggtgtatataaatgggttgtccagccttttgagtcgacgtggaagggcgaagagttcaactatggcttcacggctgagttcgaaaatccgctctatgctagctcatctcctcgtcaattccacatcgtggactaaagaagcttagccctaatggtcgcccgatcttctgtgcaaagggaatattagtggcgactactagacagcgcgactttcttcaatattcaagcaaaaagtcacttgggtatgaggacaacgtaaaattggaactaaattgtgtctctgatggtcaacctaatcatgtctacgagagtcgagttttgagcttctcgtcaaataaatcgctcggtgaaaactctcatatagcccgaagcttgcgcattctcttctacagtgacaagtctgcattggcaacgaggtctctactagctatcgcgtttattctgttgtatgccactacctcttcgttccttcgcgctgcctgattttgttggtaattggaaatagagcttgtttgctggaggcgatacataataattgagatctcatggcctagaaatgcactgactatcaatt

SEQ ID NO: 5561 - DNA, 1608 bp, Muscodor strobelii
  misc_feature: SGI cDNA ID NO. 561571
  misc_feature: Encodes the peptide sequence at SEQ ID NO 5562
atgtggcggcgcacatatctgttcctggttttggtacggctatggttcgccttgtcttcgagttatttacatcccgatgaaaacttccagggccccgaggtgattgctggccagatcttcaaatatcccgtccgactcacatgggaattcacaagcgaccaaccgatacgaagcgtcttcccactatggcctgtctatggcctacccatgctcctccttcggtggttatggatcggtaacgggaacgatggcgagatcccaccgatcgctgtcttctggacgctgcgcgtgttgatgttcatcatcagcttcgtgctggaggactgggctattcacgagctcgtccagtcaccgcgacaccgccgagttgctgtcctactggtcgcgtcctcctacgtcacttggaccttccaaactcataccttctccaactcgatcgagaccctggtggtcgcctggtgtcttgtcctgatcgagcgcatcctcgagaattctcactcctcttccctcttggcatccagcttgctgggctttgttgctgtctttggttgtttcaacaggatcacttttcctgcctttctactcattcctggccttcgcttgataccccattttattaataagtatgcgcctcttgataagaatcatttatgcaatttctctgaccaaaagtcctttcccagaccattttcacctgtctttatgacaattgccgcactattagctgtaatactcgccatttcgcttgacactactttctacacaccacattcgatatcctggtccgatctgtaccggaaccccgtcatcacaccatggaataatctgcaatacaacctgcagccttcaaatttggcacaacatggagttcatccttggtatcagcatttgctcttgaatctgcccttacttatcggacccgccgttgtacttcttttcacacaaccgcacttgtctttgcgactctactccgcgatttctggagtcttcgtcctgtctatatttcaacaccaggaggcccgttttctgcttccgacaatacccttactcctttcatctgtgcagcttccaaagaataaaaagtacttgaaggtctgggtgggcgcatggatcggtttcaatgcgattttaggactgttgatggggacatatcaccaagccggcatcgtcccggcgcaagtctttttgagcaaccagccagatgcgacccaggcggtgtggtggaaaacatacatgcctccaatatggctattaaatggcaagaatgccgtgctacatacggaagatgtggcgggtatgccgggcgacacgctcctagaagagctgggccggatagctacatgcgacacaccagcagatcgtcggagtcgcgaatacctcaaagagtcgaacggcacataccttatagcgccactgtcgacgacttggttggacccatatctacaaaacaaagggttggatggcctaaggtttagggaggtctggaggcacagcaaacatttgaacctggatgacctcgactgggcggaggatggattctggccaacgctaaagagggtcatcggccgccgtggtttggcagcctggagagtaacgaaaagttgctaa

SEQ ID NO: 5562 - protein, 535 aa, Muscodor strobelii
  misc_feature: SGI Peptide ID NO. 561571
  misc_feature (4)..(420): Pfam Id: PF03901 Pfam Desc: Alg9-like mannosyltransferase family
  misc_feature (4)..(392): Pfam Id: PF03901 Pfam Desc: Alg9-like mannosyltransferase family
  misc_feature (1)..(535): NCBI GI: 261358188 Blast Desc: GPI mannosyltransferase [Verticillium albo-atrum VaMs.102]
  misc_feature (4)..(535): NCBI GI: 154319989 Blast Desc: BC1G_01975 [Botryotinia fuckeliana B05.10] gi|150854714|gb|EDN29906.1| BC1G_01975 [Botryotinia fuckeliana B05.10]
  misc_feature (1)..(535): NCBI GI: 46125091 Blast Desc: FG06923.1 [Gibberella zeae PH-1] gi|110816421|sp|Q4I785.1|SMP3_GIBZE RecName: Full=GPI mannosyltransferase 4; AltName: Full=GPI mannosyltransferase IV;
  misc_feature (1)..(535): NCBI GI: 189190150 Blast Desc: GPI mannosyltransferase 4 [Pyrenophora tritici-repentis Pt-1C-BFP] gi|187973020|gb|EDU40519.1| GPI mannosyltransferase 4 [Pyrenophora tritici-repentis Pt-1C-BFP]
  misc_feature (1)..(535): NCBI GI: 169612421 Blast Desc: SNOG_09333 [Phaeosphaeria nodorum SN15] gi|160702505|gb|EAT83525.2| SNOG_09333 [Phaeosphaeria nodorum SN15]
  misc_feature (1)..(534): NCBI GI: 239608966 Blast Desc: GPI mannosyltransferase 4 [Ajellomyces dermatitidis ER-3]
  misc_feature (1)..(535): NCBI GI: 238839268 Blast Desc: GPI mannosyltransferase 4 [Microsporum canis CBS 113480]
  misc_feature (1)..(535): NCBI GI: 258571730 Blast Desc: conserved [Uncinocarpus reesii 1704] gi|237904938|gb|EEP79339.1| conserved [Uncinocarpus reesii 1704]
  misc_feature (1)..(534): NCBI GI: 169765211 Blast Desc: [Aspergillus oryzae RIB40] gi|110816420|sp|Q2UTP0.1|SMP3_ASPOR RecName: Full=GPI mannosyltransferase 4; AltName: Full=GPI mannosyltransferase IV;
  misc_feature (1)..(529): NCBI GI: 259487697 Blast Desc: TPA: GPI mannosyltransferase 4 (EC 2.4.1.-)(GPI mannosyltransferase IV)(GPI-MT-IV) [Source:UniProtKB/Swiss-Prot;Acc:Q5BAX7] [Aspergillus nidulans
MWRRTYLFLVLVRLWFALSSSYLHPDENFQGPEVIAGQIFKYPVRLTWEFTSDQPIRSVFPLWPVYGLPMLLLRWLWIGNGNDGEIPPIAVFWTLRVLMFIISFVLEDWAIHELVQSPRHRRVAVLLVASSYVTWTFQTHTFSNSIETLVVAWCLVLIERILENSHSSSLLASSLLGFVAVFGCFNRITFPAFLLIPGLRLIPHFINKYAPLDKNHLCNFSDQKSFPRPFSPVFMTIAALLAVILAISLDTTFYTPHSISWSDLYRNPVITPWNNLQYNLQPSNLAQHGVHPWYQHLLLNLPLLIGPAVVLLFTQPHLSLRLYSAISGVFVLSIFQHQEARFLLPTIPLLLSSVQLPKNKKYLKVWVGAWIGFNAILGLLMGTYHQAGIVPAQVFLSNQPDATQAVWWKTYMPPIWLLNGKNAVLHTEDVAGMPGDTLLEELGRIATCDTPADRRSREYLKESNGTYLIAPLSTTWLDPYLQNKGLDGLRFREVWRHSKHLNLDDLDWAEDGFWPTLKRVIGRRGLAAWRVTKSC

SEQ ID NO: 5563 - DNA, 2072 bp, Muscodor strobelii
  misc_feature: SGI EST ID NO. CUFF.14082.0
  misc_feature: Variant of the nucleotide sequence at SEQ ID NO 5561
gagcaaacccccaatatacctgatccaatgcgaaagtgtcaacaaaaaagaaatgataccaccctttgtgagaaggcacgctttcttgtcttttttcgtcatttcaattttctctgcgttatatcgcgtgtctttgtacatcatgccattcgaatttcacagcttgccattgttgtgttgttgaccactcactgattacacttttgatctaccctacaaccaaggcgatcgctaccttatacaataatcttagtgattgcatattgcgctctctgcgcattgcacgaaattcgcacatggaagtttggggctagggaatcatgtggcggcgcacatatctgttcctggttttggtacggctatggttcgccttgtcttcgagttatttacatcccgatgaaaacttccagggccccgaggtgattgctggccagatcttcaaatatcccgtccgactcacatgggaattcacaagcgaccaaccgatacgaagcgtcttcccactatggcctgtctatggcctacccatgctcctccttcggtggttatggatcggtaacgggaacgatggcgagatcccaccgatcgctgtcttctggacgctgcgcgtgttgatgttcatcatcagcttcgtgctggaggactgggctattcacgagctcgtccagtcaccgcgacaccgccgagttgctgtcctactggtcgcgtcctcctacgtcacttggaccttccaaactcataccttctccaactcgatcgagaccctggtggtcgcctggtgtcttgtcctgatcgagcgcatcctcgagaattctcactcctcttccctcttggcatccagcttgctgggctttgttgctgtctttggttgtttcaacaggatcacttttcctgcctttctactcattcctggccttcgcttgataccccattttattaataaaccattttcacctgtctttatgacaattgccgcactattagctgtaatactcgccatttcgcttgacactactttctacacaccacattcgatatcctggtccgatctgtaccggaaccccgtcatcacaccatggaataatctgcaatacaacctgcagccttcaaatttggcacaacatggagttcatccttggtatcagcatttgctcttgaatctgcccttacttatcggacccgccgttgtacttcttttcacacaaccgcacttgtctttgcgactctactccgcgatttctggagtcttcgtcctgtctatatttcaacaccaggaggcccgttttctgcttccgacaatacccttactcctttcatctgtgcagcttccaaagaataaaaagtacttgaaggtctgggtgggcgcatggatcggtttcaatgcgattttaggactgttgatggggacatatcaccaagccggcatcgtcccggcgcaagtctttttgagcaaccagccagatgcgacccaggcggtgtggtggaaaacatacatgcctccaatatggctattaaatggcaagaatgccgtgctacatacggaagatgtggcgggtatgccgggcgacacgctcctagaagagctgggccggatagctacatgcgacacaccagcagatcgtcggagtcgcgaatacctcaaagagtcgaacggcacataccttatagcgccactgtcgacgacttggttggacccatatctacaaaacaaagggttggatggcctaaggtttagggaggtctggaggcacagcaaacatttgaacctggatgacctcgactgggcggaggatggattctggccaacgctaaagagggtcatcggccgccgtggtttggcagcctggagagtaacgaaaagttgctaataggagaaaagagaaaagaaaagtaataaaattgaaaaatcatcgcccatactattccatacggcgtatttggattgctacgaagtgcaacgtttgtatctcataatttgtgaactgctaaaggagcgttgtagctatccaaagcgaaggcaaataaatgggcatgaaaactctatttctataggtataaactaactacattcc

SEQ ID NO: 5564 - DNA, 1548 bp, Muscodor strobelii
  misc_feature: SGI cDNA ID NO. 561572
  misc_feature: Encodes the peptide sequence at SEQ ID NO 5565
atgtggcggcgcacatatctgttcctggttttggtacggctatggttcgccttgtcttcgagttatttacatcccgatgaaaacttccagggccccgaggtgattgctggccagatcttcaaatatcccgtccgactcacatgggaattcacaagcgaccaaccgatacgaagcgtcttcccactatggcctgtctatggcctacccatgctcctccttcggtggttatggatcggtaacgggaacgatggcgagatcccaccgatcgctgtcttctggacgctgcgcgtgttgatgttcatcatcagcttcgtgctggaggactgggctattcacgagctcgtccagtcaccgcgacaccgccgagttgctgtcctactggtcgcgtcctcctacgtcacttggaccttccaaactcataccttctccaactcgatcgagaccctggtggtcgcctggtgtcttgtcctgatcgagcgcatcctcgagaattctcactcctcttccctcttggcatccagcttgctgggctttgttgctgtctttggttgtttcaacaggatcacttttcctgcctttctactcattcctggccttcgcttgataccccattttattaataaaccattttcacctgtctttatgacaattgccgcactattagctgtaatactcgccatttcgcttgacactactttctacacaccacattcgatatcctggtccgatctgtaccggaaccccgtcatcacaccatggaataatctgcaatacaacctgcagccttcaaatttggcacaacatggagttcatccttggtatcagcatttgctcttgaatctgcccttacttatcggacccgccgttgtacttcttttcacacaaccgcacttgtctttgcgactctactccgcgatttctggagtcttcgtcctgtctatatttcaacaccaggaggcccgttttctgcttccgacaatacccttactcctttcatctgtgcagcttccaaagaataaaaagtacttgaaggtctgggtgggcgcatggatcggtttcaatgcgattttaggactgttgatggggacatatcaccaagccggcatcgtcccggcgcaagtctttttgagcaaccagccagatgcgacccaggcggtgtggtggaaaacatacatgcctccaatatggctattaaatggcaagaatgccgtgctacatacggaagatgtggcgggtatgccgggcgacacgctcctagaagagctgggccggatagctacatgcgacacaccagcagatcgtcggagtcgcgaatacctcaaagagtcgaacggcacataccttatagcgccactgtcgacgacttggttggacccatatctacaaaacaaagggttggatggcctaaggtttagggaggtctggaggcacagcaaacatttgaacctggatgacctcgactgggcggaggatggattctggccaacgctaaagagggtcatcggccgccgtggtttggcagcctggagagtaacgaaaagttgctaa

SEQ ID NO: 5565 - protein, 515 aa, Muscodor strobelii
  misc_feature: SGI Peptide ID NO. 561572
  misc_feature (4)..(400): Pfam Id: PF03901 Pfam Desc: Alg9-like mannosyltransferase family
  misc_feature (4)..(372): Pfam Id: PF03901 Pfam Desc: Alg9-like mannosyltransferase family
  misc_feature (1)..(515): NCBI GI: 261358188 Blast Desc: GPI mannosyltransferase [Verticillium albo-atrum VaMs.102]
  misc_feature (1)..(515): NCBI GI: 256732699 Blast Desc: glycosyltransferase family 22 [Nectria haematococca mpVI 77-13-4]
  misc_feature (4)..(515): NCBI GI: 154319989 Blast Desc: BC1G_01975 [Botryotinia fuckeliana B05.10] gi|150854714|gb|EDN29906.1| BC1G_01975 [Botryotinia fuckeliana B05.10]
  misc_feature (1)..(515): NCBI GI: 46125091 Blast Desc: FG06923.1 [Gibberella zeae PH-1] gi|110816421|sp|Q4I785.1|SMP3_GIBZE RecName: Full=GPI mannosyltransferase 4; AltName: Full=GPI mannosyltransferase IV;
  misc_feature (1)..(515): NCBI GI: 189190150 Blast Desc: GPI mannosyltransferase 4 [Pyrenophora tritici-repentis Pt-1C-BFP] gi|187973020|gb|EDU40519.1| GPI mannosyltransferase 4 [Pyrenophora tritici-repentis Pt-1C-BFP]
  misc_feature (1)..(515): NCBI GI: 169612421 Blast Desc: SNOG_09333 [Phaeosphaeria nodorum SN15] gi|160702505|gb|EAT83525.2| SNOG_09333 [Phaeosphaeria nodorum SN15]
  misc_feature (1)..(514): NCBI GI: 239608966 Blast Desc: GPI mannosyltransferase 4 [Ajellomyces dermatitidis ER-3]
  misc_feature (1)..(515): NCBI GI: 238839268 Blast Desc: GPI mannosyltransferase 4 [Microsporum canis CBS 113480]
  misc_feature (1)..(515): NCBI GI: 258571730 Blast Desc: conserved [Uncinocarpus reesii 1704] gi|237904938|gb|EEP79339.1| conserved [Uncinocarpus reesii 1704]
  misc_feature (1)..(514): NCBI GI: 238503492 Blast Desc: alpha 1,2-mannosyltransferase Smp3, [Aspergillus flavus NRRL3357] gi|220690450|gb|EED46799.1| alpha 1,2-mannosyltransferase Smp3, [Aspergillus flavus NRRL3357]
MWRRTYLFLVLVRLWFALSSSYLHPDENFQGPEVIAGQIFKYPVRLTWEFTSDQPIRSVFPLWPVYGLPMLLLRWLWIGNGNDGEIPPIAVFWTLRVLMFIISFVLEDWAIHELVQSPRHRRVAVLLVASSYVTWTFQTHTFSNSIETLVVAWCLVLIERILENSHSSSLLASSLLGFVAVFGCFNRITFPAFLLIPGLRLIPHFINKPFSPVFMTIAALLAVILAISLDTTFYTPHSISWSDLYRNPVITPWNNLQYNLQPSNLAQHGVHPWYQHLLLNLPLLIGPAVVLLFTQPHLSLRLYSAISGVFVLSIFQHQEARFLLPTIPLLLSSVQLPKNKKYLKVWVGAWIGFNAILGLLMGTYHQAGIVPAQVFLSNQPDATQAVWWKTYMPPIWLLNGKNAVLHTEDVAGMPGDTLLEELGRIATCDTPADRRSREYLKESNGTYLIAPLSTTWLDPYLQNKGLDGLRFREVWRHSKHLNLDDLDWAEDGFWPTLKRVIGRRGLAAWRVTKSC

SEQ ID NO: 5566 - DNA, 2072 bp, Muscodor strobelii; identical to SEQ ID NO: 5563
  misc_feature: SGI EST ID NO. CUFF.14082.0
  misc_feature: Variant of the nucleotide sequence at SEQ ID NO 5564

SEQ ID NO: 5567 - DNA, 2619 bp, Muscodor strobelii
  misc_feature: SGI cDNA ID NO. 561573
  misc_feature: Encodes the peptide sequence at SEQ ID NO 5568
atgcaccgtaaacatggcagccccctatcgaggcttctcctggttgcggcaaaccttctcatacccgctgccattttgatctttgcgactggcttcttcccctacaagccctttcttcctggtctcgccaagtatgacgacttcctggatgcgtcgcctccagatgcgccattcgacaagcttgtgttcatggttgtagatgccttgcgcagcgactttgtatacaccgagggctctggtttccaattcacccaagacttaatcaataatggagttgccattcccttcacggcccatgcgacgtcgcccacggtcacgatgccgcgcatcaaagctatgacgactggttcgacgccctcctttctcgatgcgatcctgaacttcgacgaagccgatacctcgtccaccctcgccgcccaagacacatggctggctcagatgaaggccaaggacactggcaagctgatcatgtacggcgatgatacttggctgaagctgtttcccggcactttcgaccgtgctgatgggacaacgagcttcttcgtgtccgacttcacgcaggtcgacaacaatgtgacgagacatgttcccggtgagctgctgaacgatgactggaacaccatggtgctgcattatctcggcttagaccacatcggccacaagactggcccgcgcgggcccaacatgatccccaagcagcatgaaatggatggcgtagtccgccaattatatgaagctatgaagactcaagatcatttgaagtcaaccctgctggttctatgtggtgatcacggtatgaacgacgctggaaatcatggagcctcgtcaccaggagagacatcagccgctttgattttcatgtcgccaaagcttcgtcagatttcaggcgatgtcagagccccagcgaaatatgtcgacgacttccaatactatcgctcagtcgaacaatctgatcttgctcccacactcgctgctcttctagggttccctatcccgaaaaatagcttgggctctttcattgtagaatttctccccttatggtctaatgctcaggacaaggtccagatcctcgttcagaacgccaggcagattttgtccatcgtaactgctagcctcggtgcttccagcccagaaactgccgtcagtgcagaacaatgcctccacgccccttcgccagcggccggattggtttgcgaatggcagattgagattagtggcatcgccaacgtggcggcaacggattcttcagagtaccaagcccaggtattggcaatatcgagatggctatctagagcccaagaattgatgagtggtatggctagcaattacgatgtcggtagacttacactgggaagcgtgataatctcggttgcttctattgctgcgatattggctagtttccagtcaatccagccgactgtttgtggtttgggtcccttcatgttgattaccactttatacagtgtgatgatgtttgccagtagctttgtggaagaagaacagcatttctggtattggtcaacaacagcatggctattctatcttgctctgagaagacttccgttgccgacccgaaaattcatcatgacagcagcagcagggctcgtgattatgcgattgacacgaacatggaaccaaactggacagaaattcgcgggcgaacccgatattgtgacaacatatctcatcccttatccaacactgatgtggattctggtatggtcaacatatctaatgtcaagcagacaactactacggagcttgggtggcgttccaactgtactctccggttcagtcgtcgccggtgtagtaacttcagctgtgtctttcaagctctcgttcacgaagcaggatgcacctgaacttgtggttggaatagcgaagttcttcgccgatctctttgatgggccgtcactggtagtccaagcccggactgtattcatgggcattgggctcactgcgctctacccagtttttgtacttatcgtaaatccagcgaaagcttccaaagaacacgctttgcgaggattccatcacctctatacgctcatcgcattaacccaatcgcgcaccaccaacgcaccattgttcctattattctatggcatcgagtattacctctacaaactagatctcgagcctatagaagtcaccacctcagcgttactgttgcagcacgcctccttcttcgctatgggtggttccaatgcctttacaggaatcgatctctctagcgcttacaacggcgtcagcgactttaacgtctttcttgtaggtgtcctgacgtttgtaagtaactgggctgggccgatctggtggatgtcgagtgccaatctcctcttgctgcggagtaggagtaattctttgggaggtgcgaaagctggtggcaacattgcacggcctaatacattcctacaacacgcatctctcctgacagcattcgttgctgtgacgttgggcgctgtgatggtagcttgtacgacgttaaggacgcatctttttatttggaccgtgttttcaccgaagtatctctatagcatggcttggagtttggggcagcatctcgttgttaacatgggcctaggcggcttattgtattcgcttggatgcgtaccataa

SEQ ID NO: 5568 - protein, 872 aa, Muscodor strobelii
  misc_feature: SGI Peptide ID NO. 561573
  misc_feature (59)..(416): Pfam Id: PF01663 Pfam Desc: Type I phosphodiesterase / nucleotide pyrophosphatase
  misc_feature (59)..(120): Pfam Id: PF01663 Pfam Desc: Type I phosphodiesterase / nucleotide pyrophosphatase
  misc_feature (3)..(868): NCBI GI: 39953549 Blast Desc: MGG_08839 [Magnaporthe grisea 70-15] gi|145021226|gb|EDK05355.1| MGG_08839 [Magnaporthe grisea 70-15]
  misc_feature (6)..(869): NCBI GI: 154300861 Blast Desc: BC1G_10730 [Botryotinia fuckeliana B05.10] gi|150856478|gb|EDN31670.1| BC1G_10730 [Botryotinia fuckeliana B05.10]
  misc_feature (4)..(870): NCBI GI: 171686974 Blast Desc: protein product [Podospora anserina] gi|170943448|emb|CAP69101.1| protein product [Podospora anserina]
  misc_feature (94)..(869): NCBI GI: 256726208 Blast Desc: [Nectria haematococca mpVI 77-13-4]
  misc_feature (94)..(869): NCBI GI: 46111255 Blast Desc: FG02509.1 [Gibberella zeae PH-1]
  misc_feature (10)..(870): NCBI GI: 225554693 Blast Desc: phosphoethanolamine transferase [Ajellomyces capsulatus G186AR]
  misc_feature (10)..(870): NCBI GI: 240277037 Blast Desc: phosphoethanolamine transferase [Ajellomyces capsulatus H143]
  misc_feature (19)..(867): NCBI GI: 240110893 Blast Desc: CPC735_037550 [Coccidioides posadasii C735 delta SOWgp]
  misc_feature (12)..(798): NCBI GI: 156048590 Blast Desc: SS1G_09026 [Sclerotinia sclerotiorum 1980] gi|154693423|gb|EDN93161.1| SS1G_09026 [Sclerotinia sclerotiorum 1980]
  misc_feature (17)..(870): NCBI GI: 239608882 Blast Desc: transferase [Ajellomyces dermatitidis ER-3]
MHRKHGSPLSRLLLVAANLLIPAAILIFATGFFPYKPFLPGLAKYDDFLDASPPDAPFDKLVFMVVDALRSDFVYTEGSGFQFTQDLINNGVAIPFTAHATSPTVTMPRIKAMTTGSTPSFLDAILNFDEADTSSTLAAQDTWLAQMKAKDTGKLIMYGDDTWLKLFPGTFDRADGTTSFFVSDFTQVDNNVTRHVPGELLNDDWNTMVLHYLGLDHIGHKTGPRGPNMIPKQHEMDGVVRQLYEAMKTQDHLKSTLLVLCGDHGMNDAGNHGASSPGETSAALIFMSPKLRQISGDVRAPAKYVDDFQYYRSVEQSDLAPTLAALLGFPIPKNSLGSFIVEFLPLWSNAQDKVQILVQNARQILSIVTASLGASSPETAVSAEQCLHAPSPAAGLVCEWQIEISGIANVAATDSSEYQAQVLAISRWLSRAQELMSGMASNYDVGRLTLGSVIISVASIAAILASFQSIQPTVCGLGPFMLITTLYSVMMFASSFVEEEQHFWYWSTTAWLFYLALRRLPLPTRKFIMTAAAGLVIMRLTRTWNQTGQKFAGEPDIVTTYLIPYPTLMWILVWSTYLMSSRQLLRSLGGVPTVLSGSVVAGVVTSAVSFKLSFTKQDAPELVVGIAKFFADLFDGPSLVVQARTVFMGIGLTALYPVFVLIVNPAKASKEHALRGFHHLYTLIALTQSRTTNAPLFLLFYGIEYYLYKLDLEPIEVTTSALLLQHASFFAMGGSNAFTGIDLSSAYNGVSDFNVFLVGVLTFVSNWAGPIWWMSSANLLLLRSRSNSLGGAKAGGNIARPNTFLQHASLLTAFVAVTLGAVMVACTTLRTHLFIWTVFSPKYLYSMAWSLGQHLVVNMGLGGLLYSLGCVP

SEQ ID NO: 5569 - DNA, 3319 bp, Muscodor strobelii
  misc_feature: SGI EST ID NO. CUFF.14088.0
  misc_feature: Variant of the nucleotide sequence at SEQ ID NO 5567
cctgcctttcagcatgcaacacgtcgggttggtagggctgaaattcaggggtcttgcgggaggtgttcagctgctgaaacttcaattgcgaactgcagcgattttggatattgggccttcggaaccatccagcgattctccccgcgccgtgctcagctcaccttcgacattcctttgatcaagcaccctccattgaggcttcagctgcctcaattgtatcctggtctcatgagagaaccgtggattcatatctctgccattggatatgcaccgtaaacatggcagccccctatcgaggcttctcctggttgcggcaaaccttctcatacccgctgccattttgatctttgcgactggcttcttcccctacaagccctttcttcctggtctcgccaagtatgacgacttcctggatgcgtcgcctccagatgcgccattcgacaagcttgtgttcatggttgtagatgccttgcgcagcgactttgtatacaccgagggctctggtttccaattcacccaagacttaatcaataatggagttgccattcccttcacggcccatgcgacgtcgcccacggtcacgatgccgcgcatcaaagctatgacgactggttcgacgccctcctttctcgatgcgatcctgaacttcgacgaagccgatacctcgtccaccctcgccgcccaagacacatggctggctcagatgaaggccaaggacactggcaagctgatcatgtacggcgatgatacttggctgaagctgtttcccggcactttcgaccgtgctgatgggacaacgagcttcttcgtgtccgacttcacgcaggtcgacaacaatgtgacgagacatgttcccggtgagctgctgaacgatgactggaacaccatggtgctgcattatctcggcttagaccacatcggccacaagactggcccgcgcgggcccaacatgatccccaagcagcatgaaatggatggcgtagtccgccaattatatgaagctatgaagactcaagatcatttgaagtcaaccctgctggttctatgtggtgatcacggtatgaacgacgctggaaatcatggagcctcgtcaccaggagagacatcagccgctttgattttcatgtcgccaaagcttcgtcagatttcaggcgatgtcagagccccagcgaaatatgtcgacgacttccaatactatcgctcagtcgaacaatctgatcttgctcccacactcgctgctcttctagggttccctatcccgaaaaatagcttgggctctttcattgtagaatttctccccttatggtctaatgctcaggacaaggtccagatcctcgttcagaacgccaggcagattttgtccatcgtaactgctagcctcggtgcttccagcccagaaactgccgtcagtgcagaacaatgcctccacgccccttcgccagcggccggattggtttgcgaatggcagattgagattagtggcatcgccaacgtggcggcaacggattcttcagagtaccaagcccaggtattggcaatatcgagatggctatctagagcccaagaattgatgagtggtatggctagcaattacgatgtcggtagacttacactgggaagcgtgataatctcggttgcttctattgctgcgatattggctagtttccagtcaatccagccgactgtttgtggtttgggtcccttcatgttgattaccactttatacagtgtgatgatgtttgccagtagctttgtggaagaagaacagcatttctggtattggtcaacaacagcatggctattctatcttgctctgagaagacttccgttgccgacccgaaaattcatcatgacagcagcagcagggctcgtgattatgcgattgacacgaacatggaaccaaactggacagaaattcgcgggcgaacccgatattgtgacaacatatctcatcccttatccaacactgatgtggattctggtatggtcaacatatctaatgtcaagcagacaactactacggagcttgggtggcgttccaactgtactctccggttcagtcgtcgccggtgtagtaacttcagctgtgtctttcaagctctcgttcacgaagcaggatgcacctgaacttgtggttggaatagcgaagttcttcgccgatctctttgatgggccgtcactggtagtccaagcccggactgtattcatgggcattgggctcactgcgctctacccagtttttgtacttatcgtaaatccagcgaaagcttccaaagaacacgctttgcgaggattccatcacctctatacgctcatcgcattaacccaatcgcgcaccaccaacgcaccattgttcctattattctatggcatcgagtattacctctacaaactagatctcgagcctatagaagtcaccacctcagcgttactgttgcagcacgcctccttcttcgctatgggtggttccaatgcctttacaggaatcgatctctctagcgcttacaacggcgtcagcgactttaacgtctttcttgtaggtgtcctgacgtttgtaagtaactgggctgggccgatctggtggatgtcgagtgccaatctcctcttgctgcggagtaggagtaattctttgggaggtgcgaaagctggtggcaacattgcacggcctaatacattcctacaacacgcatctctcctgacagcattcgttgctgtgacgttgggcgctgtgatggtagcttgtacgacgttaaggacgcatctttttatttggaccgtgttttcaccgaagtatctctatagcatggcttggagtttggggcagcatctcgttgttaacatgggcctaggcggcttattgtattcgcttggatgcgtaccataactatagacatgtgtatatattgctagactatataagcatcgaagtattacggagcgaaatacagtagtctgttactcgtcaaattgggttgttactagcaattatggtgtttgagctagcacgtggttctctattctaggtattcttacgtccattgcagccgtatccgcatgacatggatctggccgctagtatgaggtgtgacagcattcagtatcatgacattgtttaagacagtaggtcaggtggtctggacttggaatgccgccgtgttacatccttgattatgtcgacttaccaagcattcttatattcggctattgttcgcagttacaatgttgtcatatctgtttattagaaattctatgacactgcaaacagcgagcacgaaacgaaaacgaatggaatggtgctgaccgtgagagtaagctggaa

SEQ ID NO: 5570 - DNA, 1248 bp, Muscodor strobelii
  misc_feature: SGI cDNA ID NO. 561574
  misc_feature: Encodes the peptide sequence at SEQ ID NO 5571
atggtgacagaagacaatccattcatccgcttcaagaaccacgtccatagcaaagtacggcgaggaaccgagaccatattcggcactcagtctcctccaccaccagcactaccatcaacaccgcaagaaaccccaaattccatcaacgacaaccaatcgcaacactcatcatcatcatcgaccatggcctcaccaagagatttggaagagccatattctagtatagaggacgtctatgactgggccatcaactcgccatactctccactccacttacagacgcttaggcaaccaactccgaaagatgctcccgcgggttgggaaggtcacttcaccttccgagatgcttttgaagatctcctagtcgccgcccagggcgaaccacttccaagaatgagatcgatcttgcccaaaaaggcagaagagttggaaaacgtgttcagccaagttacacacgtcaacgactgggtggccgacctcggtgtctggagcttatggcactcgtacttcaacttgaagcccgatgttgacgactgggactggttagccacccgtttcaatagaagttttgatcaacggtcttggttctacccgcagggcccaaagatctgggggccttgggcccaatataaatcttcactggcgcttgacaggccgcatccttggacgggaacacagctcagcagcgaagagagatgggcacagtttgccaggtttattttacaaggtagtttaaatgccttgttggcagccgatgagcatgagcagcaggagactgatcgagaggttgatcgagaggttgacgacagcctatggcaaaatatcaaggacagagccgcggaggggcagaaaaagaccgaggcgagcactgaagaggatctttaccagtggaacgcaaaggctgtcgagcaaactaagccgatctcaaagttccctgagcagagcacgttcgagcgcaagtttgcggacggtagcaagatgatacaaactactacgagcgaagaacaagacggatatgtcaaaacaacgaagaaatcgcaagagtttgatgcccagggcaacctcgtgtctgagtcaacagagacatcaagctcgcgaacttggtccgccagaatgccgggaattggagggtcattttcttggacttcaagccgagagagcaatagaggtggtgacagggacgagaacgaatcagagccgaagactgggaaggacggccgtgaacgcggttggttttggacaaaataa

SEQ ID NO: 5571 - protein, 415 aa, Muscodor strobelii
  misc_feature: SGI Peptide ID NO. 561574
  misc_feature (62)..(134): NCBI GI: 46111261 Blast Desc: FG02512.1 [Gibberella zeae PH-1]
  misc_feature (85)..(130): NCBI GI: 256725806 Blast Desc: NECHADRAFT_81887 [Nectria haematococca mpVI 77-13-4]
MVTEDNPFIRFKNHVHSKVRRGTETIFGTQSPPPPALPSTPQETPNSINDNQSQHSSSSSTMASPRDLEEPYSSIEDVYDWAINSPYSPLHLQTLRQPTPKDAPAGWEGHFTFRDAFEDLLVAAQGEPLPRMRSILPKKAEELENVFSQVTHVNDWVADLGVWSLWHSYFNLKPDVDDWDWLATRFNRSFDQRSWFYPQGPKIWGPWAQYKSSLALDRPHPWTGTQLSSEERWAQFARFILQGSLNALLAADEHEQQETDREVDREVDDSLWQNIKDRAAEGQKKTEASTEEDLYQWNAKAVEQTKPISKFPEQSTFERKFADGSKMIQTTTSEEQDGYVKTTKKSQEFDAQGNLVSESTETSSSRTWSARMPGIGGSFSWTSSRESNRGGDRDENESEPKTGKDGRERGWFWTK

SEQ ID NO: 5572 - DNA, 3771 bp, Muscodor strobelii
  misc_feature: SGI EST ID NO. CUFF.14090.0
  misc_feature: Variant of the nucleotide sequence at SEQ ID NO 5570
tgtaaccatacacgttgccaccaacagcttcggccacttgagatggctggaagggacggatttaactagtacaattcaaataaatatcgatttctttgcgctctactcctttgagacctcatcacatgggagtaagatggtgacagaagacaatccattcatccgcttcaagaaccacgtccatagcaaagtacggcgaggaaccgagaccatattcggcactcagtctcctccaccaccagcactaccatcaacaccgcaagaaaccccaaattccatcaacgacaaccaatcgcaacactcatcatcatcatcgaccatggcctcaccaagagatttggaagagccatattctagtatagaggacgtctatgactgggccatcaactcgccatactctccactccacttacagacgcttaggcaaccaactccgaaagatgctcccgcgggttgggaaggtcacttcaccttccgagatgcttttgaagatctcctagtcgccgcccagggcgaaccacttccaagaatgagatcgatcttgcccaaaaaggcagaagagttggaaaacgtgttcagccaagttacacacgtcaacgactgggtggccgacctcggtgtctggagcttatggcactcgtacttcaacttgaagcccgatgttgacgactgggactggttagccacccgtttcaatagaagttttgatcaacggtcttggttctacccgcagggcccaaagatctgggggccttgggcccaatataaatcttcactggcgcttgacaggccgcatccttggacgggaacacagctcagcagcgaagagagatgggcacagtttgccaggtttattttacaaggtagtttaaatgccttgttggcagccgatgagcatgagcagcaggagactgatcgagaggttgatcgagaggttgacgacagcctatggcaaaatatcaaggacagagccgcggaggggcagaaaaagaccgaggcgagcactgaagaggatctttaccagtggaacgcaaaggctgtcgagcaaactaagccgatctcaaagttccctgagcagagcacgttcgagcgcaagtttgcggacggtagcaagatgatacaaactactacgagcgaagaacaagacggatatgtcaaaacaacgaagaaatcgcaagagtttgatgcccagggcaacctcgtgtctgagtcaacagagacatcaagctcgcgaacttggtccgccagaatgccgggaattggagggtcattttcttggacttcaagccgagagagcaatagaggtggtgacagggacgagaacgaatcagagccgaagactgggaaggacggccgtgaacgcggttggttttggacaaaataaaagtctgtgaagctgaggtaaattgtgtatggcattggcgttagggttgggatatctacgaagtttatgaacactctcctctcacttctaaggctttctctcgggcaataccagtacttagtttgcagagttgccagttgatgtacaacaacatgattctagctccgtgcacccgccttcttcttcctcatcatccgtttcctaccaatgattttctgttgcagagtatcatgtgccgatgtcttctcgtcagcggccttgactggatcctcggatcttcccttgcctttttgtttctgccatttccctttcgaaacagagaagtctttgcccttcggcactcccgaggatttctcagcctcagcctgacccttttggtgagcatgctgccctgctctgtttttctcttgtaagtccctacgtcgagccacgacctgcgcattctcgatggcaaactcaacgatcaaacgaagcgtcttgccctcgtctgtttttactgcatggccgttcaaccatcttagccccataagagcacatcgatgtgatgtgtactcaatgaaaccgtaccctcgacttttgctggcaccgtccatctcgtgaactttggatccttccttattctcgtaaatgatctttgtttgcttgacaacacccttccccttttctttgcgacggcgttctgcttctttttcttctgcgcctcctcgcgcaagctcttctttggaaaggggttgacgctttcctgctttgacatctgtggcaaacccaacaatagcttcgcgagccagtgctttcaaggctttcgaatctagattcttaggcatatttcggactgccaaccgtgtgagactgatgtgcagagtagggttgccttggatgagcttctttcgctgtgcagcactctggtctcttattttgacttcagagggtgctagcatattgaatatcgtcgagtctctcggaataataccttcagagagtagatagagtcgacgcttgtcctggtcctttccttgtcgggcggctacgccagtttccgcgagacgtgtcgcttcgtccttgctcacagcttgtgatacttggagcacacgaccctcaatggtatatttgccttcctcgtccgctgtttcattttgtaagattgactttttattcgaaattccactctgctgtggacgcggcgctcccttgagacagagcttcatatcgtcaacacttgcaaagcagacaaaacctgtgccagccggtcgatctgtcgccctgtccgtcacgactcgggcataccttacgcgtccaaactgttcaaaatgagctttcaactcagaatccgtcgtagtaaaaggcaaatttcgaatgaagattgttgacgagttatcagtttgtggtttaggctttgctgtaacggcagctccaccttcagcagtctcgtcctccgaatcgtcatcctcgttgtcttcatcttcttcggcgttgctatcttcctcttcgagattctgcatgtgatttttcatgaagtttctcaaatcctcatcatcttcttcatcttcgtctttctcgtctcctctctcttcagattcagtattgtcggcttcttctgattcgccttcatcgtccccttcctgctctttgcttgcaacagtctcgtcttcttgtttctggtgcttattccactcatctttcgagactgcccagtcaactgatacagtcctcccgtccacaaccttcccgtttactgcttccattgctgcctctgcatttttcctcccacgcattgtgatgaaaccaaatccagagagctttcccttgttttgaggaagatcagcgtacttgacaagaccatagctccgaaagagagcagacaactgctcagggcgcttgatactccatggcaggttgcgaactatcagcttaggcgctttacgggcctcagccagagcagtctttctctcttccttcttagctgcggcaccatcggccgcggcgccaggctggcggtgtcggctttcggcaatatccaggaagatggggcggccgtctagcttgtgaccctggagctgttctttagcagcctgggtatcttcgacatctgtaaatgtgacaaaaccgaagcccttggaagtcttggtttgggtatcaacaacaacagtggcgtgcttgacggggaaatgttgagagaagaagttggtcaaagcctcactggtggtagtcggggctaatgagcggacgaacagtgacctgcttgcttcggttcgagctttcttagagggccgctgttcgttggtggccccagatccaatttgggcctcttcggcctcagcagcctgcctcttgagatccttctttcccatggtccagatatgtcttatgtgaaatggccacggatttac

SEQ ID NO: 5573 - DNA, 2190 bp, Muscodor strobelii
  misc_feature: SGI cDNA ID NO. 561575
  misc_feature: Encodes the peptide sequence at SEQ ID NO 5574
atgggaaagaaggatctcaagaggcaggctgctgaggccgaagaggcccaaattggatctggggccaccaacgaacagcggccctctaagaaagctcgaaccgaagcaagcaggtcactgttcgtccgctcattagccccgactaccaccagtgaggctttgaccaacttcttctctcaacatttccccgtcaagcacgccactgttgttgttgatacccaaaccaagacttccaagggcttcggttttgtcacatttacagatgtcgaagatacccaggctgctaaagaacagctccagggtcacaagctagacggccgccccatcttcctggatattgccgaaagccgacaccgccagcctggcgccgcggccgatggtgccgcagctaagaaggaagagagaaagactgctctggctgaggcccgtaaagcgcctaagctgatagttcgcaacctgccatggagtatcaagcgccctgagcagttgtctgctctctttcggagctatggtcttgtcaagtacgctgatcttcctcaaaacaagggaaagctctctggatttggtttcatcacaatgcgtgggaggaaaaatgcagaggcagcaatggaagcagtaaacgggaaggttgtggacgggaggactgtatcagttgactgggcagtctcgaaagatgagtggaataagcaccagaaacaagaagacgagactgttgcaagcaaagagcaggaaggggacgatgaaggcgaatcagaagaagccgacaatactgaatctgaagagagaggagacgagaaagacgaagatgaagaagatgatgaggatttgagaaacttcatgaaaaatcacatgcagaatctcgaagaggaagatagcaacgccgaagaagatgaagacaacgaggatgacgattcggaggacgagactgctgaaggtggagctgccgttacagcaaagcctaaaccacaaactgataactcgtcaacaatcttcattcgaaatttgccttttactacgacggattctgagttgaaagctcattttgaacagtttggacgcgtaaggtatgcccgagtcgtgacggacagggcgacagatcgaccggctggcacaggttttgtctgctttgcaagtgttgacgatatgaagctctgtctcaagggagcgccgcgtccacagcagagtggaatttcgaataaaaagtcaatcttacaaaatgaaacagcggacgaggaaggcaaatataccattgagggtcgtgtgctccaagtatcacaagctgtgagcaaggacgaagcgacacgtctcgcggaaactggcgtagccgcccgacaaggaaaggaccaggacaagcgtcgactctatctactctctgaaggtattattccgagagactcgacgatattcaatatgctagcaccctctgaagtcaaaataagagaccagagtgctgcacagcgaaagaagctcatccaaggcaaccctactctgcacatcagtctcacacggttggcagtccgaaatatgcctaagaatctagattcgaaagccttgaaagcactggctcgcgaagctattgttgggtttgccacagatgtcaaagcaggaaagcgtcaacccctttccaaagaagagcttgcgcgaggaggcgcagaagaaaaagaagcagaacgccgtcgcaaagaaaaggggaagggtgttgtcaagcaaacaaagatcatttacgagaataaggaaggatccaaagttcacgagatggacggtgccagcaaaagtcgagggtacggtttcattgagtacacatcacatcgatgtgctcttatggggctaagatggttgaacggccatgcagtaaaaacagacgagggcaagacgcttcgtttgatcgttgagtttgccatcgagaatgcgcaggtcgtggctcgacgtagggacttacaagagaaaaacagagcagggcagcatgctcaccaaaagggtcaggctgaggctgagaaatcctcgggagtgccgaagggcaaagacttctctgtttcgaaagggaaatggcagaaacaaaaaggcaagggaagatccgaggatccagtcaaggccgctgacgagaagacatcggcacatgatactctgcaacagaaaatcattggtaggaaacggatgatgaggaagaagaaggcgggtgcacggagctag

SEQ ID NO: 5574 - protein, 729 aa, Muscodor strobelii
  misc_feature: SGI Peptide ID NO. 561575
  misc_feature (40)..(111): Pfam Id: PF00076 Pfam Desc: RNA recognition motif. (a.k.a. RRM, RBD, or RNP domain)
  misc_feature (330)..(402): Pfam Id: PF00076 Pfam Desc: RNA recognition motif. (a.k.a. RRM, RBD, or RNP domain)
  misc_feature (148)..(218): Pfam Id: PF00076 Pfam Desc: RNA recognition motif. (a.k.a. RRM, RBD, or RNP domain)
  misc_feature (330)..(387): Pfam Id: PF00076 Pfam Desc: RNA recognition motif. (a.k.a. RRM, RBD, or RNP domain)
  misc_feature (28)..(728): NCBI GI: 85109471 Blast Desc: NCU06217 [Neurospora crassa OR74A] gi|28924577|gb|EAA33697.1| NCU06217 [Neurospora crassa OR74A]
  misc_feature (1)..(729): NCBI GI: 116191833 Blast Desc: CHGG_05634 [Chaetomium globosum CBS 148.51] gi|88181547|gb|EAQ89015.1| CHGG_05634 [Chaetomium globosum CBS 148.51]
  misc_feature (3)..(728): NCBI GI: 256726207 Blast Desc: NECHADRAFT_43518 [Nectria haematococca mpVI 77-13-4]
  misc_feature (30)..(728): NCBI GI: 46111259 Blast Desc: FG02511.1 [Gibberella zeae PH-1]
  misc_feature (2)..(728): NCBI GI: 39953560 Blast Desc: MGG_08840 [Magnaporthe grisea 70-15] gi|145021225|gb|EDK05354.1| MGG_08840 [Magnaporthe grisea 70-15]
  misc_feature (29)..(726): NCBI GI: 156048606 Blast Desc: SS1G_09035 [Sclerotinia sclerotiorum 1980] gi|154693431|gb|EDN93169.1| SS1G_09035 [Sclerotinia sclerotiorum 1980]
  misc_feature (28)..(635): NCBI GI: 171686972 Blast Desc: protein product [Podospora anserina] gi|170943447|emb|CAP69100.1| protein product [Podospora anserina]
  misc_feature (26)..(651): NCBI GI: 154297435 Blast Desc: BC1G_12314 [Botryotinia fuckeliana B05.10] gi|150858510|gb|EDN33702.1| BC1G_12314 [Botryotinia fuckeliana B05.10]
  misc_feature (6)..(728): NCBI GI: 261360122 Blast Desc: nucleolar protein [Verticillium albo-atrum VaMs.102]
  misc_feature (38)..(726): NCBI GI: 240107888 Blast Desc: RNA recognition motif containing protein [Coccidioides posadasii C735 delta SOWgp]
MGKKDLKRQAAEAEEAQIGSGATNEQRPSKKARTEASRSLFVRSLAPTTTSEALTNFFSQHFPVKHATVVVDTQTKTSKGFGFVTFTDVEDTQAAKEQLQGHKLDGRPIFLDIAESRHRQPGAAADGAAAKKEERKTALAEARKAPKLIVRNLPWSIKRPEQLSALFRSYGLVKYADLPQNKGKLSGFGFITMRGRKNAEAAMEAVNGKVVDGRTVSVDWAVSKDEWNKHQKQEDETVASKEQEGDDEGESEEADNTESEERGDEKDEDEEDDEDLRNFMKNHMQNLEEEDSNAEEDEDNEDDDSEDETAEGGAAVTAKPKPQTDNSSTIFIRNLPFTTTDSELKAHFEQFGRVRYARVVTDRATDRPAGTGFVCFASVDDMKLCLKGAPRPQQSGISNKKSILQNETADEEGKYTIEGRVLQVSQAVSKDEATRLAETGVAARQGKDQDKRRLYLLSEGIIPRDSTIFNMLAPSEVKIRDQSAAQRKKLIQGNPTLHISLTRLAVRNMPKNLDSKALKALAREAIVGFATDVKAGKRQPLSKEELARGGAEEKEAERRRKEKGKGVVKQTKIIYENKEGSKVHEMDGASKSRGYGFIEYTSHRCALMGLRWLNGHAVKTDEGKTLRLIVEFAIENAQVVARRRDLQEKNRAGQHAHQKGQAEAEKSSGVPKGKDFSVSKGKWQKQKGKGRSEDPVKAADEKTSAHDTLQQKIIGRKRMMRKKKAGARS

SEQ ID NO: 5575 - DNA, 3771 bp, Muscodor strobelii
  misc_feature: SGI EST ID NO. CUFF.14090.0
  misc_feature: Variant of the nucleotide sequence at SEQ ID NO 5573
gtaaatccgtggccatttcacataagacatatctggaccatgggaaagaaggatctcaagaggcaggctgctgaggccgaagaggcccaaattggatctggggccaccaacgaacagcggccctctaagaaagctcgaaccgaagcaagcaggtcactgttcgtccgctcattagccccgactaccaccagtgaggctttgaccaacttcttctctcaacatttccccgtcaagcacgccactgttgttgttgatacccaaaccaagacttccaagggcttcggttttgtcacatttacagatgtcgaagatacccaggctgctaaagaacagctccagggtcacaagctagacggccgccccatcttcctggatattgccgaaagccgacaccgccagcctggcgccgcggccgatggtgccgcagctaagaaggaagagagaaagactgctctggctgaggcccgtaaagcgcctaagctgatagttcgcaacctgccatggagtatcaagcgccctgagcagttgtctgctctctttcggagctatggtcttgtcaagtacgctgatcttcctcaaaacaagggaaagctctctggatttggtttcatcacaatgcgtgggaggaaaaatgcagaggcagcaatggaagcagtaaacgggaaggttgtggacgggaggactgtatcagttgactgggcagtctcgaaagatgagtggaataagcaccagaaacaagaagacgagactgttgcaagcaaagagcaggaaggggacgatgaaggcgaatcagaagaagccgacaatactgaatctgaagagagaggagacgagaaagacgaagatgaagaagatgatgaggatttgagaaacttcatgaaaaatcacatgcagaatctcgaagaggaagatagcaacgccgaagaagatgaagacaacgaggatgacgattcggaggacgagactgctgaaggtggagctgccgttacagcaaagcctaaaccacaaactgataactcgtcaacaatcttcattcgaaatttgccttttactacgacggattctgagttgaaagctcattttgaacagtttggacgcgtaaggtatgcccgagtcgtgacggacagggcgacagatcgaccggctggcacaggttttgtctgctttgcaagtgttgacgatatgaagctctgtctcaagggagcgccgcgtccacagcagagtggaatttcgaataaaaagtcaatcttacaaaatgaaacagcggacgaggaaggcaaatataccattgagggtcgtgtgctccaagtatcacaagctgtgagcaaggacgaagcgacacgtctcgcggaaactggcgtagccgcccgacaaggaaaggaccaggacaagcgtcgactctatctactctctgaaggtattattccgagagactcgacgatattcaatatgctagcaccctctgaagtcaaaataagagaccagagtgctgcacagcgaaagaagctcatccaaggcaaccctactctgcacatcagtctcacacggttggcagtccgaaatatgcctaagaatctagattcgaaagccttgaaagcactggctcgcgaagctattgttgggtttgccacagatgtcaaagcaggaaagcgtcaacccctttccaaagaagagcttgcgcgaggaggcgcagaagaaaaagaagcagaacgccgtcgcaaagaaaaggggaagggtgttgtcaagcaaacaaagatcatttacgagaataaggaaggatccaaagttcacgagatggacggtgccagcaaaagtcgagggtacggtttcattgagtacacatcacatcgatgtgctcttatggggctaagatggttgaacggccatgcagtaaaaacagacgagggcaagacgcttcgtttgatcgttgagtttgccatcgagaatgcgcaggtcgtggctcgacgtagggacttacaagagaaaaacagagcagggcagcatgctcaccaaaagggtcaggctgaggctgagaaatcctcgggagtgccgaagggcaaagacttctctgtttcgaaagggaaatggcagaaacaaaaaggcaagggaagatccgaggatccagtcaaggccgctgacgagaagacatcggcacatgatactctgcaacagaaaatcattggtaggaaacggatgatgaggaagaagaaggcgggtgcacggagctagaatcatgttgttgtacatcaactggcaactctgcaaactaagtactggtattgcccgagagaaagccttagaagtgagaggagagtgttcataaacttcgtagatatcccaaccctaacgccaatgccatacacaatttacctcagcttcacagacttttattttgtccaaaaccaaccgcgttcacggccgtccttcccagtcttcggctctgattcgttctcgtccctgtcaccacctctattgctctctcggcttgaagtccaagaaaatgaccctccaattcccggcattctggcggaccaagttcgcgagcttgatgtctctgttgactcagacacgaggttgccctgggcatcaaactcttgcgatttcttcgttgttttgacatatccgtcttgttcttcgctcgtagtagtttgtatcatcttgctaccgtccgcaaacttgcgctcgaacgtgctctgctcagggaactttgagatcggcttagtttgctcgacagcctttgcgttccactggtaaagatcctcttcagtgctcgcctcggtctttttctgcccctccgcggctctgtccttgatattttgccataggctgtcgtcaacctctcgatcaacctctcgatcagtctcctgctgctcatgctcatcggctgccaacaaggcatttaaactaccttgtaaaataaacctggcaaactgtgcccatctctcttcgctgctgagctgtgttcccgtccaaggatgcggcctgtcaagcgccagtgaagatttatattgggcccaaggcccccagatctttgggccctgcgggtagaaccaagaccgttgatcaaaacttctattgaaacgggtggctaaccagtcccagtcgtcaacatcgggcttcaagttgaagtacgagtgccataagctccagacaccgaggtcggccacccagtcgttgacgtgtgtaacttggctgaacacgttttccaactcttctgcctttttgggcaagatcgatctcattcttggaagtggttcgccctgggcggcgactaggagatcttcaaaagcatctcggaaggtgaagtgaccttcccaacccgcgggagcatctttcggagttggttgcctaagcgtctgtaagtggagtggagagtatggcgagttgatggcccagtcatagacgtcctctatactagaatatggctcttccaaatctcttggtgaggccatggtcgatgatgatgatgagtgttgcgattggttgtcgttgatggaatttggggtttcttgcggtgttgatggtagtgctggtggtggaggagactgagtgccgaatatggtctcggttcctcgccgtactttgctatggacgtggttcttgaagcggatgaatggattgtcttctgtcaccatcttactcccatgtgatgaggtctcaaaggagtagagcgcaaagaaatcgatatttatttgaattgtactagttaaatccgtcccttccagccatctcaagtggccgaagctgttggtggcaacgtgtatggttaca

SEQ ID NO: 5576 - DNA, 780 bp, Muscodor strobelii
  misc_feature: SGI cDNA ID NO. 561576
  misc_feature: Encodes the peptide sequence at SEQ ID NO 5577
atgctagcaccctctgaagtcaaaataagagaccagagtgctgcacagcgaaagaagctcatccaaggcaaccctactctgcacatcagtctcacacggttggcagtccgaaatatgcctaagaatctagattcgaaagccttgaaagcactggctcgcgaagctattgttgggtttgccacagatgtcaaagcaggaaagcgtcaacccctttccaaagaagagcttgcgcgaggaggcgcagaagaaaaagaagcagaacgccgtcgcaaagaaaaggggaagggtgttgtcaagcaaacaaagatcatttacgagaataaggaaggatccaaagttcacgagatggacggtgccagcaaaagtcgagggtacggtttcattgagtacacatcacatcgatgtgctcttatggggctaagatggttgaacggccatgcagtaaaaacagacgagggcaagacgcttcgtttgatcgttgagtttgccatcgagaatgcgcaggtcgtggctcgacgtagggacttacaagagaaaaacagagcagggcagcatgctcaccaaaagggtcaggctgaggctgagaaatcctcgggagtgccgaagggcaaagacttctctgtttcgaaagggaaatggcagaaacaaaaaggcaagggaagatccgaggatccagtcaaggccgctgacgagaagacatcggcacatgatactctgcaacagaaaatcattggtaggaaacggatgatgaggaagaagaaggcgggtgcacggagctag

SEQ ID NO: 5577 - protein, 259 aa, Muscodor strobelii
  misc_feature: SGI Peptide ID NO. 561576
  misc_feature (1)..(256): NCBI GI: 156048606 Blast Desc: SS1G_09035 [Sclerotinia sclerotiorum 1980] gi|154693431|gb|EDN93169.1| SS1G_09035 [Sclerotinia sclerotiorum 1980]
  misc_feature (1)..(181): NCBI GI: 154297435 Blast Desc: BC1G_12314 [Botryotinia fuckeliana B05.10] gi|150858510|gb|EDN33702.1| BC1G_12314 [Botryotinia fuckeliana B05.10]
  misc_feature (2)..(259): NCBI GI: 116191833 Blast Desc: CHGG_05634 [Chaetomium globosum CBS 148.51] gi|88181547|gb|EAQ89015.1| CHGG_05634 [Chaetomium globosum CBS 148.51]
  misc_feature (1)..(258): NCBI GI: 85109471 Blast Desc: NCU06217 [Neurospora crassa OR74A] gi|28924577|gb|EAA33697.1| NCU06217 [Neurospora crassa OR74A]
  misc_feature (2)..(254): NCBI GI: 225560420 Blast Desc: RNA recognition domain-containing protein-containing protein [Ajellomyces capsulatus G186AR]
  misc_feature (2)..(181): NCBI GI: 154270523 Blast Desc: conserved [Ajellomyces capsulatus NAm1] gi|150409920|gb|EDN05308.1| conserved [Ajellomyces capsulatus NAm1]
  misc_feature (2)..(254): NCBI GI: 239606561 Blast Desc: ribosome biogenesis protein Nop4 [Ajellomyces dermatitidis ER-3]
  misc_feature (2)..(254): NCBI GI: 225683698 Blast Desc: nucleolar protein [Paracoccidioides brasiliensis Pb03]
  misc_feature (2)..(254): NCBI GI: 226293059 Blast Desc: nucleolar protein [Paracoccidioides brasiliensis Pb18]
  misc_feature (2)..(254): NCBI GI: 261193242 Blast Desc: ribosome biogenesis protein Nop4 [Ajellomyces dermatitidis SLH14081] gi|239589162|gb|EEQ71805.1| ribosome biogenesis protein Nop4 [Ajellomyces dermatitidis SLH14081]
MLAPSEVKIRDQSAAQRKKLIQGNPTLHISLTRLAVRNMPKNLDSKALKALAREAIVGFATDVKAGKRQPLSKEELARGGAEEKEAERRRKEKGKGVVKQTKIIYENKEGSKVHEMDGASKSRGYGFIEYTSHRCALMGLRWLNGHAVKTDEGKTLRLIVEFAIENAQVVARRRDLQEKNRAGQHAHQKGQAEAEKSSGVPKGKDFSVSKGKWQKQKGKGRSEDPVKAADEKTSAHDTLQQKIIGRKRMMRKKKAGARS

SEQ ID NO: 5578 - DNA, 3771 bp, Muscodor strobelii; identical to SEQ ID NO: 5575
  misc_feature: SGI EST ID NO. CUFF.14090.0
  misc_feature: Variant of the nucleotide sequence at SEQ ID NO 5576

SEQ ID NO: 5579 - DNA, 3198 bp, Muscodor strobelii
  misc_feature: SGI cDNA ID NO. 561577
  misc_feature: Encodes the peptide sequence at SEQ ID NO 5580
atgcccgcgcgaacctcgaggtcagcccgggcgtcggctgcggtgtccaacaaggcctctagcacaaaattgcgcgcatctaccacatcgcgcgcctcgtcctcgaatatcgacatcccagaagaagccccagacaatgaactgcgcagtcgcgtatgcgccgtcttccgcgacgcccagaagaccaccgccacacacagaaagctagctgtcaccctgcgcaagtcccacgaggcctgctgctacgaacctacgcgcccaaataaggatgcttcttccaacgacttcgatgagtctgatttcaacaatgagttcactcgatgtgtgctgaggattatgcctgttaagaaaagcgagggtgctggtgacaagaccatccgcttcatcggcttattcctccgtcatgctaacgacaaagacaacgacctacttggagaaaccgatgccgatgccagcaccatgcccgaaacaccaagcacacgcctcactacccaggtcatggaggctgtcctgccgctgctcacttccaaagacaaatttgtcagatacagatcgacccagctgatctcccatattatcaactcactcgatgccatcgatgatgagttgttccaaaaactacgccatggtctgttgcgtaggatccgcgacaaggaggccgttgtgcgatctcaagcggtattaggtctaggtagactagcaggcaatcaagtggagagcatggccaatccagacgatagtgacgatgatgctgagactggcctgctcgagaagctcttggaagtcttgcagaacgaccccagtgccgaggtccggcggtctctgttggtaaacctgccaattctgccaaacactcttccctatcttctcgaaagggcaagagatcaagacgcagcgacacgtcgcgcggtgtactcccgcctcttacctgcacttggcgatttccggcatttgtctctctccatgagagaaaaactactgcgatggggtcttcgggacagagacgagaatgtccgcaaagccgcggggagattatttcgtgaacgctggattgaggattgcgttggggcaaatcagaatgagaatggccaaccacaagatgaagtagcagacccgagcctggacggccttctagagcttctggagcgcatcgacattgtaaattctggagttgagaatggtgtcgccatagaagccatgaaagggttttgggagggacgaccggactatcgaaacaccatggagtttaacgacactttttgggagactttgagcgccgagtctgtatttgtcgctcgcagcttcaatgatttctgccgaaccgagggcaacgggaaatacgagtcgcttgtagaggaaaagctaccggaagtcactaagcttgcctacttcctggagcgttacctcaatgtattgatcgaagctatcagaagaatcaacagccaagaaagtgccgaggacgaagaggaagaggaagatactgttgaacaagagttcattgtcgaacaactgcttcatatcatcttgactcttgattactcggacgaagtcggtcggcgcaagatgtttgcacttctgcgccaagccctgtcaattcccgaactgcctgatgaggttaccaaactcacgattgaagtactgcgggatatttgcgcccctgataatgccggagagaaagaattttgcagtgtcgtactagaagctgtcgctgatgtgcatgatgcgatcgtggatgagtccgagattgaagatgatgagagcttccattcagcgcgatctgaagtcagtggcgacagcactcctacgaaggccaaaaagggtggcaaggacaaggagttgagcgaggaggaatctcgtgaaaaggcaatcaaggagatcatgattaacatgaaatgtttgcacattgtacagtgcatgctggctaatgtggagggtaccttgcaagagaacgaccatttggtgtcgatgcttaacaatctggtcgtaccagctgtccgcagtcatgaagcacccgttcgagagcgtggtctggtctgtctgggtctctgcgctcttctagatcgggcactggctgaagagaatctgacgctcttcatgcacttctttagcaagggacatgccacgcttcagatcacggcgcttcagatcttgacagatatcttgaacgttcatggtgcgcagttgctatctaacaacccaacacttctaaaagtctacgtcaaagcattgcgatctggttcccgaaacccagaggtacagggcgcggctacggtcgctgtgtccaagcttctgttgggcagagtcgtggttgaccaagaaacctcggcggaattgcttaagaccctgattgttgcatacttcgatccatccacagctgggaaccagagtgttcgacaggctctcaactatttcctacctgtattctgcttctcccgacaggagaaccaagatctcatgcgatccgtggcgctcgatgctcttcacgctctttataatgtccgcgaaggcattgatgacgatgacatggatgttgacgacgagatggctagtctcaatgcaattggtgcctgcttggttgattggaccgacccaaggaaatgctatactcctggtgttccgatggatgcggacagaaaaaatgtcaacggcgacgttcatctcgattttgctacagatattctcgaaaaactgaacaccaacgtcagcaaagaggaaaagaaggtgattgcccctttgctgggcaaattgtacgtctcatcagcttcgagcgaggagaagattcgtgcgctatacgaagatgtcacttctgctgtcgaggaagaactccttaccgatgccacgagccgaaatgcactgtacaagattcacgtgagtcttggcaaaatcgtcaatcaactaggcgaacaagacaaaatgtctcagatgtcccgccgaagcgttagtagaagctcggtggcacctagtcatgtcagccagtctactggtcaggacaagagtatgaatgacgatgacgatgatgttacgatagtaccgggacgtcgttctcacgatggaactatgcttgaggatgtcgctgaggaggagggcgactctactgatgctgatggagacgacacagtcgttcatcacgttgagatgattgaagatgaggacgagtcaactcttgatgaacagttgacaagccagcttgaaggatga

SEQ ID NO: 5580 - protein, 1065 aa, Muscodor strobelii
  misc_feature: SGI Peptide ID NO. 561577
  misc_feature (1)..(1045): NCBI GI: 39953568 Blast Desc: MGG_08841 [Magnaporthe grisea 70-15] gi|145021224|gb|EDK05353.1| MGG_08841 [Magnaporthe grisea 70-15]
  misc_feature (1)..(1028): NCBI GI: 261360121 Blast Desc: condensin subunit Cnd3 [Verticillium albo-atrum VaMs.102]
  misc_feature (25)..(989): NCBI GI: 85109469 Blast Desc: NCU06216 [Neurospora crassa OR74A] gi|28924576|gb|EAA33696.1| conserved [Neurospora crassa OR74A]
  misc_feature (1)..(984): NCBI GI: 171686970 Blast Desc: protein product [Podospora anserina] gi|170943446|emb|CAP69099.1| protein product [Podospora anserina]
  misc_feature (42)..(971): NCBI GI: 256725807 Blast Desc: NECHADRAFT_10623 [Nectria haematococca mpVI 77-13-4]
  misc_feature (42)..(1039): NCBI GI: 46111257 Blast Desc: FG02510.1 [Gibberella zeae PH-1]
  misc_feature (1)..(995): NCBI GI: 156050213 Blast Desc: SS1G_07693 [Sclerotinia sclerotiorum 1980] gi|154692094|gb|EDN91832.1| SS1G_07693 [Sclerotinia sclerotiorum 1980]
  misc_feature (25)..(1063): NCBI GI: 154317834 Blast Desc: BC1G_02900 [Botryotinia fuckeliana B05.10] gi|150843558|gb|EDN18751.1| BC1G_02900 [Botryotinia fuckeliana B05.10]
  misc_feature (1)..(984): NCBI GI: 116191831 Blast Desc: CHGG_05633 [Chaetomium globosum CBS 148.51] gi|88181546|gb|EAQ89014.1| CHGG_05633 [Chaetomium globosum CBS 148.51]
  misc_feature (1)..(985): NCBI GI: 242791653 Blast Desc: nuclear condensin complex subunit 3, [Talaromyces stipitatus ATCC 10500] gi|218718389|gb|EED17809.1| nuclear condensin complex subunit 3, [Talaromyces stipitatus ATCC 10500]
MPARTSRSARASAAVSNKASSTKLRASTTSRASSSNIDIPEEAPDNELRSRVCAVFRDAQKTTATHRKLAVTLRKSHEACCYEPTRPNKDASSNDFDESDFNNEFTRCVLRIMPVKKSEGAGDKTIRFIGLFLRHANDKDNDLLGETDADASTMPETPSTRLTTQVMEAVLPLLTSKDKFVRYRSTQLISHIINSLDAIDDELFQKLRHGLLRRIRDKEAVVRSQAVLGLGRLAGNQVESMANPDDSDDDAETGLLEKLLEVLQNDPSAEVRRSLLVNLPILPNTLPYLLERARDQDAATRRAVYSRLLPALGDFRHLSLSMREKLLRWGLRDRDENVRKAAGRLFRERWIEDCVGANQNENGQPQDEVADPSLDGLLELLERIDIVNSGVENGVAIEAMKGFWEGRPDYRNTMEFNDTFWETLSAESVFVARSFNDFCRTEGNGKYESLVEEKLPEVTKLAYFLERYLNVLIEAIRRINSQESAEDEEEEEDTVEQEFIVEQLLHIILTLDYSDEVGRRKMFALLRQALSIPELPDEVTKLTIEVLRDICAPDNAGEKEFCSVVLEAVADVHDAIVDESEIEDDESFHSARSEVSGDSTPTKAKKGGKDKELSEEESREKAIKEIMINMKCLHIVQCMLANVEGTLQENDHLVSMLNNLVVPAVRSHEAPVRERGLVCLGLCALLDRALAEENLTLFMHFFSKGHATLQITALQILTDILNVHGAQLLSNNPTLLKVYVKALRSGSRNPEVQGAATVAVSKLLLGRVVVDQETSAELLKTLIVAYFDPSTAGNQSVRQALNYFLPVFCFSRQENQDLMRSVALDALHALYNVREGIDDDDMDVDDEMASLNAIGACLVDWTDPRKCYTPGVPMDADRKNVNGDVHLDFATDILEKLNTNVSKEEKKVIAPLLGKLYVSSASSEEKIRALYEDVTSAVEEELLTDATSRNALYKIHVSLGKIVNQLGEQDKMSQMSRRSVSRSSVAPSHVSQSTGQDKSMNDDDDDVTIVPGRRSHDGTMLEDVAEEEGDSTDADGDDTVVHHVEMIEDEDESTLDEQLTSQLEG

SEQ ID NO: 5581 - DNA, 4199 bp, Muscodor strobelii
  misc_feature: SGI EST ID NO. CUFF.14141.0
  misc_feature: Variant of the nucleotide sequence at SEQ ID NO 5579
ctgacggcgacatcccgactgccgcgtctatctgtacaccacggcgcacacccccgcggtatccagtcttcgtcgcattctatatactcactttccatacaagtcaacaagtcaatacatgccctccgctcactaatttcgctgcattataccgtcgtcagtgttcaaacgaattcaagtccgaaacaacaagagatacatacagtactatatagcatgcccgcgcgaacctcgaggtcagcccgggcgtcggctgcggtgtccaacaaggcctctagcacaaaattgcgcgcatctaccacatcgcgcgcctcgtcctcgaatatcgacatcccagaagaagccccagacaatgaactgcgcagtcgcgtatgcgccgtcttccgcgacgcccagaagaccaccgccacacacagaaagctagctgtcaccctgcgcaagtcccacgaggcctgctgctacgaacctacgcgcccaaataaggatgcttcttccaacgacttcgatgagtctgatttcaacaatgagttcactcgatgtgtgctgaggattatgcctgttaagaaaagcgagggtgctggtgacaagaccatccgcttcatcggcttattcctccgtcatgctaacgacaaagacaacgacctacttggagaaaccgatgccgatgccagcaccatgcccgaaacaccaagcacacgcctcactacccaggtcatggaggctgtcctgccgctgctcacttccaaagacaaatttgtcagatacagatcgacccagctgatctcccatattatcaactcactcgatgccatcgatgatgagttgttccaaaaactacgccatggtctgttgcgtaggatccgcgacaaggaggccgttgtgcgatctcaagcggtattaggtctaggtagactagcaggcaatcaagtggagagcatggccaatccagacgatagtgacgatgatgctgagactggcctgctcgagaagctcttggaagtcttgcagaacgaccccagtgccgaggtccggcggtctctgttggtaaacctgccaattctgccaaacactcttccctatcttctcgaaagggcaagagatcaagacgcagcgacacgtcgcgcggtgtactcccgcctcttacctgcacttggcgatttccggcatttgtctctctccatgagagaaaaactactgcgatggggtcttcgggacagagacgagaatgtccgcaaagccgcggggagattatttcgtgaacgctggattgaggattgcgttggggcaaatcagaatgagaatggccaaccacaagatgaagtagcagacccgagcctggacggccttctagagcttctggagcgcatcgacattgtaaattctggagttgagaatggtgtcgccatagaagccatgaaagggttttgggagggacgaccggactatcgaaacaccatggagtttaacgacactttttgggagactttgagcgccgagtctgtatttgtcgctcgcagcttcaatgatttctgccgaaccgagggcaacgggaaatacgagtcgcttgtagaggaaaagctaccggaagtcactaagcttgcctacttcctggagcgttacctcaatgtattgatcgaagctatcagaagaatcaacagccaagaaagtgccgaggacgaagaggaagaggaagatactgttgaacaagagttcattgtcgaacaactgcttcatatcatcttgactcttgattactcggacgaagtcggtcggcgcaagatgtttgcacttctgcgccaagccctgtcaattcccgaactgcctgatgaggttaccaaactcacgattgaagtactgcgggatatttgcgcccctgataatgccggagagaaagaattttgcagtgtcgtactagaagctgtcgctgatgtgcatgatgcgatcgtggatgagtccgagattgaagatgatgagagcttccattcagcgcgatctgaagtcagtggcgacagcactcctacgaaggccaaaaagggtggcaaggacaaggagttgagcgaggaggaatctcgtgaaaaggcaatcaaggagatcatgattaacatgaaatgtttgcacattgtacagtgcatgctggctaatgtggagggtaccttgcaagagaacgaccatttggtgtcgatgcttaacaatctggtcgtaccagctgtccgcagtcatgaagcacccgttcgagagcgtggtctggtctgtctgggtctctgcgctcttctagatcgggcactggctgaagagaatctgacgctcttcatgcacttctttagcaagggacatgccacgcttcagatcacggcgcttcagatcttgacagatatcttgaacgttcatggtgcgcagttgctatctaacaacccaacacttctaaaagtctacgtcaaagcattgcgatctggttcccgaaacccagaggtacagggcgcggctacggtcgctgtgtccaagcttctgttgggcagagtcgtggttgaccaagaaacctcggcggaattgcttaagaccctgattgttgcatacttcgatccatccacagctgggaaccagagtgttcgacaggctctcaactatttcctacctgtattctgcttctcccgacaggagaaccaagatctcatgcgatccgtggcgctcgatgctcttcacgctctttataatgtccgcgaaggcattgatgacgatgacatggatgttgacgacgagatggctagtctcaatgcaattggtgcctgcttggttgattggaccgacccaaggaaatgctatactcctggtgttccgatggatgcggacagaaaaaatgtcaacggcgacgttcatctcgattttgctacagatattctcgaaaaactgaacaccaacgtcagcaaagaggaaaagaaggtgattgcccctttgctgggcaaattgtacgtctcatcagcttcgagcgaggagaagattcgtgcgctatacgaagatgtcacttctgctgtcgaggaagaactccttaccgatgccacgagccgaaatgcactgtacaagattcacgtgagtcttggcaaaatcgtcaatcaactaggcgaacaagacaaaatgtctcagatgtcccgccgaagcgttagtagaagctcggtggcacctagtcatgtcagccagtctactggtcaggacaagagtatgaatgacgatgacgatgatgttacgatagtaccgggacgtcgttctcacgatggaactatgcttgaggatgtcgctgaggaggagggcgactctactgatgctgatggagacgacacagtcgttcatcacgttgagatgattgaagatgaggacgagtcaactcttgatgaacagttgacaagccagcttgaaggatgatgagtgtatgagatggcatgagatcagatgtctacaaggttttgtttgggtgatgatggatgatgataatgaattgttgggtttctattcgctgtttcgatttgcaactactatatccatttgacttcttgctaccttttaattcatcaaggctcatgagtgatgactactggcaaagactgagactgattgagtgacaccgcgatatcgtatcggcatctcctttcctattccataaccattctcgagatcctgaacgtaccgtacccactagtaggtgcagcatattgcgtcaagtcaatatcgacatgtttgacatctcgaaaccctcgattcacgaaaaagccgtggaagtttggctcagcgcaaatggtcaacggcagcccggcctccttcgccacatcatgcgcgatcttgaccagttcggagccgatgccttttcctcggcttgaaggttcgacgtagatatgcgtcagatctgggcgctaatcagttatcctcgtagagccaggaaatttgcaatggagcgagttgagagaactgaccgatgtactcttcactatcaaacgatggtttgagctccccaacggcattgacgacggcggcgtatacttcagggactattcctggaggggcttcgatcggtcctgttgtctctgcttctggtttggcctgagttttggttcgagtgtagacgagataggcgacgagttgtcctgattctgtgttcacaactttcagggtcgtggttcggggctctgctagcccacctttgactgctttct

SEQ ID NO: 5582 - DNA, 669 bp, Muscodor strobelii
  misc_feature: SGI cDNA ID NO. 561578
  misc_feature: Reduced expression when VOC is produced
  misc_feature: Encodes the peptide sequence at SEQ ID NO 5583
atgaaggttcccaactacagcgttgttcctgcaacggaggacgacatcccagccatcggcacctttctccaacactcgaagttgcagcttgctatcaatcgttttttgattatagactggccgaacgaggagtttcaaaggacgcattatacaggtatctctactaacacgctatctgcaaaagcagtcaaaggtgggctagcagagccccgaaccacgaccctgaaagttgtgaacacagaatcaggacaactcgtcgcctatctcgtctacactcgaaccaaaactcaggccaaaccagaagcagagacaacaggaccgatcgaagcccctccaggaatagtccctgaagtatacgccgccgtcgtcaatgccgttggggagctcaaaccatcgtttgatagtgaagagtacatcgatctgacgcatatctacgtcgaaccttcaagccgaggaaaaggcatcggctccgaactggtcaagatcgcgcatgatgtggcgaaggaggccgggctgccgttgaccatttgcgctgagccaaacttccacggctttttcgtgaatcgagggtttcgagatgtcaaacatgtcgatattgacttgacgcaatatgctgcacctactagtgggtacggtacgttcaggatctcgagaatggttatggaatag

SEQ ID NO: 5583 - protein, 222 aa, Muscodor strobelii
  misc_feature: SGI Peptide ID NO. 561578
  misc_feature (77)..(192): Pfam Id: PF00583 Pfam Desc: Acetyltransferase (GNAT) family
  misc_feature (7)..(220): NCBI GI: 256728221 Blast Desc: NECHADRAFT_54033 [Nectria haematococca mpVI 77-13-4]
  misc_feature (1)..(221): NCBI GI: 169785523 Blast Desc: [Aspergillus oryzae RIB40] gi|238506537|ref|XP_002384470.1| conserved [Aspergillus flavus NRRL3357] gi|83775970|dbj|BAE66089.1| protein product oryzae]
  misc_feature (4)..(220): NCBI GI: 67525409 Blast Desc: AN3162.2 [Aspergillus nidulans FGSC A4] gi|40744557|gb|EAA63733.1| AN3162.2 [Aspergillus nidulans FGSC A4] gi|259485882|tpe|CBF83282.1| TPA: conserved [Aspergillus FGSC
  misc_feature (11)..(220): NCBI GI: 212533197 Blast Desc: conserved [Penicillium marneffei ATCC 18224] gi|210072119|gb|EEA26208.1| conserved [Penicillium marneffei ATCC 18224]
  misc_feature (54)..(196): NCBI GI: 240274545 Blast Desc: conserved [Ajellomyces capsulatus H143]
  misc_feature (41)..(212): NCBI GI: 238489555 Blast Desc: conserved [Aspergillus flavus NRRL3357] gi|220698403|gb|EED54743.1| conserved [Aspergillus flavus NRRL3357]
  misc_feature (7)..(216): NCBI GI: 258563766 Blast Desc: [Uncinocarpus reesii 1704] gi|237908135|gb|EEP82536.1| [Uncinocarpus reesii 1704]
  misc_feature (2)..(220): NCBI GI: 242777499 Blast Desc: conserved [Talaromyces stipitatus ATCC 10500] gi|218722665|gb|EED22083.1| conserved [Talaromyces stipitatus ATCC 10500]
  misc_feature (111)..(208): NCBI GI: 240111563 Blast Desc: GNAT family acetyltransferase, [Coccidioides posadasii C735 delta SOWgp]
  misc_feature (111)..(208): NCBI GI: 119188563 Blast Desc: [Coccidioides immitis RS]
  misc_feature: Useful for introducing or modulating the production of volatile compounds
MKVPNYSVVPATEDDIPAIGTFLQHSKLQLAINRFLIIDWPNEEFQRTHYTGISTNTLSAKAVKGGLAEPRTTTLKVVNTESGQLVAYLVYTRTKTQAKPEAETTGPIEAPPGIVPEVYAAVVNAVGELKPSFDSEEYIDLTHIYVEPSSRGKGIGSELVKIAHDVAKEAGLPLTICAEPNFHGFFVNRGFRDVKHVDIDLTQYAAPTSGYGTFRISRMVME

SEQ ID NO: 5584 - DNA, 1208 bp, Muscodor strobelii
  misc_feature: SGI EST ID NO. CUFF.14142.1
  misc_feature: Variant of the nucleotide sequence at SEQ ID NO 5582
aaagcagtcaaaggtgggctagcagagccccgaaccacgaccctgaaagttgtgaacacagaatcaggacaactcgtcgcctatctcgtctacactcgaaccaaaactcaggccaaaccagaagcagagacaacaggaccgatcgaagcccctccaggaatagtccctgaagtatacgccgccgtcgtcaatgccgttggggagctcaaaccatcgtttgatagtgaagagtacatcgatctgacgcatatctacgtcgaaccttcaagccgaggaaaaggcatcggctccgaactggtcaagatcgcgcatgatgtggcgaaggaggccgggctgccgttgaccatttgcgctgagccaaacttccacggctttttcgtgaatcgagggtttcgagatgtcaaacatgtcgatattgacttgacgcaatatgctgcacctactagtgggtacggtacgttcaggatctcgagaatggttatggaataggaaaggagatgccgatacgatatcgcggtgtcactcaatcagtctcagtctttgccagtagtcatcactcatgagccttgatgaattaaaaggtagcaagaagtcaaatggatatagtagttgcaaatcgaaacagcgaatagaaacccaacaattcattatcatcatccatcatcacccaaacaaaaccttgtagacatctgatctcatgccatctcatacactcatcatccttcaagctggcttgtcaactgttcatcaagagttgactcgtcctcatcttcaatcatctcaacgtgatgaacgactgtgtcgtctccatcagcatcagtagagtcgccctcctcctcagcgacatcctcaagcatagttccatcgtgagaacgacgtcccggtactatcgtaacatcatcgtcatcgtcattcatactcttgtcctgaccagtagactggctgacatgactaggtgccaccgagcttctactaacgcttcggcgggacatctgagacattttgtcttgttcgcctagttgattgacgattttgccaagactcacgtgaatcttgtacagtgcatttcggctcgtggcatcggtaaggagttcttcctcgacagcagaagtgacatcttcgtatagcgcacgaatcttctcctcgctcgaagctgatgagacgtacaatttgcccagcaaaggggcaatcaccttcttttcctcttc

SEQ ID NO: 5585 - DNA, 450 bp, Muscodor strobelii
  misc_feature: SGI cDNA ID NO. 561579
  misc_feature: Encodes the peptide sequence at SEQ ID NO 5586
atggctcacagcagcggcggaaagaacgggactgcataccagagcacgccagaattggtgcatcagcaaacgaatatgcaaggcatccttgaaatcgtttatacagacgtgccatccggctggccatcgctggacacgccaacgcaaaagaccagcacgctatcacatattggcatcactgttccagacacagttgaaacacagaaacgtcttgacaactatggcgttaagacacttaaacgggtgcacggcgagtttccagacgaagatacggctggcgtcaatgtcgccctgggtctccaaaataagactgattggagttctgaagaatgggcagaaatcagggctttcaacacctacttcaacttctacagcatttttgctgaagatccagatggcaacatgcttgagattcgtccactggaacatgccgtacctggctttgattga

SEQ ID NO: 5586 - protein, 149 aa, Muscodor strobelii
  misc_feature: SGI Peptide ID NO. 561579
  misc_feature (1)..(144): NCBI GI: 256724483 Blast Desc: NECHADRAFT_88105 [Nectria haematococca mpVI 77-13-4]
  misc_feature (1)..(140): NCBI GI: 256729489 Blast Desc: NECHADRAFT_84117 [Nectria haematococca mpVI 77-13-4]
  misc_feature (1)..(144): NCBI GI: 46127057 Blast Desc: FG07906.1 [Gibberella zeae PH-1]
MAHSSGGKNGTAYQSTPELVHQQTNMQGILEIVYTDVPSGWPSLDTPTQKTSTLSHIGITVPDTVETQKRLDNYGVKTLKRVHGEFPDEDTAGVNVALGLQNKTDWSSEEWAEIRAFNTYFNFYSIFAEDPDGNMLEIRPLEHAVPGFD

SEQ ID NO: 5587 - DNA, 432 bp, Muscodor strobelii
  misc_feature: SGI EST ID NO. CUFF.14114.0
  misc_feature: Variant of the nucleotide sequence at SEQ ID NO 5585
cgggactgcataccagagcacgccagaattggtgcatcagcaaacgaatatgcaaggcatccttgaaatcgtttatacagacgtgccatccggctggccatcgctggacacgccaacgcaaaagaccagcacgctatcacatattggcatcactgttccagacacagttgaaacacagaaacgtcttgacaactatggcgttaagacacttaaacgggtgcacggcgagtttccagacgaagatacggctggcgtcaatgtcgccctgggtctccaaaataagactgattggagttctgaagaatgggcagaaatcagggctttcaacacctacttcaacttctacagcatttttgctgaagatccagatggcaacatgcttgagattcgtccactggaacatgccgtacctggctttgattgagggtgtaa

SEQ ID NO: 5588 - DNA, 1077 bp, Muscodor strobelii
  misc_feature: SGI cDNA ID NO. 561580
  misc_feature: Encodes the peptide sequence at SEQ ID NO 5589
atgtcagatccgcccgacaccgtggtgttcacggatggtgtcgttgaagctgatgctggtgccaagggcgccggtatctttgttactcgcgatttccctcgcggatcccttctgatcgagcagcatatgaaaacactttgccagccctgccagacaaaacacgctcccgacgaatccgacgcaagcgacgccgcgaggatcgattctggaaatggagagatggaagtgaatgattctgacgaagacaactctgacgaagacagccctgacgaaggcagtcctgacgaaggcagccctgacgaaggaaattctgatgttgaagactatgatgaaagtgatgttatcgtggatgagcgcgacgactttaagccggacgcttttgaggagagaagcactgatgccccagatgctacgagcggcattgtgagcggtaacgaaatctcacatccggagactacattggttcatcgtgtaggttcttgcaagatcaatcattcttgcgctccgaatgtcatattccggtacgacaaaccatcgtatgttcgcgttttcacgctccgtgatcttgctgccggagaagaagttcttacagcctacatcgccgacctgcagtcaccgagcgaagttcgcgcaaagcagctaccctgggtttgtcagtgtactacttgcaagtcaccacagctagcggagtctgatgcgagacgggtacgtctgagaaatatctttatcggcctcacacacgcgtggtgcgagacgcagcccgatgaacctcttgcggtcatgccacaggacgatagagaggcattgctacttgcgcaagagtacatggaacttctgagagaagaaggactgtgtaatctgcttctttgggagggatacataggacttgcagctttcagcctcaagaacaaaagatttggtcaagctatggacgcaatttcctcggcggaaaaaacctatgacaacctctttggagatacgggaagagacaagttagactggcttcctgaggagctagtcatttttcttctcgaggccgaggaggctgccgctacggaaagcgatacgagtgactaa

SEQ ID NO: 5589 - protein, 358 aa, Muscodor strobelii
  misc_feature: SGI Peptide ID NO. 561580
  misc_feature (161)..(328): NCBI GI: 46139525 Blast Desc: FG11277.1 [Gibberella zeae PH-1]
  misc_feature (161)..(283): NCBI GI: 170115671 Blast Desc: [Laccaria bicolor S238N-H82] gi|164635977|gb|EDR00277.1| [Laccaria bicolor S238N-H82]
  misc_feature (138)..(288): NCBI GI: 261356530 Blast Desc: conserved [Verticillium albo-atrum VaMs.102]
  misc_feature (163)..(324): NCBI GI: 238588421 Blast Desc: MPER_08809 [Moniliophthora perniciosa FA553] gi|215456775|gb|EEB92650.1| MPER_08809 [Moniliophthora perniciosa FA553]
  misc_feature (155)..(284): NCBI GI: 169848761 Blast Desc: [Coprinopsis cinerea okayama7#130] gi|116507812|gb|EAU90707.1| [Coprinopsis cinerea okayama7#130]
  misc_feature (162)..(247): NCBI GI: 238588335 Blast Desc: MPER_08835 [Moniliophthora perniciosa FA553] gi|215456713|gb|EEB92626.1| MPER_08835 [Moniliophthora perniciosa FA553]
  misc_feature (163)..(227): NCBI GI: 118379402 Blast Desc: conserved [Tetrahymena thermophila] gi|89304634|gb|EAS02622.1| conserved [Tetrahymena thermophila SB210]
  misc_feature (15)..(251): NCBI GI: 169862814 Blast Desc: [Coprinopsis cinerea okayama7#130] gi|116500891|gb|EAU83786.1| [Coprinopsis cinerea okayama7#130]
  misc_feature (158)..(223): NCBI GI: 55819545 Blast Desc: MIMI_L678 [Acanthamoeba polyphaga mimivirus] gi|81999695|sp|Q5UNT8.1|YL678_MIMIV RecName: Full= SET domain-containing protein L678 gi|55417289|gb|AAV50939.1|
  misc_feature (162)..(288): NCBI GI: 145605910 Blast Desc: [Magnaporthe grisea 70-15] gi|145013663|gb|EDJ98304.1| [Magnaporthe grisea 70-15]
MSDPPDTVVFTDGVVEADAGAKGAGIFVTRDFPRGSLLIEQHMKTLCQPCQTKHAPDESDASDAARIDSGNGEMEVNDSDEDNSDEDSPDEGSPDEGSPDEGNSDVEDYDESDVIVDERDDFKPDAFEERSTDAPDATSGIVSGNEISHPETTLVHRVGSCKINHSCAPNVIFRYDKPSYVRVFTLRDLAAGEEVLTAYIADLQSPSEVRAKQLPWVCQCTTCKSPQLAESDARRVRLRNIFIGLTHAWCETQPDEPLAVMPQDDREALLLAQEYMELLREEGLCNLLLWEGYIGLAAFSLKNKRFGQAMDAISSAEKTYDNLFGDTGRDKLDWLPEELVIFLLEAEEAAATESDTSD

SEQ ID NO: 5590 - DNA, 1704 bp, Muscodor strobelii
  misc_feature: SGI cDNA ID NO. 561581
  misc_feature: Encodes the peptide sequence at SEQ ID NO 5591
atgggaggtgagacatctattacagtgttcgaaaaaggttattcgccaggttacaagatcggagaaagcacactgacgacgttcggcgtctggctggagagtctcgggcttggaccttcccttctctggcgactatttggacccaaagatggtttggcattctactatctaccccagaatggaagctgggatggctacacagacttttgtgcgaatggacctgcgggtgacttcgtagccactctccaaatcgagcgcaagatatctgagctgctcttgacgttgtatgctcagaggttgggggtcaacatttaccacggacataaggtcgacatcgattcaattcagctaccagctgagagtgacgacagggctgccggcgttgtgtctgtttctgacgataaagtgacgagccaaatccagacccgtttcgtggtagatgctactgggcgttttcaccgattcgcatctaaggaaggacgcataaaacgcctgcctggattcaacacacatggtttctgggcttatttcgagatgcctggtgatgaagcagatataccgttacgccattacgaatcatgtcataccaaccacatatgcatcgcagaaggctgggcatgggtaatacgtcttccaacgtgggaaggcagcccagtaccaaacttagtagcaatgataaaccatcttcttgacctgaacgccgcaaaaacacctgcagatatgtatccttcatctcaagaactagcaagacaattcgggtgtaagtttcgttgggtgacgagtatcggctacgccttacgaagcgacgtcgtttacccggacgacctgacagagtacggctcctgcgaagccgagcgtaaattcaactggatcacttctcgttatcctcggatgaaagcaatgatggatcaacatgttcttatccctgatctctacggacccggaactacatggttttgccgaaagcatctgtcgtaccaaagccctgtggttgctggaccaggctgggcagccgtgggagatgcgacaggattcactaacccgctttactcacctggaatcaattgtaacatggcaacgtctataacgctggcagagaacacagccagttacctggatgcacctgataaagaaactcgagaagctatacgacagagatacaccgacttctgcgcagatcgagtccctaatctctatagaatgaacaaattcaactatcttgcgatgcgatcacctcgaaccggtccactgggtccgctttggcaatacctatgcggcacaggaaacgaaatttggcgacgaaataaagactatacaagtcttgactgcatagccgaatttgtgacgacctgggagtggggcagtcaacacccagaatatattgatgctgcagagaaactgatcaatatcttggatggtccgccaacaatgcctgagcaatcggtcatcgaagaagccttgagtatctcggcacaaatgcttgctgagctccagaaaacaggaaagttcaagaatagatgggcaggattgttcagatactacgacgatgagttgaaattctccgagtcaaaggttgaaagagatgtacttgcgaggcgatgtgagtcatgtggtaactggcggattttaacaggagaagcctcgaggtgtccgacttgtggtggcgttaataaggaggtgatgatccagagagtatcagcataa

SEQ ID NO: 5591 - protein, 567 aa, Muscodor strobelii
  misc_feature: SGI Peptide ID NO. 561581
  misc_feature (6)..(554): NCBI GI: 156051742 Blast Desc: SS1G_07278 [Sclerotinia sclerotiorum 1980] gi|154705056|gb|EDO04795.1| SS1G_07278 [Sclerotinia sclerotiorum 1980]
  misc_feature (2)..(538): NCBI GI: 154292579 Blast Desc: BC1G_14813 [Botryotinia fuckeliana B05.10] gi|150845894|gb|EDN21087.1| BC1G_14813 [Botryotinia fuckeliana B05.10]
  misc_feature (3)..(554): NCBI GI: 159122078 Blast Desc: conserved [Aspergillus fumigatus A1163]
  misc_feature (3)..(559): NCBI GI: 70981564 Blast Desc: conserved [Aspergillus fumigatus Af293] gi|66843933|gb|EAL84273.1| conserved [Aspergillus fumigatus Af293]
  misc_feature (3)..(559): NCBI GI: 119501381 Blast Desc: NFIA_043690 [Neosartorya fischeri NRRL 181] gi|119415613|gb|EAW25550.1| conserved [Neosartorya fischeri NRRL 181]
  misc_feature (7)..(556): NCBI GI: 121712042 Blast Desc: conserved [Aspergillus clavatus NRRL 1] gi|119401788|gb|EAW12210.1| conserved [Aspergillus clavatus NRRL 1]
  misc_feature (3)..(554): NCBI GI: 39969261 Blast Desc: [Magnaporthe grisea 70-15] gi|145012029|gb|EDJ96685.1| [Magnaporthe grisea 70-15]
  misc_feature (3)..(554): NCBI GI: 149211091 Blast Desc: MGCH7_ch7g1008 [Magnaporthe grisea 70-15] gi|86196963|gb|EAQ71601.1| MGCH7_ch7g1008 [Magnaporthe grisea 70-15]
  misc_feature (7)..(392): NCBI GI: 21637137 Blast Desc: AF505622_25 CalO3 [Micromonospora echinospora]
  misc_feature (7)..(406): NCBI GI: 159037639 Blast Desc: tryptophan halogenase [Salinispora arenicola CNS-205] gi|157916474|gb|ABV97901.1| tryptophan halogenase [Salinispora arenicola CNS-205]
MGGETSITVFEKGYSPGYKIGESTLTTFGVWLESLGLGPSLLWRLFGPKDGLAFYYLPQNGSWDGYTDFCANGPAGDFVATLQIERKISELLLTLYAQRLGVNIYHGHKVDIDSIQLPAESDDRAAGVVSVSDDKVTSQIQTRFVVDATGRFHRFASKEGRIKRLPGFNTHGFWAYFEMPGDEADIPLRHYESCHTNHICIAEGWAWVIRLPTWEGSPVPNLVAMINHLLDLNAAKTPADMYPSSQELARQFGCKFRWVTSIGYALRSDVVYPDDLTEYGSCEAERKFNWITSRYPRMKAMMDQHVLIPDLYGPGTTWFCRKHLSYQSPVVAGPGWAAVGDATGFTNPLYSPGINCNMATSITLAENTASYLDAPDKETREAIRQRYTDFCADRVPNLYRMNKFNYLAMRSPRTGPLGPLWQYLCGTGNEIWRRNKDYTSLDCIAEFVTTWEWGSQHPEYIDAAEKLINILDGPPTMPEQSVIEEALSISAQMLAELQKTGKFKNRWAGLFRYYDDELKFSESKVERDVLARRCESCGNWRILTGEASRCPTCGGVNKEVMIQRVSA

SEQ ID NO: 5592 - DNA, 1926 bp, Muscodor strobelii
  misc_feature: SGI cDNA ID NO. 561582
  misc_feature: Encodes the peptide sequence at SEQ ID NO 5593
atgagccgggttgttcgaagcgctgacgcataccgtccaccgtcagagaggcacgacctagagacagagaatgttgccccattgcctgagacaccatcaccattccttcgctgcacaacgcctgagcctgctacaaagaatcaaaggaaacatgctacagttatccaagagatatcggatgtttcaaaacagcgcaagtcgtctgtagtcccgcacatgttcgacttgtttcaggactcctggatgcttgaatatatggctttagcactatcggcagcatgtctcattgctattctaattcttctgcttaattttcaaaacaagccatccgatacatggcacttcaatttgagtatcaatactatgttgtctcttctcgcaacagtattaaaaggagctgctcttctagccacagcatcagcatttgggcaattgaaatgggcttggtattcttccacaccacagtcgctggaaaaccttcagagatttgacagcgcctctcgcggcccgctcggcgtattatgccttctttggaccacaccttctcttttgaatatattaggatccttcgtggtggtaatcgctttgggctcagatgccgcgatccaagcttccacctcgcagaccctaaggtttcggtcatcagagtctgcatctgtaccagttgccaatatttacaacgtggactacccgagcgttatttttgatccgttaatggcaggggcgatatacgacgggatattcaatgcagcgaacaccacccttcgtgctttgaggcattctcccattaactttccaggagcgccaagcaccataacacccttctgtgagactggtaattgcacattcgagccgtattcgtcgctggctgttaaacatcgttgccaaactattagcgatactttgcattacttggaggacaataatggtagcattcgcattgtgactttgtcaacttctcccgagtttccgcctcccgatctggtgaacaatgcgaagttcaatctcagcagctaccaatatattacctgcggatcagactgcgaaccatctctcaatagcacggtagtaaacatcaccagcgtcagctactcttcgctcgacttcgcaccttggactctgacaaactattcgcatggtttagagcacctacctgttgctgaagtttatatcatcgccgacgttggggcctcgggatttgaggcatttcgctgtaatcttgacttcggactgcaaatgtatacagcgtcagtggagagaggacgctttgtcgagatccctggcgactttattcacgggaactggaccctcgaactggacagcaataggagccaattttatgaggacgggaggggtggtacatcagcgtggtttctcagggcagtagtgtcggagaaaagctatcaggcatctatcaacttcgacttatggtccgaaatgattgaaaacatcaaactatattttaccgcggagcagaccaacgaagtcccagatgctgggcttgccacaattaccagtgatgtactgattttggatatgggcgtggatcccgtcttcgacagtatagcccaaagtctcacgcattatcttcgtagtgcttcgggtcaaggcgccattggacaagctcaaaccggagagcagtatattaaagtaatctggccgtggctggtcgtgccagcagtgctcgtggtcttgaacacgatctttgtgctcaccgtgtattttcggagccgcaaacgaaaggtgccgagctggagaaatagtgcattagctctaatgctcgatgcgaaacctgcagagaaacatgacgggggcaacagcactgactacgaccatgttctcatcggtccaccgcaatcaattgcaacgcttagcgagctgagaaagtgggcgaagacacggactgcaaacttgaactgggtatag

SEQ ID NO: 5593 - protein, 641 aa, Muscodor strobelii
  misc_feature: SGI Peptide ID NO. 561582
  misc_feature (81)..(613): NCBI GI: 145236391 Blast Desc: An06g00150 [Aspergillus niger] gi|134075297|emb|CAK44931.1| protein product [Aspergillus niger]
  misc_feature (75)..(594): NCBI GI: 115400213 Blast Desc: [Aspergillus terreus NIH2624] gi|114191361|gb|EAU33061.1| [Aspergillus terreus NIH2624]
  misc_feature (46)..(612): NCBI GI: 119467105 Blast Desc: NFIA_047990 [Neosartorya fischeri NRRL 181] gi|119405511|gb|EAW15462.1| NFIA_047990 [Neosartorya fischeri NRRL 181]
  misc_feature (80)..(594): NCBI GI: 169782207 Blast Desc: [Aspergillus oryzae RIB40] gi|83774309|dbj|BAE64433.1| protein product [Aspergillus oryzae]
  misc_feature (81)..(640): NCBI GI: 159125812 Blast Desc: conserved [Aspergillus fumigatus A1163]
  misc_feature (81)..(640): NCBI GI: 70985502 Blast Desc: conserved [Aspergillus fumigatus Af293] gi|66845885|gb|EAL86219.1| conserved [Aspergillus fumigatus Af293]
  misc_feature (36)..(302): NCBI GI: 238495142 Blast Desc: conserved [Aspergillus flavus NRRL3357] gi|220695457|gb|EED51800.1| conserved [Aspergillus flavus NRRL3357]
  misc_feature (80)..(591): NCBI GI: 85093286 Blast Desc: NCU08172 [Neurospora crassa OR74A] gi|28921111|gb|EAA30428.1| [Neurospora crassa OR74A]
  misc_feature (117)..(604): NCBI GI: 240280136 Blast Desc: conserved [Ajellomyces capsulatus H143]
  misc_feature (12)..(425): NCBI GI: 242787121 Blast Desc: conserved [Talaromyces stipitatus ATCC 10500] gi|218721087|gb|EED20506.1| conserved [Talaromyces stipitatus ATCC 10500]
MSRVVRSADAYRPPSERHDLETENVAPLPETPSPFLRCTTPEPATKNQRKHATVIQEISDVSKQRKSSVVPHMFDLFQDSWMLEYMALALSAACLIAILILLLNFQNKPSDTWHFNLSINTMLSLLATVLKGAALLATASAFGQLKWAWYSSTPQSLENLQRFDSASRGPLGVLCLLWTTPSLLNILGSFVVVIALGSDAAIQASTSQTLRFRSSESASVPVANIYNVDYPSVIFDPLMAGAIYDGIFNAANTTLRALRHSPINFPGAPSTITPFCETGNCTFEPYSSLAVKHRCQTISDTLHYLEDNNGSIRIVTLSTSPEFPPPDLVNNAKFNLSSYQYITCGSDCEPSLNSTVVNITSVSYSSLDFAPWTLTNYSHGLEHLPVAEVYIIADVGASGFEAFRCNLDFGLQMYTASVERGRFVEIPGDFIHGNWTLELDSNRSQFYEDGRGGTSAWFLRAVVSEKSYQASINFDLWSEMIENIKLYFTAEQTNEVPDAGLATITSDVLILDMGVDPVFDSIAQSLTHYLRSASGQGAIGQAQTGEQYIKVIWPWLVVPAVLVVLNTIFVLTVYFRSRKRKVPSWRNSALALMLDAKPAEKHDGGNSTDYDHVLIGPPQSIATLSELRKWAKTRTANLNWV

SEQ ID NO: 5594 - DNA, 3598 bp, Muscodor strobelii
  misc_feature: SGI EST ID NO. CUFF.14135.0
  misc_feature: Variant of the nucleotide sequence at SEQ ID NO 5592
tgcgcattcagctccttatcgaatgcaggtcgcgtaacattcaactacgatatcctagcaaatttgttgatctgactgccttatgctgtgttatgcgaaagacaccttttgttgggggcttggatggtatgcttacagggcttacttttggagtcccagctaagaaagtcgctgaagtagtattcgcatagctattttgagaatagtcctgggattgatgaagctgtaaataagcccatagggtcgattatccgttacaccagccttagcgagtcgcttgaacaagccaagggtgcagcggcgaacattgcaatagcaagctgcggcagcctcgaatctacgagacctagatgttgctgcaagcgctccgcccaataggtggcgttataaacgaatcacaaggcctgtcgctagagttgtccattgttgccaacttatatctgttgcctcagcatgtggcacagccattatataggttcagcatcgccgatgatgttgtcctatgaccatttaccacagactcaaaccattcgcccaagcgcgcgagtcgtttccgtcttctttgatctcatgatccgggacagttcatggtgttaagggaagaccattctaatattctatctcgcccgtcatgagccgggttgttcgaagcgctgacgcataccgtccaccgtcagagaggcacgacctagagacagagaatgttgccccattgcctgagacaccatcaccattccttcgctgcacaacgcctgagcctgctacaaagaatcaaaggaaacatgctacagttatccaagagatatcggatgtttcaaaacagcgcaagtcgtctgtagtcccgcacatgttcgacttgtttcaggactcctggatgcttgaatatatggctttagcactatcggcagcatgtctcattgctattctaattcttctgcttaattttcaaaacaagccatccgatacatggcacttcaatttgagtatcaatactatgttgtctcttctcgcaacagtattaaaaggagctgctcttctagccacagcatcagcatttgggcaattgaaatgggcttggtattcttccacaccacagtcgctggaaaaccttcagagatttgacagcgcctctcgcggcccgctcggcgtattatgccttctttggaccacaccttctcttttgaatatattaggatccttcgtggtggtaatcgctttgggctcagatgccgcgatccaagcttccacctcgcagaccctaaggtttcggtcatcagagtctgcatctgtaccagttgccaatatttacaacgtggactacccgagcgttatttttgatccgttaatggcaggggcgatatacgacgggatattcaatgcagcgaacaccacccttcgtgctttgaggcattctcccattaactttccaggagcgccaagcaccataacacccttctgtgagactggtaattgcacattcgagccgtattcgtcgctggctgttaaacatcgttgccaaactattagcgatactttgcattacttggaggacaataatggtagcattcgcattgtgactttgtcaacttctcccgagtttccgcctcccgatctggtgaacaatgcgaagttcaatctcagcagctaccaatatattacctgcggatcagactgcgaaccatctctcaatagcacggtagtaaacatcaccagcgtcagctactcttcgctcgacttcgcaccttggactctgacaaactattcgcatggtttagagcacctacctgttgctgaagtttatatcatcgccgacgttggggcctcgggatttgaggcatttcgctgtaatcttgacttcggactgcaaatgtatacagcgtcagtggagagaggacgctttgtcgagatccctggcgactttattcacgggaactggaccctcgaactggacagcaataggagccaattttatgaggacgggaggggtggtacatcagcgtggtttctcagggcagtagtgtcggagaaaagctatcaggcatctatcaacttcgacttatggtccgaaatgattgaaaacatcaaactatattttaccgcggagcagaccaacgaagtcccagatgctgggcttgccacaattaccagtgatgtactgattttggatatgggcgtggatcccgtcttcgacagtatagcccaaagtctcacgcattatcttcgtagtgcttcgggtcaaggcgccattggacaagctcaaaccggagagcagtatattaaagtaatctggccgtggctggtcgtgccagcagtgctcgtggtcttgaacacgatctttgtgctcaccgtgtattttcggagccgcaaacgaaaggtgccgagctggagaaatagtgcattagctctaatgctcgatgcgaaacctgcagagaaacatgacgggggcaacagcactgactacgaccatgttctcatcggtccaccgcaatcaattgcaacgcttagcgagctgagaaagtgggcgaagacacggactgcaaacttgaactgggtatagtcgctctgaagaatgcaagttgtcagtctctataccggaaagccgcctgacgtgacatacagtatatcatccaactatataaatttagatacccaaacatccattgttcgtactttgccattgggacatctgcctacggcttgggtcacagcatctcttgttgaacgaatgatagcccgaagccgttcattgggcacattttgctcaacatcctcccaaaagctgttaccttcaacgctcgatgtctcccattccccgtccagtaatccttcattaggcactaccgtccactcgtcgaccatcttccagccagccttagtagcaatatctgtgatggcactaggactaaatggtgaccggatattctgagtgctgttctccttcaagctttctagagtgcctcgagcaactacagccaagacatgaggcatggcggccttctctgttgcaaagagagcatattcagctacacatatcgcgctgactcgtcctttgagagcagtgaagatctcttggagcaccttctccgaagaaaagtaccaaatacaatgagacaagacagcgacatcccatacagcgtccgcattaccagcgagaaactcttgtggcgtcgcttgatgccatgtgattcgtttgccaacgagactggccgagagatggctttgagcctgttgaagcgtgaaaggcgagccataatctagagctcctgggtcgatagcatcgatgtgtcccgaagagccaacggcttctgcgagcactgcagtggtattgccttgaccgcacccgagctcaacgactcgagtgccgggtttgagagcccataaattaatgaggcgaagacggtgttcgacttgtgctaattctatctcggggtgttttgggtctgtgagagagtatgaggcgatttgaggcgcgagagaatctgggatcctatccaaagtcgggtctgccatgatagtgaagtgatgagaatagtggatcaaatcagtgccagatcgttatgaacagatgaagtgttcttataattttgctctgttgttg

SEQ ID NO: 5595 - DNA, 879 bp, Muscodor strobelii
  misc_feature: SGI cDNA ID NO. 561583
  misc_feature: Reduced expression when VOC is produced
  misc_feature: Encodes the peptide sequence at SEQ ID NO 5596
atggcagacccgactttggataggatcccagattctctcgcgcctcaaatcgcctcatactctctcacagacccaaaacaccccgagatagaattagcacaagtcgaacaccgtcttcgcctcattaatttatgggctctcaaacccggcactcgagtcgttgagctcgggtgcggtcaaggcaataccactgcagtgctcgcagaagccgttggctcttcgggacacatcgatgctatcgacccaggagctctagattatggctcgcctttcacgcttcaacaggctcaaagccatctctcggccagtctcgttggcaaacgaatcacatggcatcaagcgacgccacaagagtttctcgctggtaatgcggacgctgtatgggatgtcgctgtcttgtctcattgtatttggtacttttcttcggagaaggtgctccaagagatcttcactgctctcaaaggacgagtcagcgcgatatgtgtagctgaatatgctctctttgcaacagagaaggccgccatgcctcatgtcttggctgtagttgctcgaggcactctagaaagcttgaaggagaacagcactcagaatatccggtcaccatttagtcctagtgccatcacagatattgctactaaggctggctggaagatggtcgacgagtggacggtagtgcctaatgaaggattactggacggggaatgggagacatcgagcgttgaaggtaacagcttttgggaggatgttgagcaaaatgtgcccaatgaacggcttcgggctatcattcgttcaacaagagatgctgtgacccaagccgtaggcagatgtcccaatggcaaagtacgaacaatggatgtttgggtatctaaatttatatag

SEQ ID NO: 5596 - protein, 292 aa, Muscodor strobelii
  misc_feature: SGI Peptide ID NO. 561583
  misc_feature (54)..(159): Pfam Id: PF08241 Pfam Desc: Methyltransferase domain
  misc_feature (5)..(273): NCBI GI: 145606570 Blast Desc: MGG_02247 [Magnaporthe grisea 70-15] gi|145014192|gb|EDJ98833.1| MGG_02247 [Magnaporthe grisea 70-15]
  misc_feature (9)..(292): NCBI GI: 46126653 Blast Desc: FG07704.1 [Gibberella zeae PH-1]
  misc_feature (10)..(291): NCBI GI: 242212546 Blast Desc: [Postia placenta Mad-698-R] gi|220728836|gb|EED82722.1| [Postia placenta Mad-698-R]
  misc_feature (14)..(292): NCBI GI: 242796824 Blast Desc: conserved [Talaromyces stipitatus ATCC 10500] gi|218719470|gb|EED18890.1| conserved [Talaromyces stipitatus ATCC 10500]
  misc_feature (14)..(292): NCBI GI: 238490410 Blast Desc: conserved [Aspergillus flavus NRRL3357] gi|220696855|gb|EED53196.1| conserved [Aspergillus flavus NRRL3357]
  misc_feature (14)..(292): NCBI GI: 169772495 Blast Desc: [Aspergillus oryzae RIB40] gi|83768577|dbj|BAE58714.1| protein product [Aspergillus oryzae]
  misc_feature (14)..(291): NCBI GI: 169618706 Blast Desc: SNOG_12545 [Phaeosphaeria nodorum SN15] gi|111058723|gb|EAT79843.1| SNOG_12545 [Phaeosphaeria nodorum SN15]
  misc_feature (22)..(292): NCBI GI: 145257123 Blast Desc: An04g02520 [Aspergillus niger] gi|134058530|emb|CAL00739.1| protein product [Aspergillus niger]
  misc_feature (14)..(245): NCBI GI: 121712114 Blast Desc: ACLA_062090 [Aspergillus clavatus NRRL 1] gi|119401824|gb|EAW12246.1| ACLA_062090 [Aspergillus clavatus NRRL 1]
  misc_feature (34)..(291): NCBI GI: 169612309 Blast Desc: SNOG_09274 [Phaeosphaeria nodorum SN15] gi|111062346|gb|EAT83466.1| SNOG_09274 [Phaeosphaeria nodorum SN15]
  misc_feature: Useful for introducing or modulating the production of volatile compounds
MADPTLDRIPDSLAPQIASYSLTDPKHPEIELAQVEHRLRLINLWALKPGTRVVELGCGQGNTTAVLAEAVGSSGHIDAIDPGALDYGSPFTLQQAQSHLSASLVGKRITWHQATPQEFLAGNADAVWDVAVLSHCIWYFSSEKVLQEIFTALKGRVSAICVAEYALFATEKAAMPHVLAVVARGTLESLKENSTQNIRSPFSPSAITDIATKAGWKMVDEWTVVPNEGLLDGEWETSSVEGNSFWEDVEQNVPNERLRAIIRSTRDAVTQAVGRCPNGKVRTMDVWVSKFI

SEQ ID NO: 5597 - DNA, 3598 bp, Muscodor strobelii
  misc_feature: SGI EST ID NO. CUFF.14135.0
  misc_feature: Variant of the nucleotide sequence at SEQ ID NO 5595
caacaacagagcaaaattataagaacacttcatctgttcataacgatctggcactgatttgatccactattctcatcacttcactatcatggcagacccgactttggataggatcccagattctctcgcgcctcaaatcgcctcatactctctcacagacccaaaacaccccgagatagaattagcacaagtcgaacaccgtcttcgcctcattaatttatgggctctcaaacccggcactcgagtcgttgagctcgggtgcggtcaaggcaataccactgcagtgctcgcagaagccgttggctcttcgggacacatcgatgctatcgacccaggagctctagattatggctcgcctttcacgcttcaacaggctcaaagccatctctcggccagtctcgttggcaaacgaatcacatggcatcaagcgacgccacaagagtttctcgctggtaatgcggacgctgtatgggatgtcgctgtcttgtctcattgtatttggtacttttcttcggagaaggtgctccaagagatcttcactgctctcaaaggacgagtcagcgcgatatgtgtagctgaatatgctctctttgcaacagagaaggccgccatgcctcatgtcttggctgtagttgctcgaggcactctagaaagcttgaaggagaacagcactcagaatatccggtcaccatttagtcctagtgccatcacagatattgctactaaggctggctggaagatggtcgacgagtggacggtagtgcctaatgaaggattactggacggggaatgggagacatcgagcgttgaaggtaacagcttttgggaggatgttgagcaaaatgtgcccaatgaacggcttcgggctatcattcgttcaacaagagatgctgtgacccaagccgtaggcagatgtcccaatggcaaagtacgaacaatggatgtttgggtatctaaatttatatagttggatgatatactgtatgtcacgtcaggcggctttccggtatagagactgacaacttgcattcttcagagcgactatacccagttcaagtttgcagtccgtgtcttcgcccactttctcagctcgctaagcgttgcaattgattgcggtggaccgatgagaacatggtcgtagtcagtgctgttgcccccgtcatgtttctctgcaggtttcgcatcgagcattagagctaatgcactatttctccagctcggcacctttcgtttgcggctccgaaaatacacggtgagcacaaagatcgtgttcaagaccacgagcactgctggcacgaccagccacggccagattactttaatatactgctctccggtttgagcttgtccaatggcgccttgacccgaagcactacgaagataatgcgtgagactttgggctatactgtcgaagacgggatccacgcccatatccaaaatcagtacatcactggtaattgtggcaagcccagcatctgggacttcgttggtctgctccgcggtaaaatatagtttgatgttttcaatcatttcggaccataagtcgaagttgatagatgcctgatagcttttctccgacactactgccctgagaaaccacgctgatgtaccacccctcccgtcctcataaaattggctcctattgctgtccagttcgagggtccagttcccgtgaataaagtcgccagggatctcgacaaagcgtcctctctccactgacgctgtatacatttgcagtccgaagtcaagattacagcgaaatgcctcaaatcccgaggccccaacgtcggcgatgatataaacttcagcaacaggtaggtgctctaaaccatgcgaatagtttgtcagagtccaaggtgcgaagtcgagcgaagagtagctgacgctggtgatgtttactaccgtgctattgagagatggttcgcagtctgatccgcaggtaatatattggtagctgctgagattgaacttcgcattgttcaccagatcgggaggcggaaactcgggagaagttgacaaagtcacaatgcgaatgctaccattattgtcctccaagtaatgcaaagtatcgctaatagtttggcaacgatgtttaacagccagcgacgaatacggctcgaatgtgcaattaccagtctcacagaagggtgttatggtgcttggcgctcctggaaagttaatgggagaatgcctcaaagcacgaagggtggtgttcgctgcattgaatatcccgtcgtatatcgcccctgccattaacggatcaaaaataacgctcgggtagtccacgttgtaaatattggcaactggtacagatgcagactctgatgaccgaaaccttagggtctgcgaggtggaagcttggatcgcggcatctgagcccaaagcgattaccaccacgaaggatcctaatatattcaaaagagaaggtgtggtccaaagaaggcataatacgccgagcgggccgcgagaggcgctgtcaaatctctgaaggttttccagcgactgtggtgtggaagaataccaagcccatttcaattgcccaaatgctgatgctgtggctagaagagcagctccttttaatactgttgcgagaagagacaacatagtattgatactcaaattgaagtgccatgtatcggatggcttgttttgaaaattaagcagaagaattagaatagcaatgagacatgctgccgatagtgctaaagccatatattcaagcatccaggagtcctgaaacaagtcgaacatgtgcgggactacagacgacttgcgctgttttgaaacatccgatatctcttggataactgtagcatgtttcctttgattctttgtagcaggctcaggcgttgtgcagcgaaggaatggtgatggtgtctcaggcaatggggcaacattctctgtctctaggtcgtgcctctctgacggtggacggtatgcgtcagcgcttcgaacaacccggctcatgacgggcgagatagaatattagaatggtcttcccttaacaccatgaactgtcccggatcatgagatcaaagaagacggaaacgactcgcgcgcttgggcgaatggtttgagtctgtggtaaatggtcataggacaacatcatcggcgatgctgaacctatataatggctgtgccacatgctgaggcaacagatataagttggcaacaatggacaactctagcgacaggccttgtgattcgtttataacgccacctattgggcggagcgcttgcagcaacatctaggtctcgtagattcgaggctgccgcagcttgctattgcaatgttcgccgctgcacccttggcttgttcaagcgactcgctaaggctggtgtaacggataatcgaccctatgggcttatttacagcttcatcaatcccaggactattctcaaaatagctatgcgaatactacttcagcgactttcttagctgggactccaaaagtaagccctgtaagcataccatccaagcccccaacaaaaggtgtctttcgcataacacagcataaggcagtcagatcaacaaatttgctaggatatcgtagttgaatgttacgcgacctgcattcgataaggagctgaatgcgca

SEQ ID NO: 5598 - DNA, 1644 bp, Muscodor strobelii
  misc_feature: SGI cDNA ID NO. 561584
  misc_feature: Reduced expression when VOC is produced
  misc_feature: Encodes the peptide sequence at SEQ ID NO 5599
atggctgcaaacgaatactacggtcagtctagtgaccgatacaacaaccacagcaaccagtacgagccctccatcgcgccttcagcaaatccgccgccttcctacacttcacaaccagcgcatcacctcggccaccccggcaccacaacctctcccttcgacaccgtcttcgacgaccatgtctatcccacacagtcgcgaccaactctgaacaccatggccagcagccagcagagctttgcccaggacacccgctaccatggcaccgtccccgaggatgcgtctcccgtcgccgcagacgacatccctctccggcaccacgggaaacagacaggcttcatgaacgagtccaacgaccacgtctacgatgctgaacctgcaactagaacgcggggcgccaaaaagggacggttcggctatggagagttgggcatgatgcgatctggcaccaaaaagatccccatcctcgtctatgttttatccattattcaaatcgccgtcttcattgcagaactggtaaaagctgctcaattaactggctcaccgatccaaacaaagccgactttcaaccccttgattggcccatccgcacagatcttgattaacatgggcgcgagatacgatccctgcatgaagaatgtcgatggagtacagaactacgttgtcccggccggtatcaatgtcgaccagcctggattcccctttgcatgccctaacgcgacaagcaccgactcagcttgcagtctctcagagctctgtgggtttggtggcgtcccgaatcctgaatggctaggagagaacgggctggatcagaagcccgagccgaatcagtggttccgcttcatcacgcccatctttctccatgctggcttcattcacataggatttaacctcctcctccagctgaccatgggcaaggaaattgagatggctatcggatccatccggttcttcttcgtctattttgctgccggcattttcggattcatcctaggaggcaactatgccgctgctgggattgcttccacgggctgttcgggctctttgttcggcatcattgccctcacacttctcgaccttctctactcgtggagcgaaaggcttcatcccaagagagaattattcttcatcgtccttgaaatcgtcatatcctttgtgcttggcctattgccaggtctcgacaacttttcacatatcggcggattcctgactggtttgttactgggcatcatcgtcctccattccccgaacgcccttcgtcgacgtgtaggcgaggaccatttcggcggtgcgtcatactcgacggtgcagggagcgggaacaggtattaccagcgtagcctttccggccttctaccggaaccccgttgggttcttcaaaggccgaaagcctctctggtgggcctggtggcttcttcgtgcctcgttcttgattgtcgtcattgtccttttcatcgtgttgatcaacaacttctactccaaccagaatacatgtagctggtgcaaatatttgagttgcttgcctgtcaatgattggtgcgaacagggcaccttcaaggtcacatacacaaatgagacggatcagatgaagagagatcttatgttttccgctctggatcaaactgtaaatctctttgcgtattag

SEQ ID NO: 5599 - protein, 547 aa, Muscodor strobelii
  misc_feature: SGI Peptide ID NO. 561584
  misc_feature (272)..(417): Pfam Id: PF01694 Pfam Desc: Rhomboid family
  misc_feature (1)..(520): NCBI GI: 116206648 Blast Desc: CHGG_02617 [Chaetomium globosum CBS 148.51] gi|88183214|gb|EAQ90682.1| CHGG_02617 [Chaetomium globosum CBS 148.51]
  misc_feature (14)..(518): NCBI GI: 256731339 Blast Desc: NECHADRAFT_63508 [Nectria haematococca mpVI 77-13-4]
  misc_feature (1)..(547): NCBI GI: 85102797 Blast Desc: NCU01305 [Neurospora crassa OR74A] gi|16944591|emb|CAC18292.2| related to membrane protein [Neurospora crassa] gi|28922936|gb|EAA32155.1| [Neurospora crassa
  misc_feature (1)..(526): NCBI GI: 171692185 Blast Desc: protein product [Podospora anserina] gi|170946041|emb|CAP72842.1| protein product [Podospora anserina]
  misc_feature (1)..(523): NCBI GI: 39972467 Blast Desc: MGG_07535 [Magnaporthe grisea 70-15] gi|145016732|gb|EDK01162.1| MGG_07535 [Magnaporthe grisea 70-15]
  misc_feature (99)..(534): NCBI GI: 261351518 Blast Desc: rhomboid family membrane protein [Verticillium albo-atrum VaMs.102]
  misc_feature (1)..(516): NCBI GI: 238502587 Blast Desc: rhomboid family membrane protein [Aspergillus flavus NRRL3357] gi|220691337|gb|EED47685.1| rhomboid family membrane protein [Aspergillus flavus NRRL3357]
  misc_feature (1)..(533): NCBI GI: 189207869 Blast Desc: rhomboid family membrane protein [Pyrenophora tritici-repentis Pt-1C-BFP] gi|187976361|gb|EDU42987.1| rhomboid family membrane protein [Pyrenophora tritici-repentis Pt-1C-BFP]
  misc_feature (1)..(516): NCBI GI: 169775935 Blast Desc: [Aspergillus oryzae RIB40] gi|83771169|dbj|BAE61301.1| protein product [Aspergillus oryzae]
  misc_feature (1)..(527): NCBI GI: 115387927 Blast Desc: conserved [Aspergillus terreus NIH2624] gi|114195553|gb|EAU37253.1| conserved [Aspergillus terreus NIH2624]
  misc_feature: Useful for introducing or modulating the production of volatile compounds
MAANEYYGQSSDRYNNHSNQYEPSIAPSANPPPSYTSQPAHHLGHPGTTTSPFDTVFDDHVYPTQSRPTLNTMASSQQSFAQDTRYHGTVPEDASPVAADDIPLRHHGKQTGFMNESNDHVYDAEPATRTRGAKKGRFGYGELGMMRSGTKKIPILVYVLSIIQIAVFIAELVKAAQLTGSPIQTKPTFNPLIGPSAQILINMGARYDPCMKNVDGVQNYVVPAGINVDQPGFPFACPNATSTDSACSLSELCGFGGVPNPEWLGENGLDQKPEPNQWFRFITPIFLHAGFIHIGFNLLLQLTMGKEIEMAIGSIRFFFVYFAAGIFGFILGGNYAAAGIASTGCSGSLFGIIALTLLDLLYSWSERLHPKRELFFIVLEIVISFVLGLLPGLDNFSHIGGFLTGLLLGIIVLHSPNALRRRVGEDHFGGASYSTVQGAGTGITSVAFPAFYRNPVGFFKGRKPLWWAWWLLRASFLIVVIVLFIVLINNFYSNQNTCSWCKYLSCLPVNDWCEQGTFKVTYTNETDQMKRDLMFSALDQTVNLFAY

SEQ ID NO: 5600 - DNA, 2835 bp, Muscodor strobelii
  misc_feature: SGI EST ID NO. CUFF.14228.1
  misc_feature: Variant of the nucleotide sequence at SEQ ID NO 5598
ccaaggtgcacagtggtgctgagggtgacgacaacttctccagtcgctccagtcatttgcgcagaacacagccgccctctgatcattggacatacgaggcctctggtgtcatcttctgtcgtaatacgtccaccgatccatttgctcacttgctcaactggtttcctcttcattcacttctcctcctcatttgttctcattatcgttgttgtgttgtagaaacactacacatcacagtctcaatcgtttgccgacttcctgaccccaacactcgctggctctggaagtattacaaccttaacgacccctgtccacgtgcgtccagactcccggaccccagaccaacatcggaaataattacagatccgccgtcacacatgggctttccttaaagggattgtgtgcaaacaagcaagcacttgagtttatgagcttaacacaattagactcatcaccagttcgcttcctcggttataactgaactcctcattaaagtagtcgcctctattgtccgtttctgaccgtgcaagacaagcttcggctcaaggacagcgaacagtctaataatatttcagccgctgtttggcatctccaggccaatcagctggaccttcacttctgaaacacgcccgtggttgaccgtggtcgacgggggtcccacccatccgaattccaagcaaggcatacaaagtattctggcattctgctgaatccccttgttgggctttgttgctcctgtcgtaaattacttgtaaattacttgtaattgctgtcgtcctaccaattgtcggctcgggtcgacaccaccacaaaggactgccattcgataggatttcccctgcctgtcatggctgcaaacgaatactacggtcagtctagtgaccgatacaacaaccacagcaaccagtacgagccctccatcgcgccttcagcaaatccgccgccttcctacacttcacaaccagcgcatcacctcggccaccccggcaccacaacctctcccttcgacaccgtcttcgacgaccatgtctatcccacacagtcgcgaccaactctgaacaccatggccagcagccagcagagctttgcccaggacacccgctaccatggcaccgtccccgaggatgcgtctcccgtcgccgcagacgacatccctctccggcaccacgggaaacagacaggcttcatgaacgagtccaacgaccacgtctacgatgctgaacctgcaactagaacgcggggcgccaaaaagggacggttcggctatggagagttgggcatgatgcgatctggcaccaaaaagatccccatcctcgtctatgttttatccattattcaaatcgccgtcttcattgcagaactggtaaaagctgctcaattaactggctcaccgatccaaacaaagccgactttcaaccccttgattggcccatccgcacagatcttgattaacatgggcgcgagatacgatccctgcatgaagaatgtcgatggagtacagaactacgttgtcccggccggtatcaatgtcgaccagcctggattcccctttgcatgccctaacgcgacaagcaccgactcagcttgcagtctctcagagctctgtgggtttggtggcgtcccgaatcctgaatggctaggagagaacgggctggatcagaagcccgagccgaatcagtggttccgcttcatcacgcccatctttctccatgctggcttcattcacataggatttaacctcctcctccagctgaccatgggcaaggaaattgagatggctatcggatccatccggttcttcttcgtctattttgctgccggcattttcggattcatcctaggaggcaactatgccgctgctgggattgcttccacgggctgttcgggctctttgttcggcatcattgccctcacacttctcgaccttctctactcgtggagcgaaaggcttcatcccaagagagaattattcttcatcgtccttgaaatcgtcatatcctttgtgcttggcctattgccaggtctcgacaacttttcacatatcggcggattcctgactggtttgttactgggcatcatcgtcctccattccccgaacgcccttcgtcgacgtgtaggcgaggaccatttcggcggtgcgtcatactcgacggtgcagggagcgggaacaggtattaccagcgtagcctttccggccttctaccggaaccccgttgggttcttcaaaggccgaaagcctctctggtgggcctggtggcttcttcgtgcctcgttcttgattgtcgtcattgtccttttcatcgtgttgatcaacaacttctactccaaccagaatacatgtagctggtgcaaatatttgagttgcttgcctgtcaatgattggtgcgaacagggcaccttcaaggtcacatacacaaatgagacggatcagatgaagagagatcttatgttttccgctctggatcaaactgtaaatctctttgcgtattagaagaaagcgcgcactgttacatgttgtttttccttgagataagataatgtcctcagatttcgatggattgaatgatacccagaaatagactggactacagtacggaagagcccgtacaggtcgcatgggagtgcggtcaaactgtgtcctgttgaggtcacagagcattgcataaaatgatttgggaaaagggtttctccgtggcgttaggcagcttgtggactgcatggataacacggcaaaacaattgcatactcgtagcgtgctctttacgtgtctggatttaagaccagacacagtacataatataatgaatgaattattaccatcatagttatcggcca

SEQ ID NO: 5601 - DNA, 1173 bp, Muscodor strobelii
  misc_feature: SGI cDNA ID NO. 561585
  misc_feature: Encodes the peptide sequence at SEQ ID NO 5602
atgcgcttttcaacgatcctagcagcgttgccgcttgcactggccggtccttcgagacgcaccgaacctgctcctctgctcattgctccaagaaatgttgcccttacagacaaatacatcgtccaaatgaaccgacaaatggacatcgaggcgatggaagagcacatatccttgattgcaggtgatgtttcccacacgtatagcacggggccattttctggtttcgctgcctctataactcctgacgaggtcgaagctttgcgatcccacccagatgtcgagagaatcgagcaggatcaggtaatcagcattcagagcggaatcaaatcacaggccgatgcagattggggcttggcgcgtatgtcaagcagcaatgccacagacacacgatatcgatatgacgagacggccggcaagggtgtttgcgcatatgtcgtcgatagtggtgtcgataaatctcaccccgatttccagggtcgtgtgcatttcgtcaaaagcgtagtcggtaattcagagtttgaccattttcacggtactcacgtcgctggtattctcggctcagcaacatggggagttgcgaaaaatgttgagatctacagtatcaaggtagtaggaccgacaggggaaggctctgtagctaccatcctcgatggcatcaatgaggtagcaaaggacattcccaagcgcaagtgtccaaagggcgtcgttgtaaacctctcccttggcacttcagcaccatcgcggatgctgaatgatgccgcggctgctctagtcaaagcgggccattttgttgcaagtgccgcaggcaactacctcatggacacgtcaggaatctcgccagcttcggaacctcttgtttgtactgttgctgctaccaaaccgggcgacttctttgccaacgactactcaaattttggatcattagttgatctgctggcccctggaacggatatcgagtccacattcccgaataacctaagatacactgcctccggcacatccatggcttgccctcacgtctcaggacttgctgcgtacttcctgggccttgagcatccaccggccaagcccaatgagatgtgtgattatcttaagtctattgctttgaagaacgtcatccatgatgtgcctgcgggtactccaaatcttttggcacacaacgaccttcattga

SEQ ID NO: 5602 - protein, 390 aa, Muscodor strobelii
  misc_feature: SGI Peptide ID NO. 561585
  misc_feature (37)..(105): Pfam Id: PF05922 Pfam Desc: Subtilisin N-terminal Region
  misc_feature (122)..(387): Pfam Id: PF00082 Pfam Desc: Subtilase family
  misc_feature (17)..(387): NCBI GI: 56201265 Blast Desc: serine protease precursor [Fusarium oxysporum]
  misc_feature (17)..(387): NCBI GI: 10181226 Blast Desc: serine protease precursor [Fusarium oxysporum f. sp. lycopersici]
  misc_feature (18)..(387): NCBI GI: 46114268 Blast Desc: FG02976.1 [Gibberella zeae PH-1]
  misc_feature (1)..(387): NCBI GI: 90655148 Blast Desc: alkaline serine protease [Hirsutella rhossiliensis]
  misc_feature (18)..(387): NCBI GI: 170674493 Blast Desc: subtilisin-like protease [Neotyphodium lolii] gi|170674497|gb|ACB30132.1| subtilisin-like protease [Epichloe festucae]
  misc_feature (1)..(387): NCBI GI: 147744316 Blast Desc: serine protease [Hirsutella minnesotensis]
  misc_feature (19)..(387): NCBI GI: 124295071 Blast Desc: SprT [Hypocrea koningii]
  misc_feature (1)..(387): NCBI GI: 6624958 Blast Desc: Subtilisin-like serine protease PR1A [Metarhizium anisopliae var. acridum]
  misc_feature (1)..(387): NCBI GI: 16215662 Blast Desc: subtilisin-like protease PR1A [Metarhizium anisopliae var. anisopliae]
  misc_feature (1)..(387): NCBI GI: 56550029 Blast Desc: subtilisin-like protein PR1A [Metarhizium acridum]
  misc_feature (19)..(390): SWISSPROT Homolog: EC 3.4.21.64 Peptidase K
MRFSTILAALPLALAGPSRRTEPAPLLIAPRNVALTDKYIVQMNRQMDIEAMEEHISLIAGDVSHTYSTGPFSGFAASITPDEVEALRSHPDVERIEQDQVISIQSGIKSQADADWGLARMSSSNATDTRYRYDETAGKGVCAYVVDSGVDKSHPDFQGRVHFVKSVVGNSEFDHFHGTHVAGILGSATWGVAKNVEIYSIKVVGPTGEGSVATILDGINEVAKDIPKRKCPKGVVVNLSLGTSAPSRMLNDAAAALVKAGHFVASAAGNYLMDTSGISPASEPLVCTVAATKPGDFFANDYSNFGSLVDLLAPGTDIESTFPNNLRYTASGTSMACPHVSGLAAYFLGLEHPPAKPNEMCDYLKSIALKNVIHDVPAGTPNLLAHNDLH

SEQ ID NO: 5603 - DNA, 624 bp, Muscodor strobelii
  misc_feature: SGI cDNA ID NO. 561586
  misc_feature: Encodes the peptide sequence at SEQ ID NO 5604
atggctcaggacttctaccatgtcaatcgaccggggcagcccgcgcggccgtccggagggcccccgcaaggacaacctttcggtcagcagacattgccggtgccacctcccagagacatcctcccgccagacttgtatggtggaggaccgattatgcaaatcagcgatgtaagtcgcgatctcctctcggaagccgacatgtgcgaagagatttcggattaccggatctttcgattcgagaagatgaccgacaagaatatgttcgacgaacatggcagactaaaatggccgagctgggagaaggctctgaaaaccgaggacatgagtatctcgaaacaagcagcttacgatagaatccgacatttgaatatgacctctaagccagttattgacaagaagaattccttgacacccccgctcaagcgacaacttgataaacaactggaatctttgatgtactccgaaccggacctcggaaattttcaatgggttttggcgcaaatcttcgtcgagaaagaagtcaagttcgaggaaaagccgtcaccacgacaggcaggcctacgagaggctttccttgactgcatacttcaagaaaataccccggcctggtgtcagtatccttag

SEQ ID NO: 5604 - protein, 207 aa, Muscodor strobelii
  misc_feature: SGI Peptide ID NO. 561586
MAQDFYHVNRPGQPARPSGGPPQGQPFGQQTLPVPPPRDILPPDLYGGGPIMQISDVSRDLLSEADMCEEISDYRIFRFEKMTDKNMFDEHGRLKWPSWEKALKTEDMSISKQAAYDRIRHLNMTSKPVIDKKNSLTPPLKRQLDKQLESLMYSEPDLGNFQWVLAQIFVEKEVKFEEKPSPRQAGLREAFLDCILQENTPAWCQYP

SEQ ID NO: 5605 - DNA, 744 bp, Muscodor strobelii
  misc_feature: SGI cDNA ID NO. 561587
  misc_feature: Encodes the peptide sequence at SEQ ID NO 5606
atggcgcgcaagttcttcgttggcggcaacttcaagatgaacgggactctctcgtccgtcaaggagattgttgaaaatttgaacaaggcttcgttggattccaacgttgaaaccgtcatctcaccacctgccctctacctcctccccgtccgcgacctcgccaacaagaacattggcgtcgctgcccaaaatgtctttgacaagcccaacggcgccttcactggcgagatctctgtcgcccagctcaaagacagtggcattgactggaccatcctgggccactccgagcgccgaaccatcctcggcgagagcgacgacactgtagcttctaagaccaagtacgccaccgagaacggcgtcagcgtcatttggtgctgtggtgagagtctcgagcagcgcgaggccggcaagaccctcgaggtcattgccaaccagctcgccgccctcaaggccaaggtctccgactggtccaagatcgtcatcgcctacgagcccatctgggccatcggcaccggcaaggtcgccaccaccgagcaggctcaggaggtccacgcctccatccgtcagtggctggccaagaacgtcagccagagcgtcgctgacgagacccggatcttgtacggcggcagtgttagcgagaagaactgcggagagctgagcaagcagcccgacattgacggtttccttgtcggtggcgctagtctgaagcctgccttcgtcgacatcatcaactgcaaattgtaa

SEQ ID NO: 5606 - protein, 247 aa, Muscodor strobelii
  misc_feature: SGI Peptide ID NO. 561587
  misc_feature (5)..(243): Pfam Id: PF00121 Pfam Desc: Triosephosphate isomerase
  misc_feature (1)..(245): NCBI GI: 256733274 Blast Desc: triose-phosphate isomerase [Nectria haematococca mpVI 77-13-4]
  misc_feature (1)..(245): NCBI GI: 46124649 Blast Desc: FG06702.1 [Gibberella zeae PH-1]
  misc_feature (1)..(246): NCBI GI: 189199502 Blast Desc: triosephosphate isomerase [Pyrenophora tritici-repentis Pt-1C-BFP] gi|187983187|gb|EDU48675.1| triosephosphate isomerase [Pyrenophora tritici-repentis
  misc_feature (1)..(246): NCBI GI: 145614206 Blast Desc: triosephosphate isomerase [Magnaporthe grisea 70-15] gi|145021151|gb|EDK05280.1| triosephosphate isomerase [Magnaporthe grisea 70-15]
  misc_feature (1)..(246): NCBI GI: 261358290 Blast Desc: triosephosphate isomerase [Verticillium albo-atrum VaMs.102]
  misc_feature (1)..(246): NCBI GI: 169625443 Blast Desc: SNOG_15994 [Phaeosphaeria nodorum SN15] gi|111055453|gb|EAT76573.1| SNOG_15994 [Phaeosphaeria nodorum SN15]
  misc_feature (1)..(247): NCBI GI: 115399504 Blast Desc: triosephosphate isomerase [Aspergillus terreus NIH2624] gi|114192224|gb|EAU33924.1| triosephosphate isomerase [Aspergillus terreus NIH2624]
  misc_feature (1)..(247): NCBI GI: 156040910 Blast Desc: triosephosphate isomerase [Sclerotinia sclerotiorum 1980] gi|154695817|gb|EDN95555.1| triosephosphate isomerase [Sclerotinia sclerotiorum 1980]
  misc_feature (1)..(247): NCBI GI: 154305175 Blast Desc: BC1G_08882 [Botryotinia fuckeliana B05.10] gi|150853624|gb|EDN28816.1| BC1G_08882 [Botryotinia fuckeliana B05.10]
  misc_feature (1)..(247): NCBI GI: 238841483 Blast Desc: triosephosphate isomerase [Microsporum canis CBS 113480]
  misc_feature (1)..(247): SWISSPROT Homolog: EC 5.3.1.1 Triose-phosphate isomerase
MARKFFVGGNFKMNGTLSSVKEIVENLNKASLDSNVETVISPPALYLLPVRDLANKNIGVAAQNVFDKPNGAFTGEISVAQLKDSGIDWTILGHSERRTILGESDDTVASKTKYATENGVSVIWCCGESLEQREAGKTLEVIANQLAALKAKVSDWSKIVIAYEPIWAIGTGKVATTEQAQEVHASIRQWLAKNVSQSVADETRILYGGSVSEKNCGELSKQPDIDGFLVGGASLKPAFVDIINCKL

SEQ ID NO: 5607 - DNA, 2206 bp, Muscodor strobelii
  misc_feature: SGI EST ID NO. CUFF.14313.0
  misc_feature: Variant of the nucleotide sequence at SEQ ID NO 5605
cgaaattagacgatagcatctatgaagcttctatcttaagagtagacagtggccctgtcaatgatcaacctctcaaatgataatgatacagcacagcaaagcgtcgcgaataacgtcgcaggtggatgtcgtggccctcttttttctccttgagcttttttcctccgtactgtacctggatggcggggtgctttggatttggttgggagctctcataagctcacagaatccgcagagacccggaccccgccattcattcaatccggttcctggcgaacgtttgctcaagctcaacctcaccaagtaaacaccacaacctactcctcttttcaacattttattttaaaagagtacaccgtctcctggtatcgcaagccttctcgaatcaagctagaacatatctaaataaccctcgaaatggcgcgcaagttcttcgttggcggcaacttcaagatgaacgggactctctcgtccgtcaaggagattgttgaaaatttgaacaaggcttcgttggattccaacgttgaaaccgtcatctcaccacctgccctctacctcctccccgtccgcgacctcgccaacaagaacattggcgtcgctgcccaaaatgtctttgacaagcccaacggcgccttcactggcgagatctctgtcgcccagctcaaagacagtggcattgactggaccatcctgggccactccgagcgccgaaccatcctcggcgagagcgacgacactgtagcttctaagaccaagtacgccaccgagaacggcgtcagcgtcatttggtgctgtggtgagagtctcgagcagcgcgaggccggcaagaccctcgaggtcattgccaaccagctcgccgccctcaaggccaaggtctccgactggtccaagatcgtcatcgcctacgagcccatctgggccatcggcaccggcaaggtcgccaccaccgagcaggctcaggaggtccacgcctccatccgtcagtggctggccaagaacgtcagccagagcgtcgctgacgagacccggatcttgtacggcggcagtgttagcgagaagaactgcggagagctgagcaagcagcccgacattgacggtttccttgtcggtggcgctagtctgaagcctgccttcgtcgacatcatcaactgcaaattgtaaagaggcgatgaaatgctgtgtcgctctcagggccggttttgaaataaaagaaagtcggtgcatcaaaatgctgggtcgagactgtagatgcggactatgctctattgagagttagagaaacactgatccatgcctctacctaaccctccctcaagcctcaagagcaggtgcaagtatgtttagtggctaaaagcaatgcattgaagatcgatcgtaacaatccgttttcagcgccttgtgaattcttctttgctgtgattgatcacccccgtggtatacggcccgtctttatcttgtacaaataggctgaggctaacttgcctctctatatcgttatcgacatccaacacgtagtcgtacagctccgatcacctcgccgtataactgatatcttatacagtcataccctcgccgtggtacggactccagacacctctgacggactcgttgatactcgtgatgggcttgttgaccctcttaaccttgtctccgctggcatcccgtagcaactccaccttttttaatatctgtaacgagtccatgttcttaacgcagatagactttgtgttgccgttgatgtagtggccgatgaggacgggatgtttgcgcggacggggtgagacggcgaactcgatctgggggtttttggaagcaaatttggagagctgggatttgatgaaggcgcttttgctatcgttagcttatcgaaggtgaggagtgtcggaggagacatctatcatacttcatccccctcgaactgcccgagtgatcgcaatagtgcacatccatcttcttgcattgtaggatgaaggccccgacgccattcttggaaagtgtcagtactgcactcggagatggcgattgagaagagacttacctggccctcggaaagcttgtgtaatgccctgatgcccattgttgccctctgtaaactcgtgaaaggcaacagtgtgctgatttcgggctccttccgtttcgtcgcgaaatttcagggaaagctgggagcgacgactaggttgaacattcagtgttgcatgcatgtgag

SEQ ID NO: 5608 - DNA, 414 bp, Muscodor strobelii
  misc_feature: SGI cDNA ID NO. 561588
  misc_feature: Encodes the peptide sequence at SEQ ID NO 5609
atgggcatcagggcattacacaagctttccgagggccagaatggcgtcggggccttcatcctacaatgcaagaagatggatgtgcactattgcgatcactcgggcagttcgagggggatgaacgccttcatcaaatcccagctctccaaatttgcttccaaaaacccccagatcgagttcgccgtctcaccccgtccgcgcaaacatcccgtcctcatcggccactacatcaacggcaacacaaagtctatctgcgttaagaacatggactcgttacagatattaaaaaaggtggagttgctacgggatgccagcggagacaaggttaagagggtcaacaagcccatcacgagtatcaacgagtccgtcagaggtgtctggagtccgtaccacggcgagggtatgactgtataa

SEQ ID NO: 5609 - protein, 137 aa, Muscodor strobelii
  misc_feature: SGI Peptide ID NO. 561588
  misc_feature (32)..(105): Pfam Id: PF05047 Pfam Desc: Mitochondrial ribosomal protein L51 / S25 / CI-B8 domain
  misc_feature (1)..(137): NCBI GI: 171686400 Blast Desc: protein product [Podospora anserina] gi|170943161|emb|CAP68814.1| protein product [Podospora anserina]
  misc_feature (1)..(137): NCBI GI: 85091765 Blast Desc: NCU07549 [Neurospora crassa OR74A] gi|28920459|gb|EAA29826.1| conserved [Neurospora crassa OR74A]
  misc_feature (1)..(137): NCBI GI: 116207866 Blast Desc: CHGG_03226 [Chaetomium globosum CBS 148.51] gi|88183823|gb|EAQ91291.1| CHGG_03226 [Chaetomium globosum CBS 148.51]
  misc_feature (1)..(137): NCBI GI: 256732814 Blast Desc: [Nectria haematococca mpVI 77-13-4]
  misc_feature (1)..(137): NCBI GI: 39954264 Blast Desc: MGG_08906 [Magnaporthe grisea 70-15] gi|145021150|gb|EDK05279.1| MGG_08906 [Magnaporthe grisea 70-15]
  misc_feature (1)..(137): NCBI GI: 261358291 Blast Desc: mitochondrial 54S ribosomal protein L51 [Verticillium albo-atrum VaMs.102]
  misc_feature (1)..(137): NCBI GI: 154283075 Blast Desc: conserved [Ajellomyces capsulatus NAm1] gi|150410513|gb|EDN05901.1| conserved [Ajellomyces capsulatus NAm1]
  misc_feature (1)..(137): NCBI GI: 225561666 Blast Desc: mitochondrial ribosomal protein subunit L51 [Ajellomyces capsulatus G186AR]
  misc_feature (1)..(133): NCBI GI: 119478254 Blast Desc: mitochondrial ribosomal protein L43, [Neosartorya fischeri NRRL 181] gi|119407492|gb|EAW17441.1| mitochondrial ribosomal protein L43, [Neosartorya fischeri NRRL 181]
  misc_feature (1)..(133): NCBI GI: 70997101 Blast Desc: mitochondrial ribosomal protein L43 [Aspergillus fumigatus Af293] gi|66850941|gb|EAL91267.1| mitochondrial ribosomal protein L43, [Aspergillus fumigatus Af293] ribosomal
MGIRALHKLSEGQNGVGAFILQCKKMDVHYCDHSGSSRGMNAFIKSQLSKFASKNPQIEFAVSPRPRKHPVLIGHYINGNTKSICVKNMDSLQILKKVELLRDASGDKVKRVNKPITSINESVRGVWSPYHGEGMTV

SEQ ID NO: 5610 - DNA, 2314 bp, Muscodor strobelii
  misc_feature: SGI EST ID NO. CUFF.14314.1
  misc_feature: Variant of the nucleotide sequence at SEQ ID NO 5608
ctcacatgcatgcaacactgaatgttcaacctagtcgtcgctcccagctttccctgaaatttcgcgacgaaacggaaggagcccgaaatcagcacactgttgcctttcacgagtttacagagggcaacaatgggcatcagggcattacacaagctttccgagggccagaatggcgtcggggccttcatcctacaatgcaagaagatggatgtgcactattgcgatcactcgggcagttcgagggggatgaacgccttcatcaaatcccagctctccaaatttgcttccaaaaacccccagatcgagttcgccgtctcaccccgtccgcgcaaacatcccgtcctcatcggccactacatcaacggcaacacaaagtctatctgcgttaagaacatggactcgttacagatattaaaaaaggtggagttgctacgggatgccagcggagacaaggttaagagggtcaacaagcccatcacgagtatcaacgagtccgtcagaggtgtctggagtccgtaccacggcgagggtatgactgtataagatatcagttatacggcgaggtgatcggagctgtacgactacgtgttggatgtcgataacgatatagagaggcaagttagcctcagcctatttgtacaagataaagacgggccgtataccacgggggtgatcaatcacagcaaagaagaattcacaaggcgctgaaaacggattgttacgatcgatcttcaatgcattgcttttagccactaaacatacttgcacctgctcttgaggcttgagggagggttaggtagaggcatggatcagtgtttctctaactctcaatagagcatagtccgcatctacagtctcgacccagcattttgatgcaccgactttcttttatttcaaaaccggccctgagagcgacacagcatttcatcgcctctttacaatttgcagttgatgatgtcgacgactagtcacaggtcagtatccgaagaataaaggtcttggaacagagtcacccacaggcaggcttcagactagcgccaccgacaaggaaaccgtcaatgtcgggctgcttgctcagctctccgcagttcttctcgctaacactgccgccgtacaagatccgggtctcgtcagcgacgctctggctgacgttcttggccagccactgacggatggaggcgtggacctcctgagcctgctcggtggtggcgaccttgccggtgccgatggcccagatgggctcgtaggcgatgacgatcttggaccagtcggagaccttggccttgagggcggcgagctggttggcaatgacctcgagggtcttgccggcctcgcgctgctcgagactctcaccacagcaccaaatgacgctgacgccgttctcggtggcgtacttggtcttagaagctacagtgtcgtcgctctcgccgaggatggttcggcgctcggagtggcccaggatggtccagtcaatgccactgtctttgagctgggcgacagagatctcgccagtgaaggcgccgttgggcttgtcaaagacattttgggcagcgacgccaatgttcttgttggcgaggtcgcggacggggaggaggtagagggcaggtggtgagatgacggtttctggtcgtggaagatgcgtgtaagtcttggatgcacatcttgcggaggccgaatgagctggctatatcttaccaacgttggaatccaacgaagccttgttcaaattttcaacaatctccttgacggacgagagagtcccgttcctgaaaccatcaaagaagcatcagcaattgtcaatgggcttcgactaaacaaccgctactgcaaacatgttgctggggtactaggcgtcttacatcttgaagttgccgccaacgaagaacttgcgcgccatttcgagggttatttagatatgttctagcttgattcgagaaggcttgcgataccaggagacggtgtactcttttaaaataaaatgttgaaaagaggagtaggttgtggtgtttacttggtgaggttgagcttgagcaaacgttcgccaggaaccggattgaatgaatggcggggtccgggtctctgcggattctgtgagcttatgagagctcccaaccaaatccaaagcaccccgccatccaggtacagtacggaggaaaaaagctcaaggagaaaaaagagggccacgacatccacctgcgacgttattcgcgacgctttgctgtgctgtatcattatcatttgagaggttgatcattgacagggccactgtctactcttaagatagaagcttcatagatgctatcgtctaatttcg

SEQ ID NO: 5611 - DNA, 756 bp, Muscodor strobelii
  misc_feature: SGI cDNA ID NO. 561590
  misc_feature: Reduced expression when VOC is produced
  misc_feature: Encodes the peptide sequence at SEQ ID NO 5612
atgccaaagtcgaaacgagcccgcgtggtgcacacctcgcaggtgacaaagaaaggccgcgagcacaaggaaaagctcttcgacaacgtccgcgactgcgtatccgagtaccagcactgcttcgtcctgtccgtcgacaacatgcgcaacacctacctcaaagaagtgagagcagagctatcagactgccgcctcttcttcggaaaaacaaagctcatggcccgcgccctaggccacagtccagaagacagctacgcatcaaacatctaccgactctccccctacctaaaaggcaccgtcggcctgctcttcacaaatcgcgagccctccgctctactcacctacatccacgccgtagccgagatggacttcgcgcgcgccggcgtcacggcgtcccgcgaattcgtcatcccccggggcatcctctacagcaccgccggcgagatatcccaagaagacgacacgcccctcggccacaccgtcgagccggagctgcgccgtctcggcgtccccacgcgcatggtcaagggcaaggtcgtgcttgaggaagcacctgaagacgccagtgaggaggttaagcggggctatgtggtctgtcgtgagggcgatgtgcttgattccaggcagactcgtctgttgaagttatttggtgttgccatgagtgagtttcgtgtccgtgtgctggcctactggagtgcagccactaccgagatcacggaggtcaacgctgcagatgatggcgatatgtccgaatag

SEQ ID NO: 5612 - protein, 251 aa, Muscodor strobelii
  misc_feature: SGI Peptide ID NO. 561590
  misc_feature (18)..(121): Pfam Id: PF00466 Pfam Desc: Ribosomal protein L10
  misc_feature (1)..(242): NCBI GI: 46124655 Blast Desc: FG06705.1 [Gibberella zeae PH-1]
  misc_feature (1)..(251): NCBI GI: 154305181 Blast Desc: BC1G_08885 [Botryotinia fuckeliana B05.10] gi|150853627|gb|EDN28819.1| BC1G_08885 [Botryotinia fuckeliana B05.10]
  misc_feature (1)..(241): NCBI GI: 85091761 Blast Desc: NCU07547 [Neurospora crassa OR74A] gi|51316333|sp|Q7S302.1|MRT4_NEUCR RecName: Full=mRNA turnover protein 4 homolog gi|28920457|gb|EAA29824.1| NCU07547 [Neurospora
  misc_feature (1)..(251): NCBI GI: 156040916 Blast Desc: SS1G_11436 [Sclerotinia sclerotiorum 1980] gi|154695820|gb|EDN95558.1| SS1G_11436 [Sclerotinia sclerotiorum 1980]
  misc_feature (13)..(248): NCBI GI: 145614204 Blast Desc: MGG_08908 [Magnaporthe grisea 70-15] gi|145021148|gb|EDK05277.1| MGG_08908 [Magnaporthe grisea 70-15]
  misc_feature (13)..(244): NCBI GI: 261358293 Blast Desc: mRNA turnover protein [Verticillium albo-atrum VaMs.102]
  misc_feature (1)..(238): NCBI GI: 70997105 Blast Desc: 60S acidic ribosomal protein P0 [Aspergillus fumigatus Af293] gi|66850943|gb|EAL91269.1| 60S acidic ribosomal protein P0, [Aspergillus fumigatus Af293] gi|159126967|gb|EDP52083.1| 60S
  misc_feature (1)..(238): NCBI GI: 119478258 Blast Desc: 60S acidic ribosomal protein P0, [Neosartorya fischeri NRRL 181] gi|119407494|gb|EAW17443.1| 60S acidic ribosomal protein P0, [Neosartorya fischeri NRRL 181]
  misc_feature (1)..(238): NCBI GI: 121714028 Blast Desc: 60S acidic ribosomal protein P0, [Aspergillus clavatus NRRL 1] gi|119402778|gb|EAW13199.1| 60S acidic ribosomal protein P0, [Aspergillus clavatus NRRL 1]
  misc_feature (1)..(238): NCBI GI: 242761912 Blast Desc: 60S acidic ribosomal protein P0, [Talaromyces stipitatus ATCC 10500] gi|218723469|gb|EED22886.1| 60S acidic ribosomal protein P0, [Talaromyces stipitatus ATCC 10500]
  misc_feature (23)..(245): SWISSPROT Homolog: EC 4.2.99.18 DNA-(apurinic or apyrimidinic site) lyase
  misc_feature: Useful for introducing or modulating the production of volatile compounds
MPKSKRARVVHTSQVTKKGREHKEKLFDNVRDCVSEYQHCFVLSVDNMRNTYLKEVRAELSDCRLFFGKTKLMARALGHSPEDSYASNIYRLSPYLKGTVGLLFTNREPSALLTYIHAVAEMDFARAGVTASREFVIPRGILYSTAGEISQEDDTPLGHTVEPELRRLGVPTRMVKGKVVLEEAPEDASEEVKRGYVVCREGDVLDSRQTRLLKLFGVAMSEFRVRVLAYWSAATTEITEVNAADDGDMSE

SEQ ID NO: 5613 - DNA, 3711 bp, Muscodor strobelii
  misc_feature: SGI EST ID NO. CUFF.14275.1
  misc_feature: Variant of the nucleotide sequence at SEQ ID NO 5611
ctgaaggccgctgaattccgttcagacgttcgaaacattcggagtcactaatccaatttcctttctctttcatatataggagatcctttcttccccaagactcctcggaataaatcacacaaattttctccaatcgtatcttcccctgagcatctacaaatcaccatcgcaaacacaaaacctacctagagactaccaccacaatacaatgccaaagtcgaaacgagcccgcgtggtgcacacctcgcaggtgacaaagaaaggccgcgagcacaaggaaaagctcttcgacaacgtccgcgactgcgtatccgagtaccagcactgcttcgtcctgtccgtcgacaacatgcgcaacacctacctcaaagaagtgagagcagagctatcagactgccgcctcttcttcggaaaaacaaagctcatggcccgcgccctaggccacagtccagaagacagctacgcatcaaacatctaccgactctccccctacctaaaaggcaccgtcggcctgctcttcacaaatcgcgagccctccgctctactcacctacatccacgccgtagccgagatggacttcgcgcgcgccggcgtcacggcgtcccgcgaattcgtcatcccccggggcatcctctacagcaccgccggcgagatatcccaagaagacgacacgcccctcggccacaccgtcgagccggagctgcgccgtctcggcgtccccacgcgcatggtcaagggcaaggtcgtgcttgaggaagcacctgaagacgccagtgaggaggttaagcggggctatgtggtctgtcgtgagggcgatgtgcttgattccaggcagactcgtctgttgaagttatttggtgttgccatgagtgagtttcgtgtccgtgtgctggcctactggagtgcagccactaccgagatcacggaggtcaacgctgcagatgatggcgatatgtccgaatagagagttagactcgtttgttttgtttcgggtttatgttttagggtctctgggcatcatctaaaggcgataccaaagggtgctggcgttttaaggttgggggaaatgaataaaagaactccaaattttcaatcaaggtgtgtgttaccatggatttacgtgatcatgtggacaattcactccgtctggtcgagattgcatgactgtggacgtttacgggtggtctggttttttgaaatagcaaatccgataacctcccaaacaggatcgggatgctactgagttatgcgacttcttatatacaggacaataagagaatacaagtgtggtgggacatgtgctacccacctcattacccgctcggttgcatccgacttcaggaatgcacttacgcttaatgcaacgtccccagcaactccgctctttcgatttgtcttcagagtcagtagtaatttcagcaaaacaaattccttacccctaaacgtgccattccatccagcattaggtgactacgaactgcatacctaaccgattgcgttccccctttttggatcttcccaccgcggccccggccgtctggccgcagaggcgtcattatagtacatgagagacaagttgttacctttcctgtcgggtttgggacctactggtccagagtgtaggcttgattaccaccagtccgaggttgttgctgatgtttgacgtccgggcggattcaaattgcgtattaaaggaagaatctttgggcaagtccaagtatcttttaccttgaggtttcaggtattttcataatacaaatcgctgtggtgacgctctgccgctttctaggcattcctcgttttgataggcgagatgacttccagtgtcgtttcttgatacgtcgccttacccttgcttacccttgttgatgaaagccagggagaactgtaaaaagtcgaaatgcagatgcgaaaaacgggaagacagaggacatacccaccaagacaagacagagggtactgtcttgatcagaagcaggttagtagcgtcgcagcttgcgcggatcctcgtacccgccctcgtatccacgtttccgggtgtcgtcatctctggaccgatcgtagtcgcggtattcgcgtcgatcaccctcacgccggtctctaaccggctcgaagttggctcccgttcgtcggtctcggtcgaagcgcgacggaggtccgccggatctgtcatcatatgagcggccgccaccacgcgaatcatacccaccgcctccttgccggtcgcgatcgcctccgcggtctccgcctcgatcaccgaaacgacctccggaacctggtccagctggagcattagggggagcgttgtagccgctgccattctgttggccaaaaccacggtcacgaccgccgccgaatccgccgccgccgccaccaccaccccggaatcctctatcaccaccacggaagccgcctccgcggccaccgccaccgccacgtcctccgccgaaaccgcctctgaaacccccgtcgcgtccgccaaagccaccgccaccgccgccgaaagcacctggaccggtggggcgaggtggtgctgccttggtatagttacggccgcccagtccaccgccaagtcgtcgaggttgccaacctttaactgtgcgacctctttccacatctactttaattcggcggtcctttatgcgaataccatcgcaagcatctagagcagctaattatacgtgcgcagcaacgcgcttttgtcagtcaagtccacagaaacaccataccttgatgtatgagcaggaaagcgcagggggaggggggagggtggggaagagataggcaagcctgagggccgatatcccgagtgagagacacggaaaacaatgctgaagggattagatggctgtattacctctcatgtctttctcacgctcaaacactacgaagccgtatcctcggtgtttctttttcttcttgttgggtcgctcatgcgcatgcgtatccacaatgatgcgaatctgtgatgagttagcttgggtggcattgagaaaatgacggaaaagggaaaaggggaggcgtacgcgttcaatgggtccgaaacgaccaaactccttctcgaggtcactctcgttggcatcgtaactgagtcgcgcaacgatcaaggtcttgaagggatccccacggatgttgggatcatcgctgggtttatctgtggatagcgcagtggtcagtactcggaatatcagacaatcatagctcagctgatggatgcaatgcctacagttcttggggccctcagttagcagcttctcctgctccgtctttttctcctccttcttgcgatcgcgcctctccaaccagctctcggtgggcacaaagccatcgttgtctttgtactgcgcgagcgcaggtagaaattgggaaagaccagtgatgggggttgttttgcgcttttcgggggccttatcaggggcaggcagccatcgcagaggagggcgcggcgcaaagagcgccagcagattctgcgggagcttgtcggtcatgatctagacaatttgctatcggtggttaaggattaatgcagacaatgatatcactagaatatgatagctcgcatggctcggcgatgcacggcagactcgagcgaatgagaggcgggtgagggtagcttgatgaaagagaggagagaggcgtcgcgttgaccagatcggcaacaagaatgtaaaatgctgttgcaggcagggtgctacaaggggcaagtgcaag

SEQ ID NO: 5614 - DNA, 270 bp, Muscodor strobelii
  misc_feature: SGI cDNA ID NO. 561591
  misc_feature: Encodes the peptide sequence at SEQ ID NO 5615
atggatggacttacacaagccgagagccgcgagctcgagcagcgcatgcagaagcgccagatgaaggagttcctgggccttttcagcaacctcgttgaccattgcttcatgtcctgcatcgacgacttcacctccaaatctctgtccggtcgcgagtccggctgcgtcacccgctgcgtccagaaacacatggctacctcgcaacgcctcagcgagcgctttcaggaacacaatgcccagatggcgcagcaacaagggcagggcagataa

SEQ ID NO: 5615 - protein, 89 aa, Muscodor strobelii
  misc_feature: SGI Peptide ID NO. 561591
  misc_feature (12)..(77): Pfam Id: PF02953 Pfam Desc: Tim10/DDP family zinc finger
  misc_feature (1)..(84): NCBI GI: 46122331 Blast Desc: FG05543.1 [Gibberella zeae PH-1] gi|90101785|sp|Q4IB65.1|TIM9_GIBZE RecName: Full=Mitochondrial import inner membrane translocase subunit TIM9
  misc_feature (1)..(87): NCBI GI: 39977049 Blast Desc: conserved [Magnaporthe grisea 70-15] gi|59802894|gb|AAX07658.1| mitochondrial import inner membrane translocase-like protein [Magnaporthe grisea] conserved grisea
  misc_feature (1)..(84): NCBI GI: 85080688 Blast Desc: NCU00198 [Neurospora crassa OR74A] gi|74629766|sp|Q8J1Z1.1|TIM9_NEUCR RecName: Full=Mitochondrial import inner membrane translocase subunit tim-9 translocase of
  misc_feature (1)..(82): NCBI GI: 261358141 Blast Desc: mitochondrial import inner membrane translocase subunit tim-9 [Verticillium albo-atrum VaMs.102]
  misc_feature (1)..(88): NCBI GI: 156040665 Blast Desc: SS1G_12349 [Sclerotinia sclerotiorum 1980] gi|154696405|gb|EDN96143.1| SS1G_12349 [Sclerotinia sclerotiorum 1980]
  misc_feature (1)..(88): NCBI GI: 154320434 Blast Desc: BC1G_01689 [Botryotinia fuckeliana B05.10] gi|150853378|gb|EDN28570.1| BC1G_01689 [Botryotinia fuckeliana B05.10]
  misc_feature (3)..(81): NCBI GI: 116191767 Blast Desc: CHGG_05601 [Chaetomium globosum CBS 148.51] gi|88181514|gb|EAQ88982.1| CHGG_05601 [Chaetomium globosum CBS 148.51]
  misc_feature (1)..(86): NCBI GI: 169625467 Blast Desc: SNOG_16006 [Phaeosphaeria nodorum SN15] gi|111055465|gb|EAT76585.1| SNOG_16006 [Phaeosphaeria nodorum SN15]
  misc_feature (1)..(83): NCBI GI: 121711092 Blast Desc: mitochondrial intermembrane space translocase subunit Tim9, [Aspergillus clavatus NRRL 1] gi|119401312|gb|EAW11736.1| mitochondrial intermembrane space translocase subunit Tim9, NRRL
  misc_feature (1)..(83): NCBI GI: 70988773 Blast Desc: mitochondrial intermembrane space translocase subunit Tim9, [Aspergillus fumigatus Af293] gi|74669406|sp|Q4WIQ2.1|TIM9_ASPFU RecName: Full=Mitochondrial
MDGLTQAESRELEQRMQKRQMKEFLGLFSNLVDHCFMSCIDDFTSKSLSGRESGCVTRCVQKHMATSQRLSERFQEHNAQMAQQQGQGR

SEQ ID NO: 5616 - DNA, 840 bp, Muscodor strobelii
  misc_feature: SGI EST ID NO. CUFF.14176.0
  misc_feature: Variant of the nucleotide sequence at SEQ ID NO 5614
cgaagccttgcgtagctctgaccaagcaaagcaggctcaaccagggccgacttttcaacttcaagtccttgtctaacattaaactcatttgcgcatcaatttcacaaccacgaaaccactataataaatttttccacactccagtctaatcgcacatcatggatggacttacacaagccgagagccgcgagctcgagcagcgcatgcagaagcgccagatgaaggagttcctgggccttttcagcaacctcgttgaccattgcttcatgtcctgcatcgacgacttcacctccaaatctctgtccggtcgcgagtccggctgcgtcacccgctgcgtccagaaacacatggctacctcgcaacgcctcagcgagcgctttcaggaacacaatgcccagatggcgcagcaacaagggcagggcagataaaatgttccgcaagtcatctatgctttgcgattaaaataccaccgccggcacggtgttccgggcgtgatggtgatctccactcgaccaaatctgcgccatattaacgatagtagtcgagtggaattgtataatagaacagaggggaagtcgagaagacctccgttccaaaaaggacgatgggtgtatatggtcgtgtgggagaagacgggcatatgtacactggtctgcaagatctacaaacttgatgaatggggaaaggatttgtcctcacttcagagcgaaaattgcacagttgcgagatgatagcattgtatcaatagaccgttggctcctgttatgagccccttgtaatatctatgctcttgaattttagctcatcacgaaaaaatcatacctcagcattgcatatcac

SEQ ID NO: 5617 - DNA, 882 bp, Muscodor strobelii
  misc_feature: SGI cDNA ID NO. 561592
  misc_feature: Encodes the peptide sequence at SEQ ID NO 5618
atgcagaatcaacaagctgccgttcatacaccttatgacgggtcacgggaggtcgcttccaaacaggacgatgcagaagaggccgttgctgccgagggcgataataatgggcgtaaattatgccccggatgcaaggaatatttcacacctgattatcccagtagaaagttctgtcccaacaacaacaaatgtagaacaaagtttcagaaggaacataagaaggcagttagacagcaaaggaaggaagagagcaaacaggcaacccatgatttcatgaattctagacgtcccggacggggctcgtcatctcagtcccatggatctcgagaacatgcgcaacccgcaacatattatgggcagactacgccagttgcatctacctggagatatggacaatccaacacatcagtatacctacctactccacagaactacaatccgcaatccgcaacatattacgcacaaactgcgcccgttgcatctactcagacatatgcgcaacccaacacaacggtgaacgtgcctcctttacacaactacaatgcgcaacccgcaacatataatccgcaaactgcgcccattgcatctatccagacatatgcacaacccaacacatcagtgaacttgcctcctttacagaactacaaggcacaatctcagcctgcaacgatttacgggtcctatgaatcgcgatatgacgaagatagacggcaattagctctcatgcagaaccggctttatcattcgcttcatccaacgccatacagccaaaactccatctcgaacgatgaacagcagcagtttgataacaacgcttactataattatgcacacgatagtgcccacgactggactagtcaggacgatcacgatggtcgctag

SEQ ID NO: 5618 - protein, 293 aa, Muscodor strobelii
  misc_feature: SGI Peptide ID NO. 561592
MQNQQAAVHTPYDGSREVASKQDDAEEAVAAEGDNNGRKLCPGCKEYFTPDYPSRKFCPNNNKCRTKFQKEHKKAVRQQRKEESKQATHDFMNSRRPGRGSSSQSHGSREHAQPATYYGQTTPVASTWRYGQSNTSVYLPTPQNYNPQSATYYAQTAPVASTQTYAQPNTTVNVPPLHNYNAQPATYNPQTAPIASIQTYAQPNTSVNLPPLQNYKAQSQPATIYGSYESRYDEDRRQLALMQNRLYHSLHPTPYSQNSISNDEQQQFDNNAYYNYAHDSAHDWTSQDDHDGR

SEQ ID NO: 5619 - DNA, 3306 bp, Muscodor strobelii
  misc_feature: SGI cDNA ID NO. 561593
  misc_feature: Encodes the peptide sequence at SEQ ID NO 5620
atggaggactcatggggtcagtcgtttgaggtggacatgagtcctatcgcacctccgccaggacccccggcgccaaaagcaaaaccgcaaagactgaagtctatacgccgggcagaaactagtcagccagagccgcgggcaccagaaccacggcgacgtgcccgtccaaacagcgttgtattcccggctaccttcgccgctattgcgagaaacatcagaggaagcccagaacccgcaccaaaacccgaggctgattatgagcgagtgcctcctcctcagttgcccaagataagggtcgacactactcaggctcgacagcctcgagagacaagtttctcggctgctccatatgggagacacagtttgatggcccctgatgatcttttgaggcaacttgatcaaatgttacagaagggcgaccagcccagtggaacagttgacccatttgtcgacaccttaaatgtgttgaccgggggcgagagcagggccttggagagtagaccgatggtgagggattgtaactgggaacagttcaagaatcgatttgaatcagtgatccctgccattgaggtattgctaggtcatgaggatctgaatgaacagatcgaggctgagcagttaaaacgagtggatcaagatcagaggaacggcttcgacccaacccgtcggaagtcagtctcagtgatcagcccaataataactcggagcaccagcagcatcagtagcaggattcgaccggaggttactcccatagaccgagtccgcatcaactcgcccataatactaggttacctcagcaaagtcactggtgcaggtccctgggttggaacacctcatactttccttgcgccattccggacactcacgcatttccatgagcagatggaacaggagacgaagaacttgcgcgcaacgctgcgtcacgaggtccagcccgcaagtggtgcggagactgcagatgacccattcgcctttctccgagatagtgagttgcaacttatgatgagaagtcgaaaagcctatgaggaattgaactgttatgtcaatttcatcaacactcggatcttaccgcgatataacatgtacagcaaagaaaccctcagccggccatctcgaattcgctaccgtgatttgccgtcaatgttccgagtcggcgaacttgtcgtcgagccaggtgtcatctctaaagcggacaagaggaactcgcgcttgagagttgccgagcccaagctctggcgactctgttacgtctctgaagacacacccgcctggatggttgacaatttggacgtgccagggggcaaactccgaggccagatgggtgtgaatgctgaagcaacacatctccgcctttattacatcgattttgatggctatcggtacacagccgtccgaagcgacgctgccattaaatattttgatggtgaaaaggaaatcacgaaacttccattttatccactgagattccataaggatccccaacgactcctcaaggaactccaagaaaggggtcggcgattccatgaaatcacctccgcaggaaacacgacactctcttatcagggattgactctggcgaaagacccaacaggtcgtgatatccctgccaagacgggccgagacgtaccctcttggccagaatatgttgaaagcgaggtaattgtcgatttccacgaggcatttcaactacacccatggtggaaacctaattttcagcaatttcctgcccctgaaacttatgctcctgcaacaattcgggatgaatttgctatccttaattgggcggacccgcatcgtcgacgcatgatgtccagtatcgaagagactatcgtcgagtatcacgcagtcgaagaactggaatgggctgacttgatgaagaaagatccgttcatactccaagacgaggaagactcaagacctctggaccacatgtcgcaaaagctgtcgtcttgtgatctcgctctgttgccatctcgtcttttcgtctatgccttccgcaaccgtagttttatcaacgccgacatccggttcttaaagaccaagccagagcttcagaacccattagagaacttacaacttcccgagaagctcaagactatgattcagtcttcagtttttggtcatcttgagaagaagaaggttcaaagacgggccacaatggccaatattgacttcatggatcaagacataatccgaggtaaaggacaaggattagccattctcctccacggacctcctggagtcggtaaaactgcgacagctgaagctgttgctcacttctataacaaaccgctattcaccattacagcaggtgatctaggcaccgatccctgggatgtagaatcaaacttggcggagatcttccgcctggcaaaccagtgggactgcatcttgttgcttgacgaagcagagactctgctagcccaaagagagaagaaggacgacaatgcaaccaagagctctatcgtttcagtcttccttcgaactcttgagtactatcctggtatccttttccttactacaaacagaccaggaatcatggatgaggctgtcaagtctcgtatgcaagtcagcctacaatatccccgactagggttggtcgagactatggcaatcttccggacgaatttagatcggcttatggatatcgagttcgaacggtctaagatcaccggagaagcgacactagatgttaaatcagatgggattctcgctttcgcggcggctcatttccaacgtcatgaaggcagcacaatatcgccaccatggaacgggcgacagattcgtaacgcattccagattgcgccatcgatcgcgcgatacgagcatgcgcatagaacacagcgatcggacgaggatccgtatatcggcccggaacattttgagaaagtcgaagaaacgaccgtagaaccagagaccaaccagcaggtggtttacaggacaaccgacgaggaggctgcccgtaggcgcgaggaacgcgagcgaggtcagtcaccacctaactccgcccactccgccccgagatctagcccaacacgtcaagcggttatcccacgtcgcatgctcagctcccgacagtcccaatccggtgatggcccccgtaacccgcggaactcgggcgagtcgcagcgaaagcgattctcaggagaattccacatgagacaccggtcttcgtcgtctgttatgccactataccttccgtcagcacagcaatttgaggaaaagtcattcctgcgggagccttccccgccttatacgccagaactgagctccgttccagataacaggtctgctgagagagactaa

SEQ ID NO: 5620 - protein, 1101 aa, Muscodor strobelii
  misc_feature: SGI Peptide ID NO. 561593
  misc_feature (739)..(914): Pfam Id: PF00004 Pfam Desc: ATPase family associated with various cellular activities (AAA)
  misc_feature (739)..(768): Pfam Id: PF07728 Pfam Desc: ATPase family associated with various cellular activities (AAA)
  misc_feature (164)..(1011): NCBI GI: 256725321 Blast Desc: NECHADRAFT_45867 [Nectria haematococca mpVI 77-13-4]
  misc_feature (158)..(993): NCBI GI: 116201997 Blast Desc: CHGG_08883 [Chaetomium globosum CBS 148.51] gi|88177401|gb|EAQ84869.1| CHGG_08883 [Chaetomium globosum CBS 148.51]
  misc_feature (170)..(1036): NCBI GI: 116203341 Blast Desc: CHGG_09555 [Chaetomium globosum CBS 148.51] gi|88178073|gb|EAQ85541.1| CHGG_09555 [Chaetomium globosum CBS 148.51]
  misc_feature (168)..(968): NCBI GI: 46114954 Blast Desc: FG03319.1 [Gibberella zeae PH-1]
  misc_feature (170)..(1036): NCBI GI: 171681389 Blast Desc: protein product [Podospora anserina] gi|170940653|emb|CAP65881.1| protein product [Podospora anserina]
  misc_feature (168)..(968): NCBI GI: 256724231 Blast Desc: [Nectria haematococca mpVI 77-13-4]
  misc_feature (188)..(994): NCBI GI: 256726318 Blast Desc: NECHADRAFT_43342 [Nectria haematococca mpVI 77-13-4]
  misc_feature (170)..(1096): NCBI GI: 145237766 Blast Desc: An07g04480 [Aspergillus niger] gi|134076004|emb|CAK48198.1| protein product [Aspergillus niger]
  misc_feature (170)..(983): NCBI GI: 119467011 Blast Desc: AAA family ATPase, [Neosartorya fischeri NRRL 181] gi|119405464|gb|EAW15415.1| AAA family ATPase, [Neosartorya fischeri NRRL 181]
  misc_feature (165)..(1018): NCBI GI: 67526315 Blast Desc: AN3615.2 [Aspergillus nidulans FGSC A4] gi|40740633|gb|EAA59823.1| AN3615.2 [Aspergillus nidulans FGSC A4] gi|259481858|tpe|CBF75772.1| TPA: conserved [Aspergillus FGSC
MEDSWGQSFEVDMSPIAPPPGPPAPKAKPQRLKSIRRAETSQPEPRAPEPRRRARPNSVVFPATFAAIARNIRGSPEPAPKPEADYERVPPPQLPKIRVDTTQARQPRETSFSAAPYGRHSLMAPDDLLRQLDQMLQKGDQPSGTVDPFVDTLNVLTGGESRALESRPMVRDCNWEQFKNRFESVIPAIEVLLGHEDLNEQIEAEQLKRVDQDQRNGFDPTRRKSVSVISPIITRSTSSISSRIRPEVTPIDRVRINSPIILGYLSKVTGAGPWVGTPHTFLAPFRTLTHFHEQMEQETKNLRATLRHEVQPASGAETADDPFAFLRDSELQLMMRSRKAYEELNCYVNFINTRILPRYNMYSKETLSRPSRIRYRDLPSMFRVGELVVEPGVISKADKRNSRLRVAEPKLWRLCYVSEDTPAWMVDNLDVPGGKLRGQMGVNAEATHLRLYYIDFDGYRYTAVRSDAAIKYFDGEKEITKLPFYPLRFHKDPQRLLKELQERGRRFHEITSAGNTTLSYQGLTLAKDPTGRDIPAKTGRDVPSWPEYVESEVIVDFHEAFQLHPWWKPNFQQFPAPETYAPATIRDEFAILNWADPHRRRMMSSIEETIVEYHAVEELEWADLMKKDPFILQDEEDSRPLDHMSQKLSSCDLALLPSRLFVYAFRNRSFINADIRFLKTKPELQNPLENLQLPEKLKTMIQSSVFGHLEKKKVQRRATMANIDFMDQDIIRGKGQGLAILLHGPPGVGKTATAEAVAHFYNKPLFTITAGDLGTDPWDVESNLAEIFRLANQWDCILLLDEAETLLAQREKKDDNATKSSIVSVFLRTLEYYPGILFLTTNRPGIMDEAVKSRMQVSLQYPRLGLVETMAIFRTNLDRLMDIEFERSKITGEATLDVKSDGILAFAAAHFQRHEGSTISPPWNGRQIRNAFQIAPSIARYEHAHRTQRSDEDPYIGPEHFEKVEETTVEPETNQQVVYRTTDEEAARRREERERGQSPPNSAHSAPRSSPTRQAVIPRRMLSSRQSQSGDGPRNPRNSGESQRKRFSGEFHMRHRSSSSVMPLYLPSAQQFEEKSFLREPSPPYTPELSSVPDNRSAERD

SEQ ID NO: 5621 - DNA, 4494 bp, Muscodor strobelii
  misc_feature: SGI EST ID NO. CUFF.14204.0
  misc_feature: Variant of the nucleotide sequence at SEQ ID NO 5619
ttatattgtacctttatgctgtcgacatgatttcaaatactatctaatctccgacaccttatggaattgagcggcgcctttggtttggggcttcttctccccttctagaagccgacgagatagcgcaaatgaaacgtgagtattattagcatcagggctctcattcggtagtcattagtgtataatcctcatgaaccctgctcggtgccgtagctgactttgacatttcgtcgagctatgcgaagtccaccgctttaatgaataaaatgagactgggtgccccataagctgacacatcacattaatgcgggtgatgccaacctgccaagaatcgaacagattaacatggtcttaccagggtaggcaattagctgaagatcccttgaccctattgatcaggaccctgcaaagatggatattgatggacttctccaagatggaggtgattgggttgcgtgacgtgtgtgggtttggggctgcgctgcccgcctcacgtatgtaagcatagagcggaccaggatcagtctctcttgattactgcaatggtcatcctccataccagatgtgtgtactgtaataaatcagacagactgttcaggcctcagccctgtcttgtcaactttaaacattgactgccgtttcatatagggcggggacagcccaggatacaagtacatagctgcgccaggacaacaccgaggcaacgtgcctttatttcactttttgtcatatcgaaaagcgagacggagggcgaaaagtgacgggaaataggtacaagggtcagggcatttcaccacctaaatacagcaccaccctcacggagttccctcacgactgtaacacgtttatccacaacaccgcgcgtagttgcggccatatgactctctaattccaggcgttgacgttcagacattcacagcaaattgccaataagtctacctttaaatcgacttctaattgtcaacatggaggactcatggggtcagtcgtttgaggtggacatgagtcctatcgcacctccgccaggacccccggcgccaaaagcaaaaccgcaaagactgaagtctatacgccgggcagaaactagtcagccagagccgcgggcaccagaaccacggcgacgtgcccgtccaaacagcgttgtattcccggctaccttcgccgctattgcgagaaacatcagaggaagcccagaacccgcaccaaaacccgaggctgattatgagcgagtgcctcctcctcagttgcccaagataagggtcgacactactcaggctcgacagcctcgagagacaagtttctcggctgctccatatgggagacacagtttgatggcccctgatgatcttttgaggcaacttgatcaaatgttacagaagggcgaccagcccagtggaacagttgacccatttgtcgacaccttaaatgtgttgaccgggggcgagagcagggccttggagagtagaccgatggtgagggattgtaactgggaacagttcaagaatcgatttgaatcagtgatccctgccattgaggtattgctaggtcatgaggatctgaatgaacagatcgaggctgagcagttaaaacgagtggatcaagatcagaggaacggcttcgacccaacccgtcggaagtcagtctcagtgatcagcccaataataactcggagcaccagcagcatcagtagcaggattcgaccggaggttactcccatagaccgagtccgcatcaactcgcccataatactaggttacctcagcaaagtcactggtgcaggtccctgggttggaacacctcatactttccttgcgccattccggacactcacgcatttccatgagcagatggaacaggagacgaagaacttgcgcgcaacgctgcgtcacgaggtccagcccgcaagtggtgcggagactgcagatgacccattcgcctttctccgagatagtgagttgcaacttatgatgagaagtcgaaaagcctatgaggaattgaactgttatgtcaatttcatcaacactcggatcttaccgcgatataacatgtacagcaaagaaaccctcagccggccatctcgaattcgctaccgtgatttgccgtcaatgttccgagtcggcgaacttgtcgtcgagccaggtgtcatctctaaagcggacaagaggaactcgcgcttgagagttgccgagcccaagctctggcgactctgttacgtctctgaagacacacccgcctggatggttgacaatttggacgtgccagggggcaaactccgaggccagatgggtgtgaatgctgaagcaacacatctccgcctttattacatcgattttgatggctatcggtacacagccgtccgaagcgacgctgccattaaatattttgatggtgaaaaggaaatcacgaaacttccattttatccactgagattccataaggatccccaacgactcctcaaggaactccaagaaaggggtcggcgattccatgaaatcacctccgcaggaaacacgacactctcttatcagggattgactctggcgaaagacccaacaggtcgtgatatccctgccaagacgggccgagacgtaccctcttggccagaatatgttgaaagcgaggtaattgtcgatttccacgaggcatttcaactacacccatggtggaaacctaattttcagcaatttcctgcccctgaaacttatgctcctgcaacaattcgggatgaatttgctatccttaattgggcggacccgcatcgtcgacgcatgatgtccagtatcgaagagactatcgtcgagtatcacgcagtcgaagaactggaatgggctgacttgatgaagaaagatccgttcatactccaagacgaggaagactcaagacctctggaccacatgtcgcaaaagctgtcgtcttgtgatctcgctctgttgccatctcgtcttttcgtctatgccttccgcaaccgtagttttatcaacgccgacatccggttcttaaagaccaagccagagcttcagaacccattagagaacttacaacttcccgagaagctcaagactatgattcagtcttcagtttttggtcatcttgagaagaagaaggttcaaagacgggccacaatggccaatattgacttcatggatcaagacataatccgaggtaaaggacaaggattagccattctcctccacggacctcctggagtcggtaaaactgcgacagctgaagctgttgctcacttctataacaaaccgctattcaccattacagcaggtgatctaggcaccgatccctgggatgtagaatcaaacttggcggagatcttccgcctggcaaaccagtgggactgcatcttgttgcttgacgaagcagagactctgctagcccaaagagagaagaaggacgacaatgcaaccaagagctctatcgtttcagtcttccttcgaactcttgagtactatcctggtatccttttccttactacaaacagaccaggaatcatggatgaggctgtcaagtctcgtatgcaagtcagcctacaatatccccgactagggttggtcgagactatggcaatcttccggacgaatttagatcggcttatggatatcgagttcgaacggtctaagatcaccggagaagcgacactagatgttaaatcagatgggattctcgctttcgcggcggctcatttccaacgtcatgaaggcagcacaatatcgccaccatggaacgggcgacagattcgtaacgcattccagattgcgccatcgatcgcgcgatacgagcatgcgcatagaacacagcgatcggacgaggatccgtatatcggcccggaacattttgagaaagtcgaagaaacgaccgtagaaccagagaccaaccagcaggtggtttacaggacaaccgacgaggaggctgcccgtaggcgcgaggaacgcgagcgaggtcagtcaccacctaactccgcccactccgccccgagatctagcccaacacgtcaagcggttatcccacgtcgcatgctcagctcccgacagtcccaatccggtgatggcccccgtaacccgcggaactcgggcgagtcgcagcgaaagcgattctcaggagaattccacatgagacaccggtcttcgtcgtctgttatgccactataccttccgtcagcacagcaatttgaggaaaagtcattcctgcgggagccttccccgccttatacgccagaactgagctccgttccagataacaggtctgctgagagagactaaattaccgaagttggcgtttggcgtttgacatttacgatgatggtatggtggtgaacggatcccgttgcgattggcgatgaacttgcaggagtattaaacagatatgccggctgcaggctctacaatactaaacattgaatcttggaaatgatggcgtcgtatgacttatttttagtatcgatgtatatatagtaagccctctgggaatgataatggatgaacc

SEQ ID NO: 5622 - DNA, 5511 bp, Muscodor strobelii
  misc_feature: SGI cDNA ID NO. 561594
  misc_feature: Encodes the peptide sequence at SEQ ID NO 5623
atggcagagccgctctccgaccacatctacctgccgccgctggagccgtgtctcaagggcgacaccgtcatcctatcatgggctctcgtcgcggcggcgctcacagacccctcgggccaccgccagtccagccaggccatcgttgacttcctgaccgaccccctcgtccagtccttcttcaccaaccccggctcgcccttcgagtcctccgccgacaggagcagcgcccaccgcaccgccttcgagaagaagacagccgctatccacgtcaccccgaccccgaacggcaagtacgacatcggcctcatcaaggaggatgtgctgtggctgagcaagaatgcccgcatcaacgagctggccgccctgcgcgtcgttgtcgtcgagcaccaggcgcgtccctcgagccagctcctcggccccatatccacacaagatgtcgccaacctgcgcgctgctgccggcgtcgcgagcacccagtcgtccaacgtgctgcccggtctgaacctcgccgccgcccgagacgccaccgacatccaggccgactttgacaagctcgagagcaggcgccagcgcatcttccacacctacctctccgagcgccgccactacgccgccacccacgactacgtcttcaccttgatgctgcagcagaggctccccacctcgccgcctaccgatgcttccaccgcgatacgcacctccctcctgcaagcctatggcatatctcccaagcaaccccatgcgccgctcacagatatccccacgaagacctcccacgccctgatcgcccagtatatcagtcttttgccaggcttggtggggaatgtgtacacatcggtcgagtcggtggtcgaggacaagtcgctggcaactcaagagaacgaagatctgtggtgtcagacttccctggccgagatattgcaccgcatgaccatcgtcttccagctcctcgatcgctccggccactctttcgtctcacactctaccgccatgcagtggtttggcttgtttcacgacgaccctactctgctcaacagactgcgatcggagttagcagatccattgcagtgccttgtctgcataatctctctgaagatgctgaatctgcccaggatgatggacttcttcgacggcgaggttgacctcgacacagacaatgagttcctcgctaattcgagcaccttggagctggtccatgacacgctggagactgcggtggaccaaggggctgtccacatggcaccggttctgtttgcatggatacccattgtccatgccatgttctcgtcctaccaagaccgtgccgagaagcgagacactattcagaaccagaaggctattgagaattacgattcaaacacccagatggtccccaccggccgtaggaggaactcagctggcagcatcactaccattgataagaggcggtatgacgattttctcatcaacaaaaatcttgaccgcgactccgagagggtgcagagactggctgccgccctaatcgaccaaatcggggtgtacgatgtgattgcagcactgccatcgtatctgggtccgacccatcgctcctttttctccccccttgttggatctcggatgagaattgctttactcgacttgctcaaagcgacccatccctttgtcggctataaatccgatccagtcactgcattgttgtctgttctctctggcggtcaggcttactgggatatacatggccctcgcgaagtccagctagataatatattgacttacgcactgaatgacgcttttttcgttgaagcctacattcaagaagccctggaccgtttcccatacgagttcgccccctttatgactctgtgtcgcattctcgctggctcatccaattctgccagcggggatagagacgagcggatactcaatctactacaaaagacaccaacacttactttcactctgccagaacatttcacagactaccacctagccaacgaggacgaaaacgtcaacgccttccagtttgctgacgacttccccttatttactcctcgcacgagccgaaaacgattaacggcggaggaggaacccttcataatacccgcaggaacgtatggacgctttgttgtagacgaaggcaaaattgtgcgcgtggaatatgagcattctctcttagctctgctggggaagcggttggaggcaaatgattccaataaatacgatatgcccctcgacatcatgacgaacgaggagatcacagagtatatctcgttgctcgcagcactcgtgcgcacagaggcactcaaagagtccgactcgagcgctcaagcaaacggctcaacagaggctgcacgtgctatcttgcaagaagctagccgagcgctgcctcgcactaaagatatcatctcggtagtctgcgacacattggatgtgcttcttgacattgacgcggatagctctgtgttacaggtgctgaatgcctgtgttcagtttctccacgcggtcttgccggtctctccagggagggtctggtcttacatggcgagatgtgctctgttggagggccgctcccagggtggacggcttgctcgacttgtcggcactctagacttgtctgaagcccaatttgacctgttggcgtcatctatacgattgttctccagcttggtcaacagcgcgataagcagctcggtccagcgtaagactgtcgtaaagacaaatcattggcagcccgtggaaaatgtctggcttggagtttcggacaaaattatcgcacagatcacgctggccatatcacaagctgctgttgattacctggaaagttcgtctacgtggaggttctctacagatgtggagcgaatgacgcttgttcgcgacattgtgccaatactcgacaatattatatactatagcttcggcatggacgacatagcggccaggaccgctctgatgtctgttctgcaaccagcggctcaatttgtcatcaacagttttcttgctccatctgctggcagccttcgactactgccactcttagctgctctcgtgaaagccactcaggagcactgttcgactatatatgcgacacgttctgcggtcttctgtgatcagactctagcagttttgaccttcacaacccatctagtaaggattaccaactactcggacagaccatcgaacacggttgaacagcaattgttcaaagtaatacccttcattgctcggctctgtgcacgacatgacgcattcaaaggacccgctattgaattattggagtcactggtcatcagtgccggaaagacgataggagaacctccctcgttgttagggcatctcggcccgcatacatcgcgatcgttcctacaactcgtcagtatgcttgatcggccgttcaaccaagccgaacaggccaatatcatctggcgtttcttctctactatcgtgcggaataggcaacagtggatggcaaactgtctgcttactggcaaaactccgcgagacgcccgaaatggcaatgggaacgcatctgagacatcttcaagttccattcttaactcagccctgggaaggttggcatcgatctcgactctcgacggaccggaagctttggcaatcctagacttcatcacatctgctcagaactactggccttggacaatatttgccttgcaaaagaacgtcactttcctcactgaacttaggaaattcatccgcagtatgaagccttgttcggtggtttccaaaatggatgttctgcgtgcgtgcaatgaagcccgaatagcagcctacatcgcggagatctttgccatgcagctttttcatcttcgacaaatagaccaagcaagttcgttcgctagagacctaacacaagatcttgactattacttgcgagatggtgtgagggtatcaggctataatagaggtcttcatgtgaatttcaccagcaacttcaatcagcaatacccaagctgctctcttgagaatttcaagcggacacttctcgagcccaagtgtctcggcgaggagttttactatgctctgggcttcgcggacaagatactccgatttgattcgagttgggttggaccgaagaacagcgggttcaggagcgagatgcaaaaagccaacctgaatctatcattggtagatgcccaagtatccttgtatcacgcttgggaattcttgctccttgagctcagtacttgcctaccggacaacgacacgctcaggaagcagtctctacaggtcgcgcagcaatgcttacaagcgaaccaagaaatggaaatccaaagacaggaccaggttgtgttcgtaagacttgcagagtcacgggtaaatctatcccttatgctggttcaacgagttgcagatagcgccccgtcgcccggcgatgtcgcacagcttctgactgctttatggggaaccgtgagccaataccaagatccttatgcaccgcagaacatctcgatatatcgcacactattgaggctcctttatgtcaccttacgggcattgattcgatcatacaatcacgtggatttcggtgcgtctgtgcgtgacagcgtcggaaacagcatatctgctgctactgtatcccaatctattctcggcattctggacgcggttgtctcaaaaggatttcgcatagtcgtgtctctgatccatgactcagacgcctgtgtttcgaccaatgacatcgtcatcatcaatgctatactacaagcttgtttgtccatgcccggagtggatcaaagtcagacacagattcttaacatcttggccacccatgatacagtacaggccgccgtgtcgctattttcatgggcagataagttagccgaagacggtgatcctatatatggtgaactttcactacttttcctccttgagctgtctgctttaccccttgttgctgagcaattagcctgcgatggtctcctcaatcaaatcacgtcagccagcttggctgggcatctccgacgccctaatgtctcgccctttgcagattcaaatggtccccagcgatgctacagtatttgggccaaaggtatcgtgccgatactgttgaatgttctatccgctctcggtgcaacgatcgctccagaagttgcctacgttctcaatgaatttccaaatttgatgcagtccagcatcgaaagactagaagttcccggggacactcaaagacgcagtcgccttgaccgtgcttttgtaactccactatcagtttcagagatacattctttggcactcattacccgcgtgctgagtgcgctccgcactaataatgcgagagacatcccggcggtggaatgggattctactacgctgttggaaaatgtcgactggtggttagatcaccgaaaggtgttgagggacaggttagtcaccttgggacccagagaggctgaatggaagacgatgcctgcttcggacacggagaagaaaagagggtcacagagcaaacttgaggccaaggtcgtagaccaactagagacggtacggatagcattgagcgagcaattggaatag

SEQ ID NO: 5623 - protein, 1836 aa, Muscodor strobelii
  misc_feature: SGI Peptide ID NO. 561594
  misc_feature (4)..(1836): NCBI GI: 46122329 Blast Desc: FG05542.1 [Gibberella zeae PH-1]
  misc_feature (5)..(1836): NCBI GI: 85080692 Blast Desc: NCU00199 [Neurospora crassa OR74A] gi|28917654|gb|EAA27348.1| [Neurospora crassa OR74A]
  misc_feature (1)..(1831): NCBI GI: 171687034 Blast Desc: protein product [Podospora anserina] gi|170943478|emb|CAP69131.1| protein product [Podospora anserina]
  misc_feature (473)..(1836): NCBI GI: 145608716 Blast Desc: MGG_06426 [Magnaporthe grisea 70-15] gi|145016159|gb|EDK00649.1| MGG_06426 [Magnaporthe grisea 70-15]
  misc_feature (26)..(1379): NCBI GI: 116191769 Blast Desc: CHGG_05602 [Chaetomium globosum CBS 148.51] gi|88181515|gb|EAQ88983.1| CHGG_05602 [Chaetomium globosum CBS 148.51]
  misc_feature (116)..(1832): NCBI GI: 154320432 Blast Desc: BC1G_01688 [Botryotinia fuckeliana B05.10] gi|150853377|gb|EDN28569.1| BC1G_01688 [Botryotinia fuckeliana B05.10]
  misc_feature (298)..(1828): NCBI GI: 156040663 Blast Desc: SS1G_12348 [Sclerotinia sclerotiorum 1980] gi|154696404|gb|EDN96142.1| SS1G_12348 [Sclerotinia sclerotiorum 1980]
  misc_feature (4)..(1020): NCBI GI: 261358142 Blast Desc: conserved [Verticillium albo-atrum VaMs.102]
  misc_feature (10)..(1831): NCBI GI: 121701369 Blast Desc: nucleoporin (Nup184), [Aspergillus clavatus NRRL 1] gi|119397092|gb|EAW07523.1| nucleoporin (Nup184), [Aspergillus clavatus NRRL 1]
  misc_feature (10)..(1834): NCBI GI: 169763346 Blast Desc: [Aspergillus oryzae RIB40] gi|83770601|dbj|BAE60734.1| protein product [Aspergillus oryzae]
MAEPLSDHIYLPPLEPCLKGDTVILSWALVAAALTDPSGHRQSSQAIVDFLTDPLVQSFFTNPGSPFESSADRSSAHRTAFEKKTAAIHVTPTPNGKYDIGLIKEDVLWLSKNARINELAALRVVVVEHQARPSSQLLGPISTQDVANLRAAAGVASTQSSNVLPGLNLAAARDATDIQADFDKLESRRQRIFHTYLSERRHYAATHDYVFTLMLQQRLPTSPPTDASTAIRTSLLQAYGISPKQPHAPLTDIPTKTSHALIAQYISLLPGLVGNVYTSVESVVEDKSLATQENEDLWCQTSLAEILHRMTIVFQLLDRSGHSFVSHSTAMQWFGLFHDDPTLLNRLRSELADPLQCLVCIISLKMLNLPRMMDFFDGEVDLDTDNEFLANSSTLELVHDTLETAVDQGAVHMAPVLFAWIPIVHAMFSSYQDRAEKRDTIQNQKAIENYDSNTQMVPTGRRRNSAGSITTIDKRRYDDFLINKNLDRDSERVQRLAAALIDQIGVYDVIAALPSYLGPTHRSFFSPLVGSRMRIALLDLLKATHPFVGYKSDPVTALLSVLSGGQAYWDIHGPREVQLDNILTYALNDAFFVEAYIQEALDRFPYEFAPFMTLCRILAGSSNSASGDRDERILNLLQKTPTLTFTLPEHFTDYHLANEDENVNAFQFADDFPLFTPRTSRKRLTAEEEPFIIPAGTYGRFVVDEGKIVRVEYEHSLLALLGKRLEANDSNKYDMPLDIMTNEEITEYISLLAALVRTEALKESDSSAQANGSTEAARAILQEASRALPRTKDIISVVCDTLDVLLDIDADSSVLQVLNACVQFLHAVLPVSPGRVWSYMARCALLEGRSQGGRLARLVGTLDLSEAQFDLLASSIRLFSSLVNSAISSSVQRKTVVKTNHWQPVENVWLGVSDKIIAQITLAISQAAVDYLESSSTWRFSTDVERMTLVRDIVPILDNIIYYSFGMDDIAARTALMSVLQPAAQFVINSFLAPSAGSLRLLPLLAALVKATQEHCSTIYATRSAVFCDQTLAVLTFTTHLVRITNYSDRPSNTVEQQLFKVIPFIARLCARHDAFKGPAIELLESLVISAGKTIGEPPSLLGHLGPHTSRSFLQLVSMLDRPFNQAEQANIIWRFFSTIVRNRQQWMANCLLTGKTPRDARNGNGNASETSSSSILNSALGRLASISTLDGPEALAILDFITSAQNYWPWTIFALQKNVTFLTELRKFIRSMKPCSVVSKMDVLRACNEARIAAYIAEIFAMQLFHLRQIDQASSFARDLTQDLDYYLRDGVRVSGYNRGLHVNFTSNFNQQYPSCSLENFKRTLLEPKCLGEEFYYALGFADKILRFDSSWVGPKNSGFRSEMQKANLNLSLVDAQVSLYHAWEFLLLELSTCLPDNDTLRKQSLQVAQQCLQANQEMEIQRQDQVVFVRLAESRVNLSLMLVQRVADSAPSPGDVAQLLTALWGTVSQYQDPYAPQNISIYRTLLRLLYVTLRALIRSYNHVDFGASVRDSVGNSISAATVSQSILGILDAVVSKGFRIVVSLIHDSDACVSTNDIVIINAILQACLSMPGVDQSQTQILNILATHDTVQAAVSLFSWADKLAEDGDPIYGELSLLFLLELSALPLVAEQLACDGLLNQITSASLAGHLRRPNVSPFADSNGPQRCYSIWAKGIVPILLNVLSALGATIAPEVAYVLNEFPNLMQSSIERLEVPGDTQRRSRLDRAFVTPLSVSEIHSLALITRVLSALRTNNARDIPAVEWDSTTLLENVDWWLDHRKVLRDRLVTLGPREAEWKTMPASDTEKKRGSQSKLEAKVVDQLETVRIALSEQLE

SEQ ID NO: 5624 - DNA, 6067 bp, Muscodor strobelii
  misc_feature: SGI EST ID NO. CUFF.14250.0
  misc_feature: Variant of the nucleotide sequence at SEQ ID NO 5622
ctcgtcccaagtcgcgttgctgctgcacccagcccgtctcagcgccgacagaacagcagcacagcagaaacaacaacaaaaggcacgcgcgcaaacatacatagatcgacgttgcagcatcctcggcgcttcacatgcattgcttgcataaccaagtgcgcattgcccgctgagcctcgcagccatggcagagccgctctccgaccacatctacctgccgccgctggagccgtgtctcaagggcgacaccgtcatcctatcatgggctctcgtcgcggcggcgctcacagacccctcgggccaccgccagtccagccaggccatcgttgacttcctgaccgaccccctcgtccagtccttcttcaccaaccccggctcgcccttcgagtcctccgccgacaggagcagcgcccaccgcaccgccttcgagaagaagacagccgctatccacgtcaccccgaccccgaacggcaagtacgacatcggcctcatcaaggaggatgtgctgtggctgagcaagaatgcccgcatcaacgagctggccgccctgcgcgtcgttgtcgtcgagcaccaggcgcgtccctcgagccagctcctcggccccatatccacacaagatgtcgccaacctgcgcgctgctgccggcgtcgcgagcacccagtcgtccaacgtgctgcccggtctgaacctcgccgccgcccgagacgccaccgacatccaggccgactttgacaagctcgagagcaggcgccagcgcatcttccacacctacctctccgagcgccgccactacgccgccacccacgactacgtcttcaccttgatgctgcagcagaggctccccacctcgccgcctaccgatgcttccaccgcgatacgcacctccctcctgcaagcctatggcatatctcccaagcaaccccatgcgccgctcacagatatccccacgaagacctcccacgccctgatcgcccagtatatcagtcttttgccaggcttggtggggaatgtgtacacatcggtcgagtcggtggtcgaggacaagtcgctggcaactcaagagaacgaagatctgtggtgtcagacttccctggccgagatattgcaccgcatgaccatcgtcttccagctcctcgatcgctccggccactctttcgtctcacactctaccgccatgcagtggtttggcttgtttcacgacgaccctactctgctcaacagactgcgatcggagttagcagatccattgcagtgccttgtctgcataatctctctgaagatgctgaatctgcccaggatgatggacttcttcgacggcgaggttgacctcgacacagacaatgagttcctcgctaattcgagcaccttggagctggtccatgacacgctggagactgcggtggaccaaggggctgtccacatggcaccggttctgtttgcatggatacccattgtccatgccatgttctcgtcctaccaagaccgtgccgagaagcgagacactattcagaaccagaaggctattgagaattacgattcaaacacccagatggtccccaccggccgtaggaggaactcagctggcagcatcactaccattgataagaggcggtatgacgattttctcatcaacaaaaatcttgaccgcgactccgagagggtgcagagactggctgccgccctaatcgaccaaatcggggtgtacgatgtgattgcagcactgccatcgtatctgggtccgacccatcgctcctttttctccccccttgttggatctcggatgagaattgctttactcgacttgctcaaagcgacccatccctttgtcggctataaatccgatccagtcactgcattgttgtctgttctctctggcggtcaggcttactgggatatacatggccctcgcgaagtccagctagataatatattgacttacgcactgaatgacgcttttttcgttgaagcctacattcaagaagccctggaccgtttcccatacgagttcgccccctttatgactctgtgtcgcattctcgctggctcatccaattctgccagcggggatagagacgagcggatactcaatctactacaaaagacaccaacacttactttcactctgccagaacatttcacagactaccacctagccaacgaggacgaaaacgtcaacgccttccagtttgctgacgacttccccttatttactcctcgcacgagccgaaaacgattaacggcggaggaggaacccttcataatacccgcaggaacgtatggacgctttgttgtagacgaaggcaaaattgtgcgcgtggaatatgagcattctctcttagctctgctggggaagcggttggaggcaaatgattccaataaatacgatatgcccctcgacatcatgacgaacgaggagatcacagagtatatctcgttgctcgcagcactcgtgcgcacagaggcactcaaagagtccgactcgagcgctcaagcaaacggctcaacagaggctgcacgtgctatcttgcaagaagctagccgagcgctgcctcgcactaaagatatcatctcggtagtctgcgacacattggatgtgcttcttgacattgacgcggatagctctgtgttacaggtgctgaatgcctgtgttcagtttctccacgcggtcttgccggtctctccagggagggtctggtcttacatggcgagatgtgctctgttggagggccgctcccagggtggacggcttgctcgacttgtcggcactctagacttgtctgaagcccaatttgacctgttggcgtcatctatacgattgttctccagcttggtcaacagcgcgataagcagctcggtccagcgtaagactgtcgtaaagacaaatcattggcagcccgtggaaaatgtctggcttggagtttcggacaaaattatcgcacagatcacgctggccatatcacaagctgctgttgattacctggaaagttcgtctacgtggaggttctctacagatgtggagcgaatgacgcttgttcgcgacattgtgccaatactcgacaatattatatactatagcttcggcatggacgacatagcggccaggaccgctctgatgtctgttctgcaaccagcggctcaatttgtcatcaacagttttcttgctccatctgctggcagccttcgactactgccactcttagctgctctcgtgaaagccactcaggagcactgttcgactatatatgcgacacgttctgcggtcttctgtgatcagactctagcagttttgaccttcacaacccatctagtaaggattaccaactactcggacagaccatcgaacacggttgaacagcaattgttcaaagtaatacccttcattgctcggctctgtgcacgacatgacgcattcaaaggacccgctattgaattattggagtcactggtcatcagtgccggaaagacgataggagaacctccctcgttgttagggcatctcggcccgcatacatcgcgatcgttcctacaactcgtcagtatgcttgatcggccgttcaaccaagccgaacaggccaatatcatctggcgtttcttctctactatcgtgcggaataggcaacagtggatggcaaactgtctgcttactggcaaaactccgcgagacgcccgaaatggcaatgggaacgcatctgagacatcttcaagttccattcttaactcagccctgggaaggttggcatcgatctcgactctcgacggaccggaagctttggcaatcctagacttcatcacatctgctcagaactactggccttggacaatatttgccttgcaaaagaacgtcactttcctcactgaacttaggaaattcatccgcagtatgaagccttgttcggtggtttccaaaatggatgttctgcgtgcgtgcaatgaagcccgaatagcagcctacatcgcggagatctttgccatgcagctttttcatcttcgacaaatagaccaagcaagttcgttcgctagagacctaacacaagatcttgactattacttgcgagatggtgtgagggtatcaggctataatagaggtcttcatgtgaatttcaccagcaacttcaatcagcaatacccaagctgctctcttgagaatttcaagcggacacttctcgagcccaagtgtctcggcgaggagttttactatgctctgggcttcgcggacaagatactccgatttgattcgagttgggttggaccgaagaacagcgggttcaggagcgagatgcaaaaagccaacctgaatctatcattggtagatgcccaagtagtgagacctctgcaacctgcttaatcttcggtttgtatttgctaactcattgcagtccttgtatcacgcttgggaattcttgctccttgagctcagtacttgcctaccggacaacgacacgctcaggaagcagtctctacaggtcgcgcagcaatgcttacaagcgaaccaagaaatggaaatccaaagacaggaccaggttgtgttcgtaagacttgcagagtcacgggtaaatctatcccttatgctggttcaacgagttgcagatagcgccccgtcgcccggcgatgtcgcacagcttctgactgctttatggggaaccgtgagccaataccaagatccttatgcaccgcagaacatctcgatatatcgcacactattgaggctcctttatgtcaccttacgggcattgattcgatcatacaatcacgtggatttcggtgcgtctgtgcgtgacagcgtcggaaacagcatatctgctgctactgtatcccaatctattctcggcattctggacgcggttgtctcaaaaggatttcgcatagtcgtgtctctgatccatgactcagacgcctgtgtttcgaccaatgacatcgtcatcatcaatgctatactacaagcttgtttgtccatgcccggagtggatcaaagtcagacacagattcttaacatcttggccacccatgatacagtacaggccgccgtgtcgctattttcatgggcagataagttagccgaagacggtgatcctatatatggtgaactttcactacttttcctccttgagctgtctgctttaccccttgttgctgagcaattagcctgcgatggtctcctcaatcaaatcacgtcagccagcttggctgggcatctccgacgccctaatgtctcgccctttgcagattcaaatggtccccagcgatgctacagtatttgggccaaaggtatcgtgccgatactgttgaatgttctatccgctctcggtgcaacgatcgctccagaagttgcctacgttctcaatgaatttccaaatttgatgcagtccagcatcgaaagactagaagttcccggggacactcaaagacgcagtcgccttgaccgtgcttttgtaactccactatcagtttcagagatacattctttggcactcattacccgcgtgctgagtgcgctccgcactaataatgcgagagacatcccggcggtggaatgggattctactacgctgttggaaaatgtcgactggtggttagatcaccgaaaggtgttgagggacaggttagtcaccttgggacccagagaggctgaatggaagacgatgcctgcttcggacacggagaagaaaagagggtcacagagcaaacttgaggccaaggtcgtagaccaactagagacggtacggatagcattgagcgagcaattggaatagcttagaccggacaactgcatatacgactgcatatgtataggcggagtcggccattgtaattttaagagaggcgatttggtcggaggaaaaagtactcaagccaagcttggccatattacgacatgttggttccgtggcgcatttggcgtttccccagatctgatgaaggatgagagtctgccagagaacctgcatgatgcacgttctattgcgcgcgagttaggcggaaacccttgccgtgaaatatatatctcaaatcacccaagaataacccaaagagggaattacatcatgcgacccgtacttacatctgcccg

SEQ ID NO: 5625 - DNA, 2313 bp, Muscodor strobelii
  misc_feature: SGI cDNA ID NO. 561595
  misc_feature: Reduced expression when VOC is produced
  misc_feature: Encodes the peptide sequence at SEQ ID NO 5626
atggcgacaaacggtatcatcgaccactcgccgcatcacccggatccctccccgccaatcccgacggcctcgaacctcattctcattgacaactatgattcgttcacctggaatgtataccagtacctagttctagagggtgccaccgtcaccgtctttcggaatgaccagatttccctcgacgatctcatcgccaagaacccgacccagcttgttgtgagccccggtcccggacatcccaccacggactccggcattagtcgcgatgctatccgtcacttcgccggcaagatccctatcttcggcgtttgtatgggccagcaatgcattcttgatgtttatggcggcgatgtagccttcgctggagaaatcctccatggcaagacatcacccttagctcatgactccaaaggtgtatatgctggcatggcccaagatcttcccgtaactcgctatcactcactcgctggcacccacgtcaccgtaccagagagtcttgaggtcacatcttggatacctaaggacgatggttccaaaggcgtcattatgggagtacgtcacaaggaatatgctatcgagggtgtccaatttcacccggagagtatcctatctgaggatggacgtatcatgatcaagaatttcttacgtctgcaaggcggcacctgggctgagaacgaacgagtgcagaaagcaacagaagccagctctctcgctgttggaacgacgaagcctactactgaaacgccgaagaacaacaacattctccagcagatatacgcgcggagaaaggatgctgtcgcagctcagaagctcataccctcacagcgaccttcagatctggaggcagcatatgttctcagcgctgcacctgcccagatccccttcgtacagcgcttgcgacaaagcccgtatgacgtctccctaatggctgagataaaacgaggctcgccgtcaaagggaatatttgccctggatatagatgcgccgagccaagccaagaagtatgccctggcgggcgcaagtgtcatctctgttcttacagagccagattggttcaaagggagcattgaggatctccgagctgtcagacaagtgctaaacggcatgcccaatagacctgcaatcctccggaaagaattcatcttcgaagagtaccaaatcctagaagctcgactagctggcgcagatacagtgcttctcatcgtcaagatgctggatgaagaattgctaacgcgcctttacaattactcacttagtcttggcatggagcctctagtcgaagtccagaacgctgaggaaatggccacagcagtgaagctgggctcaaaagttatcggagtgaacaaccgcaacctcgagtctttcgaagtcgacctcagcacaacaagcagattacgcagcctagtacctaaagagaccataatctgcgccttgagcggcatcaacacatacgatgacgttgtcgcaaaccacaaggatggtgtggacgccgttcttgtaggcgaggctatcatgcgtgccccagatgcatccgagtttatccaacaactctgctccggaaaggtcacatcagccaagaaagacacctcaccccttctcgtaaagatctgtggcactcggactgcagaagcagctaccgcagccgccgaagcaggcgcagatctaatcggcatgattcttgtgccgaatcgcaagcgtacggtttcagacgaggctgctcgcgccatctccgctgcagtacatggtttctcgcgcaccgcgagcacttcgtcagaagctatccccacagatcgcgcatcagatttcttcgcatccgctgcgagtaagctaagtgcgcctgggcggacgcgtcccctccttgtgggagtcttcctcgaccagcccctttcccagatcctggaacttacggcccgctattctctcgacgtcgtacagcttcatgggtccgaacctctcgaatgggctctctccatacccgtccccgtaatgcgacgcttttctcccggtgagcctggacttgcagcgcgtggatatcatgctgcgccgctgttcgactctgggtctgccggcggctcgggacaacttctcgacgctgttgctgtcaaggccgcccttgagcgcgatcatgagttgagaattgtgctagcgggcggtctatcgccggacaatgtcgtagaagttgtgaagaatgttggcgcagacagtgagcgtatcgttggtgttgacgttagcagtggcgtagagggtgaagacggacaacagagtctagaccgtatccgggagttcgttaaggctgctaaggctattcggtag

SEQ ID NO: 5626 - protein, 770 aa, Muscodor strobelii
  misc_feature: SGI Peptide ID NO. 561595
  misc_feature (27)..(217): Pfam Id: PF00117 Pfam Desc: Glutamine amidotransferase class-I
  misc_feature (254)..(517): Pfam Id: PF00218 Pfam Desc: Indole-3-glycerol phosphate synthase
  misc_feature (568)..(765): Pfam Id: PF00697 Pfam Desc: N-(5'phosphoribosyl)anthranilate (PRA) isomerase
  misc_feature (601)..(765): Pfam Id: PF00697 Pfam Desc: N-(5'phosphoribosyl)anthranilate (PRA) isomerase
  misc_feature (534)..(581): Pfam Id: PF00697 Pfam Desc: N-(5'phosphoribosyl)anthranilate (PRA) isomerase
  misc_feature (2)..(770): NCBI GI: 116191771 Blast Desc: CHGG_05603 [Chaetomium globosum CBS 148.51] gi|88181516|gb|EAQ88984.1| CHGG_05603 [Chaetomium globosum CBS 148.51]
  misc_feature (6)..(770): NCBI GI: 171687036 Blast Desc: protein product [Podospora anserina] gi|170943479|emb|CAP69132.1| protein product [Podospora anserina]
  misc_feature (1)..(770): NCBI GI: 85080696 Blast Desc: anthranilate synthase component II [Neurospora crassa OR74A] gi|51704247|sp|P00908.2|TRPG_NEUCR RecName: Full=Anthranilate synthase component 2; AltName: synthase II; II
  misc_feature (1)..(770): NCBI GI: 39977045 Blast Desc: MGG_06425 [Magnaporthe grisea 70-15] gi|145016160|gb|EDK00650.1| MGG_06425 [Magnaporthe grisea 70-15]
  misc_feature (1)..(770): NCBI GI: 256729689 Blast Desc: [Nectria haematococca mpVI 77-13-4]
  misc_feature (1)..(770): NCBI GI: 46122327 Blast Desc: FG05541.1 [Gibberella zeae PH-1]
  misc_feature (1)..(770): NCBI GI: 154320428 Blast Desc: BC1G_01686 [Botryotinia fuckeliana B05.10] gi|150853375|gb|EDN28567.1| BC1G_01686 [Botryotinia fuckeliana B05.10]
  misc_feature (20)..(768): NCBI GI: 261358143 Blast Desc: anthranilate synthase component 2 [Verticillium albo-atrum VaMs.102]
  misc_feature (1)..(770): NCBI GI: 156040661 Blast Desc: anthranilate synthase [Sclerotinia sclerotiorum 1980] gi|154696403|gb|EDN96141.1| anthranilate synthase [Sclerotinia sclerotiorum 1980]
  misc_feature (1)..(770): NCBI GI: 29123601 Blast Desc: trifunctional tryptophan biosynthesis enzyme [Metarhizium anisopliae]
  misc_feature (22)..(770): SWISSPROT Homolog: EC 4.1.3.27 Anthranilate synthase
  misc_feature (22)..(770): SWISSPROT Homolog: EC 4.1.1.48 Indole-3-glycerol-phosphate synthase
  misc_feature (22)..(770): SWISSPROT Homolog: EC 5.3.1.24 Phosphoribosylanthranilate isomerase
  misc_feature: Useful for introducing or modulating the production of volatile compounds
MATNGIIDHSPHHPDPSPPIPTASNLILIDNYDSFTWNVYQYLVLEGATVTVFRNDQISLDDLIAKNPTQLVVSPGPGHPTTDSGISRDAIRHFAGKIPIFGVCMGQQCILDVYGGDVAFAGEILHGKTSPLAHDSKGVYAGMAQDLPVTRYHSLAGTHVTVPESLEVTSWIPKDDGSKGVIMGVRHKEYAIEGVQFHPESILSEDGRIMIKNFLRLQGGTWAENERVQKATEASSLAVGTTKPTTETPKNNNILQQIYARRKDAVAAQKLIPSQRPSDLEAAYVLSAAPAQIPFVQRLRQSPYDVSLMAEIKRGSPSKGIFALDIDAPSQAKKYALAGASVISVLTEPDWFKGSIEDLRAVRQVLNGMPNRPAILRKEFIFEEYQILEARLAGADTVLLIVKMLDEELLTRLYNYSLSLGMEPLVEVQNAEEMATAVKLGSKVIGVNNRNLESFEVDLSTTSRLRSLVPKETIICALSGINTYDDVVANHKDGVDAVLVGEAIMRAPDASEFIQQLCSGKVTSAKKDTSPLLVKICGTRTAEAATAAAEAGADLIGMILVPNRKRTVSDEAARAISAAVHGFSRTASTSSEAIPTDRASDFFASAASKLSAPGRTRPLLVGVFLDQPLSQILELTARYSLDVVQLHGSEPLEWALSIPVPVMRRFSPGEPGLAARGYHAAPLFDSGSAGGSGQLLDAVAVKAALERDHELRIVLAGGLSPDNVVEVVKNVGADSERIVGVDVSSGVEGEDGQQSLDRIREFVKAAKAIR

SEQ ID NO: 5627 - DNA, 2799 bp, Muscodor strobelii
  misc_feature: SGI EST ID NO. CUFF.14218.0
  misc_feature: Variant of the nucleotide sequence at SEQ ID NO 5625
ggctgtacctggagctaacctacgactcaccgcccggacactgcccaaatcgccgtcagattctgcctccgacatcgactatagcgattactatagcgattccctgtaccggtagcagacacttgcacttgccacggattccgatactaccacatcagcgctacgctgcaactcctcggagcactctaaagttggaggactttctgtatttaagacccattgtcgcagttatatctttcatactcgagcttgtacagtttcgacgatccgccatagcttgaacctcgtcagactttttttgtctcgtttccctctgctactaacacgccgctgcataaagtgggggtaagtcatggcgacaaacggtatcatcgaccactcgccgcatcacccggatccctccccgccaatcccgacggcctcgaacctcattctcattgacaactatgattcgttcacctggaatgtataccagtacctagttctagagggtgccaccgtcaccgtctttcggaatgaccagatttccctcgacgatctcatcgccaagaacccgacccagcttgttgtgagccccggtcccggacatcccaccacggactccggcattagtcgcgatgctatccgtcacttcgccggcaagatccctatcttcggcgtttgtatgggccagcaatgcattcttgatgtttatggcggcgatgtagccttcgctggagaaatcctccatggcaagacatcacccttagctcatgactccaaaggtgtatatgctggcatggcccaagatcttcccgtaactcgctatcactcactcgctggcacccacgtcaccgtaccagagagtcttgaggtcacatcttggatacctaaggacgatggttccaaaggcgtcattatgggagtacgtcacaaggaatatgctatcgagggtgtccaatttcacccggagagtatcctatctgaggatggacgtatcatgatcaagaatttcttacgtctgcaaggcggcacctgggctgagaacgaacgagtgcagaaagcaacagaagccagctctctcgctgttggaacgacgaagcctactactgaaacgccgaagaacaacaacattctccagcagatatacgcgcggagaaaggatgctgtcgcagctcagaagctcataccctcacagcgaccttcagatctggaggcagcatatgttctcagcgctgcacctgcccagatccccttcgtacagcgcttgcgacaaagcccgtatgacgtctccctaatggctgagataaaacgaggctcgccgtcaaagggaatatttgccctggatatagatgcgccgagccaagccaagaagtatgccctggcgggcgcaagtgtcatctctgttcttacagagccagattggttcaaagggagcattgaggatctccgagctgtcagacaagtgctaaacggcatgcccaatagacctgcaatcctccggaaagaattcatcttcgaagagtaccaaatcctagaagctcgactagctggcgcagatacagtgcttctcatcgtcaagatgctggatgaagaattgctaacgcgcctttacaattactcacttagtcttggcatggagcctctagtcgaagtccagaacgctgaggaaatggccacagcagtgaagctgggctcaaaagttatcggagtgaacaaccgcaacctcgagtctttcgaagtcgacctcagcacaacaagcagattacgcagcctagtacctaaagagaccataatctgcgccttgagcggcatcaacacatacgatgacgttgtcgcaaaccacaaggatggtgtggacgccgttcttgtaggcgaggctatcatgcgtgccccagatgcatccgagtttatccaacaactctgctccggaaaggtcacatcagccaagaaagacacctcaccccttctcgtaaagatctgtggcactcggactgcagaagcagctaccgcagccgccgaagcaggcgcagatctaatcggcatgattcttgtgccgaatcgcaagcgtacggtttcagacgaggctgctcgcgccatctccgctgcagtacatggtttctcgcgcaccgcgagcacttcgtcagaagctatccccacagatcgcgcatcagatttcttcgcatccgctgcgagtaagctaagtgcgcctgggcggacgcgtcccctccttgtgggagtcttcctcgaccagcccctttcccagatcctggaacttacggcccgctattctctcgacgtcgtacagcttcatgggtccgaacctctcgaatgggctctctccatacccgtccccgtaatgcgacgcttttctcccggtgagcctggacttgcagcgcgtggatatcatgctgcgccgctgttcgactctgggtctgccggcggctcgggacaacttctcgacgctgttgctgtcaaggccgcccttgagcgcgatcatgagttgagaattgtgctagcgggcggtctatcgccggacaatgtcgtagaagttgtgaagaatgttggcgcagacagtgagcgtatcgttggtgttgacgttagcagtggcgtagagggtgaagacggacaacagagtctagaccgtatccgggagttcgttaaggctgctaaggctattcggtagctgagccttgaattagaatcacaagagacagcgcgggagttttgtaagacaaaatttaggaaatccatttacgtacctataaactcagctttggctctagaacattacatcgaatgcaatgatttcaatacatc

SEQ ID NO: 5628 - DNA, 1779 bp, Muscodor strobelii
  misc_feature: SGI cDNA ID NO. 561596
  misc_feature: Encodes the peptide sequence at SEQ ID NO 5629
atgtcgtcaaaaaagaaaaagagccagacaaagctccactttgagcctgtgtcatcgcctgcagcgtcgagctctccggctcacgcttcgagctactcacctgccaaagtgagattctccaaagctggtggtcagcggcagcctagaagcagcccgtcctcctccaaacgaactccgcgccgttctcagtcaaagggacagaaacaaagtagactggagaatgtgattgcaactccacctgctagctttatgcccaatctgcatagctcaacgcagcgtcccgtgacaattgactcatcagatgagtcggctgccgagtcttccggtgtaggtgaagatgaggcggatgatattaattctctaccacctaaaaaatccgccattgtgaaacaggtagaagcgccgttcgactcggacgattcggatgatgagccaatcgtaagaaatccacgatcgtcccagtcggtctcaaccatattacggaagacacaactccaagaagaggatgaagacgaggaagatgagccggtcataccaacctcctcgcgtaagcgacaacgtcctaccatgattgaacttgatgattcggactcggatggcgataagcctgttgtcgcttcctcgccaatcaagagaagaaggattttgcataagtcctctccagtcaagaaggcccggcacaaggggcatagatctgagaaagagaagacaaaggagcttctacagagacgacgagctggtgaaaaaattgaccgacttacatcatccgaatcatcttcagatgatggagagagacgtggtatctacgactctaattctgaagacgacttgggagcactcaaggagttcgacgacgaagaggaggaggaagaacccgaagaaacggtagtatcacgcaaagccgagaagccgaaacctaaaaaggacaaacagaaggctctcattgacgatgacagtgactcttttgttaccgacgacgatgatgccccgcttggtgcgcctgtggatattcctcttgagttcacggctcaagctcataagccactcaaggaacaattcccacacgtcgttgaatggttggttcacaacaaaatcaacccagcttttgagaggaaagatgctatttacaccaatgcgtggcgtaaactcaatgatgagtttcaaggacttgcaagttctaagttcacatcagcagcctggaggattgacttcgctcgtgctctgaagtatcgtcccaaacttgaggcatacgaaaccaggggtacacagatatttccagagaactgcgaagcgtgtggccgaagtggacatcctgctacctggttgattgaactgacaggtacaccataccacaaagataccctacaagatgttgagtcagatgacgacgataagagcgacgttgatgacggagatgcagacgacaatgcatctgtcgatactcagggaatgccgctacctccaaagggcaagaagtggaacgtaggtgcagtttgctgcagcaatgcggagactgcgcacaacttaactcattggaagcatgcattaatggaatgggtcgatcaacgcctaaacgatgacggctggaactcagaccagaaagtgacgcagcgcgaaaaaatgaagcccaaacgccgccgcgagcttgcaaatggtatcgtcgatagttggagtgagaggggcatagtagctgcgctctacggcgacttcaagaaaactcttgaagacgctcgcaataaaggcactactggacgaacaatgaggggaagatttcgctag

SEQ ID NO: 5629 - protein, 592 aa, Muscodor strobelii
  misc_feature: SGI Peptide ID NO. 561596
  misc_feature (178)..(590): NCBI GI: 145602089 Blast Desc: MGG_05198 [Magnaporthe grisea 70-15] gi|145010534|gb|EDJ95190.1| MGG_05198 [Magnaporthe grisea 70-15]
  misc_feature (161)..(585): NCBI GI: 116207658 Blast Desc: CHGG_03122 [Chaetomium globosum CBS 148.51] gi|88183719|gb|EAQ91187.1| CHGG_03122 [Chaetomium globosum CBS 148.51]
  misc_feature (169)..(559): NCBI GI: 171686200 Blast Desc: protein product [Podospora anserina] gi|170943061|emb|CAP68714.1| protein product [Podospora anserina]
  misc_feature (5)..(585): NCBI GI: 154323035 Blast Desc: BC1G_00860 [Botryotinia fuckeliana B05.10] gi|150848194|gb|EDN23387.1| BC1G_00860 [Botryotinia fuckeliana B05.10]
  misc_feature (138)..(585): NCBI GI: 156064569 Blast Desc: SS1G_00292 [Sclerotinia sclerotiorum 1980] gi|154691154|gb|EDN90892.1| SS1G_00292 [Sclerotinia sclerotiorum 1980]
  misc_feature (67)..(580): NCBI GI: 258570001 Blast Desc: [Uncinocarpus reesii 1704] gi|237904074|gb|EEP78475.1| [Uncinocarpus reesii 1704]
  misc_feature (171)..(578): NCBI GI: 115491685 Blast Desc: conserved [Aspergillus terreus NIH2624] gi|114197330|gb|EAU39030.1| conserved [Aspergillus terreus NIH2624]
  misc_feature (7)..(581): NCBI GI: 119174168 Blast Desc: CIMG_09066 [Coccidioides immitis RS]
  misc_feature (7)..(581): NCBI GI: 240106717 Blast Desc: CPC735_015020 [Coccidioides posadasii C735 delta SOWgp]
  misc_feature (315)..(578): NCBI GI: 261193190 Blast Desc: conserved [Ajellomyces dermatitidis SLH14081] gi|239589136|gb|EEQ71779.1| conserved [Ajellomyces dermatitidis SLH14081]
MSSKKKKSQTKLHFEPVSSPAASSSPAHASSYSPAKVRFSKAGGQRQPRSSPSSSKRTPRRSQSKGQKQSRLENVIATPPASFMPNLHSSTQRPVTIDSSDESAAESSGVGEDEADDINSLPPKKSAIVKQVEAPFDSDDSDDEPIVRNPRSSQSVSTILRKTQLQEEDEDEEDEPVIPTSSRKRQRPTMIELDDSDSDGDKPVVASSPIKRRRILHKSSPVKKARHKGHRSEKEKTKELLQRRRAGEKIDRLTSSESSSDDGERRGIYDSNSEDDLGALKEFDDEEEEEEPEETVVSRKAEKPKPKKDKQKALIDDDSDSFVTDDDDAPLGAPVDIPLEFTAQAHKPLKEQFPHVVEWLVHNKINPAFERKDAIYTNAWRKLNDEFQGLASSKFTSAAWRIDFARALKYRPKLEAYETRGTQIFPENCEACGRSGHPATWLIELTGTPYHKDTLQDVESDDDDKSDVDDGDADDNASVDTQGMPLPPKGKKWNVGAVCCSNAETAHNLTHWKHALMEWVDQRLNDDGWNSDQKVTQREKMKPKRRRELANGIVDSWSERGIVAALYGDFKKTLEDARNKGTTGRTMRGRFR

SEQ ID NO: 5630 - DNA, 2718 bp, Muscodor strobelii
  misc_feature: SGI EST ID NO. CUFF.14226.0
  misc_feature: Variant of the nucleotide sequence at SEQ ID NO 5628
gccgaataaggtcacgtgatgccgcgcctgtggggtctagcactttccatttccgtccaggatgcgtgacgcgacgggtacctaaaggtctgacagctccaaagatctcaactttcaatttcggggctgatttttctttacccctcgctctcgttattctttactagcatataccaattagcaaagctccagggaactcctctttccttcgcttgatctaccattccccctttcgccggttacctggctacttctccgcaagagtgttgagttccaccacctctacactcggcacctttccgcgtttggcggggcactcagacccgatccacgagctgccgttcaacaacccggatattttcagattcagctataacgtggcaatcttgcggcaagtacttccagttagttggcccgcaatcattagcagctccatctcggagcatgtcttttcttgccgaccatgtcgtcaaaaaagaaaaagagccagacaaagctccactttgagcctgtgtcatcgcctgcagcgtcgagctctccggctcacgcttcgagctactcacctgccaaagtgagattctccaaagctggtggtcagcggcagcctagaagcagcccgtcctcctccaaacgaactccgcgccgttctcagtcaaagggacagaaacaaagtagactggagaatgtgattgcaactccacctgctagctttatgcccaatctgcatagctcaacgcagcgtcccgtgacaattgactcatcagatgagtcggctgccgagtcttccggtgtaggtgaagatgaggcggatgatattaattctctaccacctaaaaaatccgccattgtgaaacaggtagaagcgccgttcgactcggacgattcggatgatgagccaatcgtaagaaatccacgatcgtcccagtcggtctcaaccatattacggaagacacaactccaagaagaggatgaagacgaggaagatgagccggtcataccaacctcctcgcgtaagcgacaacgtcctaccatgattgaacttgatgattcggactcggatggcgataagcctgttgtcgcttcctcgccaatcaagagaagaaggattttgcataagtcctctccagtcaagaaggcccggcacaaggggcatagatctgagaaagagaagacaaaggagcttctacagagacgacgagctggtgaaaaaattgaccgacttacatcatccgaatcatcttcagatgatggagagagacgtggtatctacgactctaattctgaagacgacttgggagcactcaaggagttcgacgacgaagaggaggaggaagaacccgaagaaacggtagtatcacgcaaagccgagaagccgaaacctaaaaaggacaaacagaaggctctcattgacgatgacagtgactcttttgttaccgacgacgatgatgccccgcttggtgcgcctgtggatattcctcttgagttcacggctcaagctcataagccactcaaggaacaattcccacacgtcgttgaatggttggttcacaacaaaatcaacccagcttttgagaggaaagatgctatttacaccaatgcgtggcgtaaactcaatgatgagtttcaaggacttgcaagttctaagttcacatcagcagcctggaggattgacttcgctcgtgctctgaagtatcgtcccaaacttgaggcatacgaaaccaggggtacacagatatttccagagaactgcgaagcgtgtggccgaagtggacatcctgctacctggttgattgaactgacaggtacaccataccacaaagataccctacaagatgttgagtcagatgacgacgataagagcgacgttgatgacggagatgcagacgacaatgcatctgtcgatactcagggaatgccgctacctccaaagggcaagaagtggaacgtaggtgcagtttgctgcagcaatgcggagactgcgcacaacttaactcattggaagcatgcattaatggaatgggtcgatcaacgcctaaacgatgacggctggaactcagaccagaaagtgacgcagcgcgaaaaaatgaagcccaaacgccgccgcgagcttgcaaatggtatcgtcgatagttggagtgagaggggcatagtagctgcgctctacggcgacttcaagaaaactcttgaagacgctcgcaataaaggcactactggacgaacaatgaggggaagatttcgctagatggaggactctctccgtcgctatcttgcgattaaggtttcacaggaggatacttgtaagagacgagattatggatatacgagattagaccatcattgccggctggtctgcagtgtgtgattctatgtcggaatgaaatgttagaatagtcagagaggaaggatgaaggttgaggttccaagcaattgagaaatcgaggggctcgaatttcttaggtgtactagggatataatagctggtcaactccgcggagcgagcaagacatgctaattgatggcagagaggcgtgtgttcctgtacaagtagctactagacgacaggaataacctgacagcagttgcaaatgaattcttacctgtttgcggagagaaaacgctccaacccgccttgcgtacatgtattgagcaatcaaatgccatagccattgcccattcaggtcattgcctagctcatgcactgcagaaagcgttcatcta

SEQ ID NO: 5631 - DNA, 744 bp, Muscodor strobelii
  misc_feature: SGI cDNA ID NO. 561597
  misc_feature: Encodes the peptide sequence at SEQ ID NO 5632
atgagctccaccgacgccaccgagcccaaggtcgaggagaccaaggcccccgaggccgagaccaagcctgtcgcttcatcctccgtcttctctatgtttggcggaggcgcgaagaaagagaagaaggacgaagacgaggaccgcggcgatgtctccggcagtgccaaagcccagcgcgatgccgctgccgctgccgccaagggcgatgaggacgaagcccccgagtccgaggatgtccatttcgagcccgtccacaggcttaccgagcaagtcgagactgtcaccaacgaggaggccgagaatgaggagtactctggccgctgcaagatgttcagattcgtccaggagacccgtgagtggaaggagcgcggtgtcggccctctccgtctcctcaagcacaaggagaacggcaagattcgtctcgtgatgcgacgtgagaagaccctcaaggtttgcgccaaccactacatcacccccgagatgaacatcgcccccatggccacgagcgacaaagcttggttgtggaacgttgctgctgatgtcagcgagggcgagcccgaggctttgaccgtcgccgttcgtttcggcaatgttgatgatgccaaagacttcaaggagaagtggctcaaggcccagaaggagaacgaggttctgtttggccaggcagagcaagaggaagaggctgccgcagagcccaaggctgaggaggaggagaagaaggaggagcccgctgccgcttcgtaa

SEQ ID NO: 5632 - protein, 247 aa, Muscodor strobelii
  misc_feature: SGI Peptide ID NO. 561597
  misc_feature (92)..(214): Pfam Id: PF00638 Pfam Desc: RanBP1 domain
  misc_feature (1)..(226): NCBI GI: 46116530 Blast Desc: FG04107.1 [Gibberella zeae PH-1]
  misc_feature (11)..(219): NCBI GI: 116207648 Blast Desc: CHGG_03117 [Chaetomium globosum CBS 148.51] gi|88183714|gb|EAQ91182.1| CHGG_03117 [Chaetomium globosum CBS 148.51]
  misc_feature (1)..(236): NCBI GI: 261359288 Blast Desc: ran-specific GTPase-activating protein [Verticillium albo-atrum VaMs.102]
  misc_feature (8)..(224): NCBI GI: 256725730 Blast Desc: NECHADRAFT_19018 [Nectria haematococca mpVI 77-13-4]
  misc_feature (1)..(222): NCBI GI: 39940074 Blast Desc: ran/spi1 binding protein [Magnaporthe grisea 70-15] gi|145010528|gb|EDJ95184.1| ran/spi1 binding protein [Magnaporthe grisea 70-15]
  misc_feature (26)..(219): NCBI GI: 154305201 Blast Desc: BC1G_08895 [Botryotinia fuckeliana B05.10] gi|150853637|gb|EDN28829.1| BC1G_08895 [Botryotinia fuckeliana B05.10]
  misc_feature (16)..(218): NCBI GI: 171686150 Blast Desc: protein product [Podospora anserina] gi|170943036|emb|CAP68689.1| protein product [Podospora anserina]
  misc_feature (25)..(220): NCBI GI: 145254588 Blast Desc: An18g02140 [Aspergillus niger] gi|134084254|emb|CAK47286.1| protein product [Aspergillus niger]
  misc_feature (26)..(219): NCBI GI: 121713794 Blast Desc: Ran-specific GTPase-activating protein 1, [Aspergillus clavatus NRRL 1] gi|119402661|gb|EAW13082.1| Ran-specific GTPase-activating protein 1, [Aspergillus clavatus NRRL 1]
  misc_feature (26)..(219): NCBI GI: 156040932 Blast Desc: SS1G_11444 [Sclerotinia sclerotiorum 1980] gi|154695828|gb|EDN95566.1| SS1G_11444 [Sclerotinia sclerotiorum 1980]
MSSTDATEPKVEETKAPEAETKPVASSSVFSMFGGGAKKEKKDEDEDRGDVSGSAKAQRDAAAAAAKGDEDEAPESEDVHFEPVHRLTEQVETVTNEEAENEEYSGRCKMFRFVQETREWKERGVGPLRLLKHKENGKIRLVMRREKTLKVCANHYITPEMNIAPMATSDKAWLWNVAADVSEGEPEALTVAVRFGNVDDAKDFKEKWLKAQKENEVLFGQAEQEEEAAAEPKAEEEEKKEEPAAAS

SEQ ID NO: 5633 - DNA, 1418 bp, Muscodor strobelii
  misc_feature: SGI EST ID NO. CUFF.14455.1
  misc_feature: Variant of the nucleotide sequence at SEQ ID NO 5631
gagagaggggcaacccaaacagagcccacctttctcccccctcctcgtttgcagggcgccttctccctaccttcagattccacccccaacccatcacctcaagcttttgtgcatcgcaggaattgcgccagactatcaggctgccatttcgtcgcccaagaaagatttccaccaatatcacctagctcaccatcatcgtccatatccctgttgccaacatgagctccaccgacgccaccgagcccaaggtcgaggagaccaaggcccccgaggccgagaccaagcctgtcgcttcatcctccgtcttctctatgtttggcggaggcgcgaagaaagagaagaaggacgaagacgaggaccgcggcgatgtctccggcagtgccaaagcccagcgcgatgccgctgccgctgccgccaagggcgatgaggacgaagcccccgagtccgaggatgtccatttcgagcccgtccacaggcttaccgagcaagtcgagactgtcaccaacgaggaggccgagaatgaggagtactctggccgctgcaagatgttcagattcgtccaggagacccgtgagtggaaggagcgcggtgtcggccctctccgtctcctcaagcacaaggagaacggcaagattcgtctcgtgatgcgacgtgagaagaccctcaaggtttgcgccaaccactacatcacccccgagatgaacatcgcccccatggccacgagcgacaaagcttggttgtggaacgttgctgctgatgtcagcgagggcgagcccgaggctttgaccgtcgccgttcgtttcggcaatgttgatgatgccaaagacttcaaggagaagtggctcaaggcccagaaggagaacgaggttctgtttggccaggcagagcaagaggaagaggctgccgcagagcccaaggctgaggaggaggagaagaaggaggagcccgctgccgcttcgtaaatcccatctgccttggagaggaatctatttcagtcgtctcggccgagctccggaagaatcatgcatcgcgccttagacaaaccccccgccacacttcactgtcaatgccctcgttcctgccgaattcaccgaagcagcctatagatgggcaataccgtcatggacggtccatcgcatgcgatggattatgacactgtaggaagcccccgtgttagccctcccgaaagggttgaggcacccccagtcacgacatcttgtcccccgcatcacatatcacagcaactgcacccgatcacacccatatgccttgagcgtcttagataggaaaatagatccgtgataccaaccattatttgctggtagtgtctgatgatcctcatacttttacagggcaatgcggcttacaccagaattgtgtcatctggaccgtgctttttcctacttcacgggttttct

SEQ ID NO: 5634 - DNA, 1611 bp, Muscodor strobelii
  misc_feature: SGI cDNA ID NO. 561598
  misc_feature: Encodes the peptide sequence at SEQ ID NO 5635
atggtgtactgtggaaaagcttcacagggttgccagagctgccgcacgcgcagaatcaagtgtgacaaaaaactaccagaatgttctcaatgtattcgagtaggaaagaaatgccccgggtatcgggatcaactttccctaatgtttcgggatgagagcagtaaggtcattcagaaagcgcatgcgcaatgggggaacccagagtcaccagtcgacgaaagccaaaatccgaccacgccgcctgaagaacctgtgtggatgatacattcaacttcgtcgaatcgtgttcgaggatcaacatcgacaagcccctctacatcggctgagctggtaaagataccgcggagggttgaacccaaccttgaccagcgtggccttcagttctacatggaacgatacctattgaaccatccagattcaccagacgtacttgagctcaaagacaaattccttggcgaaggggatgcgatccagaacatcatggttgcagttggtctggccggcatgtcaaacttattaggcaataagagtatgagtttagttgcccggtctaagtatgtcacggcgctcaaacaaacggggcagttgattggtagcgcaacacgtggtcatgcatcagtctccaagccattattgtctatcgtgacgctcgctctctttgaggtcgtccaaggtaaaggatcggtgctcacggctagttccgccaacacccacattaatggtgccgttgccctgctccggtctctattgcctataccgaatgcgccgtatggtggtgctcgcggcctgataccatcgcaaatgaccaacacgcctctatctcccggctatttcgagtgtctgaaagtctgcaaacaattgcttgtaggctctccagaccagtgcattgtagacatatgtaccgcaattgctcgtctcatgcacttacttcttcccgttgatgaagccgcttttgtcgatgatcaacccgcgacagagacccgtattcagcaatttctaacagtcgaaagtgcatttgaccgcttagatgacgtgctacgacaagcttatccgttttctgaacataggatcgaaggttcgtcaccagctgtctttcagggaaggtggcacaagcacagtgaaatttggcgcgctcgcgtctggaatcacttccgttgggctcgtcttctcctccttggcaaggttgtcgagttcttaagcaaatatcctcgctcgagtgctcgatttatcacgacaccgcataaagctagatgctacgacgtcatacaaaagacagcagaagatatactcattagcgtgccctcacattggcatcatcctgcgctcgacgacgcaacagcaaagaaactagcagcaccgggccaaggtgggactggagccgcgggactacctagcctcctgtggcatctcgtcatcgcaggcaatgctccgaacgtacacccggatgtgtgggagtttgctcacaacattctggaagttgtgtggaaggatatgggtatgttgcatgctgttgctcttgcagaggtgatggaagatcatcgtaccaagctgcagaaagaggccatgagtttgccagtcctctatggaaacatgggaatcaagacgacgtga

SEQ ID NO: 5635 - protein, 536 aa, Muscodor strobelii
  misc_feature: SGI Peptide ID NO. 561598
  misc_feature (9)..(48): Pfam Id: PF00172 Pfam Desc: Fungal Zn(2)-Cys(6) binuclear cluster domain
  misc_feature (1)..(518): NCBI GI: 256729762 Blast Desc: NECHADRAFT_62954 [Nectria haematococca mpVI 77-13-4]
  misc_feature (1)..(519): NCBI GI: 261358444 Blast Desc: conserved [Verticillium albo-atrum VaMs.102]
  misc_feature (1)..(524): NCBI GI: 145614504 Blast Desc: MGG_04665 [Magnaporthe grisea 70-15] gi|145021415|gb|EDK05544.1| MGG_04665 [Magnaporthe grisea 70-15]
  misc_feature (42)..(510): NCBI GI: 164423965 Blast Desc: NCU07575 [Neurospora crassa OR74A] gi|157070308|gb|EAA29033.2| [Neurospora crassa OR74A]
  misc_feature (1)..(507): NCBI GI: 116207796 Blast Desc: CHGG_03191 [Chaetomium globosum CBS 148.51] gi|88183788|gb|EAQ91256.1| CHGG_03191 [Chaetomium globosum CBS 148.51]
  misc_feature (112)..(510): NCBI GI: 171686252 Blast Desc: protein product [Podospora anserina] gi|170943087|emb|CAP68740.1| protein product [Podospora anserina]
  misc_feature (1)..(511): NCBI GI: 154321385 Blast Desc: BC1G_01567 [Botryotinia fuckeliana B05.10] gi|150852105|gb|EDN27297.1| BC1G_01567 [Botryotinia fuckeliana B05.10]
  misc_feature (1)..(512): NCBI GI: 240108679 Blast Desc: Fungal Zn binuclear cluster domain containing protein [Coccidioides posadasii C735 delta SOWgp]
  misc_feature (1)..(510): NCBI GI: 255930461 Blast Desc: Pc06g01850 [Penicillium chrysogenum Wisconsin 54-1255] gi|211581403|emb|CAP79178.1| Pc06g01850 [Penicillium chrysogenum Wisconsin 54-1255]
  misc_feature (1)..(510): NCBI GI: 238837485 Blast Desc: ferulic acid esterase [Microsporum canis CBS 113480]
MVYCGKASQGCQSCRTRRIKCDKKLPECSQCIRVGKKCPGYRDQLSLMFRDESSKVIQKAHAQWGNPESPVDESQNPTTPPEEPVWMIHSTSSNRVRGSTSTSPSTSAELVKIPRRVEPNLDQRGLQFYMERYLLNHPDSPDVLELKDKFLGEGDAIQNIMVAVGLAGMSNLLGNKSMSLVARSKYVTALKQTGQLIGSATRGHASVSKPLLSIVTLALFEVVQGKGSVLTASSANTHINGAVALLRSLLPIPNAPYGGARGLIPSQMTNTPLSPGYFECLKVCKQLLVGSPDQCIVDICTAIARLMHLLLPVDEAAFVDDQPATETRIQQFLTVESAFDRLDDVLRQAYPFSEHRIEGSSPAVFQGRWHKHSEIWRARVWNHFRWARLLLLGKVVEFLSKYPRSSARFITTPHKARCYDVIQKTAEDILISVPSHWHHPALDDATAKKLAAPGQGGTGAAGLPSLLWHLVIAGNAPNVHPDVWEFAHNILEVVWKDMGMLHAVALAEVMEDHRTKLQKEAMSLPVLYGNMGIKTT

SEQ ID NO: 5636 - DNA, 1766 bp, Muscodor strobelii
  misc_feature: SGI EST ID NO. CUFF.14232.0
  misc_feature: Variant of the nucleotide sequence at SEQ ID NO 5634
gtttcgggatgagagcagtaaggtcattcagaaagcgcatgcgcaatgggggaacccagagtcaccagtcgacgaaagccaaaatccgaccacgccgcctgaagaacctgtgtggatgatacattcaacttcgtcgaatcgtgttcgaggatcaacatcgacaagcccctctacatcggctgagctggtaaagataccgcggagggttgaacccaaccttgaccagcgtggccttcagttctacatggaacgatacctattgaaccatccagattcaccagacgtacttgagctcaaagacaaattccttggcgaaggggatgcgatccagaacatcatggttgcagttggtctggccggcatgtcaaacttattaggcaataagagtatgagtttagttgcccggtctaagtatgtcacggcgctcaaacaaacggggcagttgattggtagcgcaacacgtggtcatgcatcagtctccaagccattattgtctatcgtgacgctcgctctctttgaggtcgtccaaggtaaaggatcggtgctcacggctagttccgccaacacccacattaatgctgataccatcgcaaatgaccaacacgcctctatctcccggctatttcgagtgtctgaaagtctgcaaacaattgcttgtaggctctccagaccagtgcattgtagacatatgtaccgcaattgctcgtctcatgcacttacttcttcccgttgatgaagccgcttttgtcgatgatcaacccgcgacagagacccgtattcagcaatttctaacagtcgaaagtgcatttgaccgcttagatgacgtgctacgacaagcttatccgttttctgaacataggatcgaaggttcgtcaccagctgtctttcagggaaggtggcacaagcacagtgaaatttggcgcgctcgcgtctggaatcacttccgttgggctcgtcttctcctccttggcaaggttgtcgagttcttaagcaaatatcctcgctcgagtgctcgatttatcacgacaccgcataaagctagatgctacgacgtcatacaaaagacagcagaagatatactcattagcgtgccctcacattggcatcatcctgcgctcgacgacgcaacagcaaagaaactagcagcaccgggccaaggtgggactggagccgcgggactacctagcctcctgtggcatctcgtcatcgcaggcaatgctccgaacgtacacccggatgtgtgggagtttgctcacaacattctggaagttgtgtggaaggatatgggtatgttgcatgctgttgctcttgcagaggtgatggaagatcatcgtaccaagctgcagaaagaggccatgagtttgccagtcctctatggaaacatgggaatcaagacgacgtgaccccatcagctatatgagagacatggcgttcggagttagacgactttatggcactcggcatgctggcgttcaaaatggcatcagacggcgtaagaaaaggcagaggtaggggcaaaggcaagaggcgtagattctttgattttctcctgctattgcgaggatataccccgaagatagggcttaggagttgttgttgttctgtattactaggagaggaagttcaagtgtatggagtaggggtttcacggtgtcaaaatatagaccatcattttaagatgtgtaaatactaacccgatagcctttatatctgaggacatagccgcttctagtagtggaccgttgacctagtacctatgaaatccg

SEQ ID NO: 5637 - DNA, 477 bp, Muscodor strobelii
  misc_feature: SGI cDNA ID NO. 561599
  misc_feature: Encodes the peptide sequence at SEQ ID NO 5638
atgcagaaacctgtgtccgatgaagatgcctcgccgccaacatcagacggggaggatcccctcgagatcgaccaagatgctgtccacgaaataattcagccagctcttagtcctttggcgacgagacttaccctacccaaaacgcctgcggccgaaaaggctgccgcaatggattacttccccggcggtgggttgttcagtgttatggaagatactccccaaccgagttcttcactaccacccaagcagactgccgtattgcaaacgccgtcaaatcggacacgccctcgggggcttacgctgggttcattatcaaacctcccttatgtaaatcgattaccgtcaccgtggcagtcagaaccgccaacaccgttcgtcatccggaggacaagataccttaaagaggatacgcgaagccctgcccgctttgccaaccatttcgctgccttcgattttttcagggccggcttcggctaa

SEQ ID NO: 5638 - protein, 158 aa, Muscodor strobelii
  misc_feature: SGI Peptide ID NO. 561599
  misc_feature (10)..(126): NCBI GI: 85081181 Blast Desc: NCU00161 [Neurospora crassa OR74A] gi|28917747|gb|EAA27438.1| [Neurospora crassa OR74A]
  misc_feature (11)..(132): NCBI GI: 116207316 Blast Desc: CHGG_02951 [Chaetomium globosum CBS 148.51] gi|88183548|gb|EAQ91016.1| CHGG_02951 [Chaetomium globosum CBS 148.51]
  misc_feature (31)..(75): NCBI GI: 171686012 Blast Desc: protein product [Podospora anserina] gi|170942967|emb|CAP68620.1| protein product [Podospora anserina]
  misc_feature (5)..(123): NCBI GI: 189208328 Blast Desc: conserved [Pyrenophora tritici-repentis Pt-1C-BFP] gi|187976590|gb|EDU43216.1| conserved [Pyrenophora tritici-repentis Pt-1C-BFP]
  misc_feature (18)..(62): NCBI GI: 145615575 Blast Desc: MGG_05695 [Magnaporthe grisea 70-15] gi|145022388|gb|EDK06408.1| MGG_05695 [Magnaporthe grisea 70-15]
MQKPVSDEDASPPTSDGEDPLEIDQDAVHEIIQPALSPLATRLTLPKTPAAEKAAAMDYFPGGGLFSVMEDTPQPSSSLPPKQTAVLQTPSNRTRPRGLTLGSLSNLPYVNRLPSPWQSEPPTPFVIRRTRYLKEDTRSPARFANHFAAFDFFRAGFG

SEQ ID NO: 5639 - DNA, 1851 bp, Muscodor strobelii
  misc_feature: SGI cDNA ID NO. 561600
  misc_feature: Encodes the peptide sequence at SEQ ID NO 5640
atgcagaaacctgtgtccgatgaagatgcctcgccgccaacatcagacggggaggatcccctcgagatcgaccaagatgctgtccacgaaataattcagccagctcttagtcctttggcgacgagacttaccctacccaaaacgcctgcggccgaaaaggctgccgcaatggattacttccccggcggtgggttgttcagtgttatggaagatactccccaaccgagttcttcactaccacccaagcagactgccgtattgcaaacgccgtcaaatcggacacgccctcgggggcttacgctgggttcattatcaaacctcccttatgtaaatcgattaccgtcaccgtggcagtcaggtccgaaagaattggttgtggacgatgaatctggctctaaaactgcccttgcgtccgtttttggacagaaccgccaacacctaatgggaggatatcgaggctcagtactccgggctacacgcacgagacgccaggtatgggtacccgtgaaagtcggattaaacattcgaaaggtgaacctggaagtaggtctcgaccccgaagatgaagacaatatggagcagactatttacgcctccgggatgcttcaaaatattggacctgtcgatatttcaaaacgactgttcaaacgactcagggactgtgaaaatgcgaggaatggaaagcttagagtatgggattatggctatgactggagacttagtccacatttgttgtctcggaggcttatcaacttcctcaagcatttaccatccaatcagggtgtagatggtccacgaaatatgggcgctaccgtcatcgcacacagccttggcggtctgatcacacgtcatgccgtaaatcaacgaccagagttgtttgccggcgtggtctatgctggtacgccccaaagatgtgttaatgttttagggccactaagaaatggggacgcggtgctattcaacgaaaaggtcttaacagcacaggtcaacttttcactaagaacaactttcgttttcttgccagaagacgggttctgttttgtcaataagttcactggcgaggaatatacagttgacttctacgaccccgcgcactggaaaaagtatgctctgtcgccctgcatcgaaccgcctttacctgcttacaacaaccgctcaacggctcggagctccttaaaagaactgtctgaaagactgccctcacctttacgaggtcgtggtaacagcgcgactggcgactcaaaaccatctcaggctttcataaatcgaaatatgcctgctgatgctgctcggaagctggaggtcgcgcatgatcgcacactcgcgccgcagataggaacactctctggtgacagtgatgcagcgcaagaaggccaacgagatgctaacagcaatgggaaagatcgcaatacagcctatctcacacggatactcgctgagactaagagatttcgcatggagacttactataagcccgaacacagcgagtcaaattcgtaccctccacttggccttatctacggcaaagacatacccacagtttatgctgctcatgtatcttcaagagatgctatagcctgctctgacgcctacgaagatcttgttttcaggagtggcgacggcgtagtccttgcgaaagaagcgatgcttccagatggttacgaattggtgaagggaggccgaatcagcacggatcgaggccacatcacgatgctgggtgatttggaggccgttggacgggccttgcaggcagttattagaggtcgaaggaaagggatcggcatggggaaggatgttgccgttcgcgcgaagaccgattcgtttgggagtgacaacatggcgccgcaatga

SEQ ID NO: 5640 - protein, 616 aa, Muscodor strobelii
  misc_feature: SGI Peptide ID NO. 561600
  misc_feature (147)..(596): NCBI GI: 171686012 Blast Desc: protein product [Podospora anserina] gi|170942967|emb|CAP68620.1| protein product [Podospora anserina]
  misc_feature (147)..(586): NCBI GI: 85081181 Blast Desc: NCU00161 [Neurospora crassa OR74A] gi|28917747|gb|EAA27438.1| [Neurospora crassa OR74A]
  misc_feature (121)..(596): NCBI GI: 46122129 Blast Desc: FG05442.1 [Gibberella zeae PH-1]
  misc_feature (147)..(591): NCBI GI: 256729738 Blast Desc: [Nectria haematococca mpVI 77-13-4]
  misc_feature (147)..(609): NCBI GI: 169598196 Blast Desc: SNOG_01897 [Phaeosphaeria nodorum SN15] gi|111068989|gb|EAT90109.1| SNOG_01897 [Phaeosphaeria nodorum SN15]
  misc_feature (147)..(596): NCBI GI: 189208328 Blast Desc: conserved [Pyrenophora tritici-repentis Pt-1C-BFP] gi|187976590|gb|EDU43216.1| conserved [Pyrenophora tritici-repentis Pt-1C-BFP]
  misc_feature (147)..(595): NCBI GI: 169765556 Blast Desc: [Aspergillus oryzae RIB40] gi|83765104|dbj|BAE55247.1| protein product [Aspergillus oryzae]
  misc_feature (147)..(595): NCBI GI: 238482113 Blast Desc: conserved [Aspergillus flavus NRRL3357] gi|220700345|gb|EED56683.1| conserved [Aspergillus flavus NRRL3357]
  misc_feature (147)..(594): NCBI GI: 115395510 Blast Desc: conserved [Aspergillus terreus NIH2624] gi|114193087|gb|EAU34787.1| conserved [Aspergillus terreus NIH2624]
  misc_feature (147)..(591): NCBI GI: 119482688 Blast Desc: NFIA_025480 [Neosartorya fischeri NRRL 181] gi|119409527|gb|EAW19475.1| conserved [Neosartorya fischeri NRRL 181]
MQKPVSDEDASPPTSDGEDPLEIDQDAVHEIIQPALSPLATRLTLPKTPAAEKAAAMDYFPGGGLFSVMEDTPQPSSSLPPKQTAVLQTPSNRTRPRGLTLGSLSNLPYVNRLPSPWQSGPKELVVDDESGSKTALASVFGQNRQHLMGGYRGSVLRATRTRRQVWVPVKVGLNIRKVNLEVGLDPEDEDNMEQTIYASGMLQNIGPVDISKRLFKRLRDCENARNGKLRVWDYGYDWRLSPHLLSRRLINFLKHLPSNQGVDGPRNMGATVIAHSLGGLITRHAVNQRPELFAGVVYAGTPQRCVNVLGPLRNGDAVLFNEKVLTAQVNFSLRTTFVFLPEDGFCFVNKFTGEEYTVDFYDPAHWKKYALSPCIEPPLPAYNNRSTARSSLKELSERLPSPLRGRGNSATGDSKPSQAFINRNMPADAARKLEVAHDRTLAPQIGTLSGDSDAAQEGQRDANSNGKDRNTAYLTRILAETKRFRMETYYKPEHSESNSYPPLGLIYGKDIPTVYAAHVSSRDAIACSDAYEDLVFRSGDGVVLAKEAMLPDGYELVKGGRISTDRGHITMLGDLEAVGRALQAVIRGRRKGIGMGKDVAVRAKTDSFGSDNMAPQ

SEQ ID NO: 5641 - DNA, 795 bp, Muscodor strobelii
  misc_feature: SGI cDNA ID NO. 561601
  misc_feature: Reduced expression when VOC is produced
  misc_feature: Encodes the peptide sequence at SEQ ID NO 5642
atggctacctccgatcagaccaaagtcacattatactggctggagcgttctcgtgcccagaatatattatggctcttagaggagctcaagattgactatgagcttgaaacttttcgtcgcaataaagagactctgttggccccagaggaactgaagaaaattcacccactaggcaaatcccccttagtttctatcacacctgctggtgcatctgagccgcttgttctggccgagagtggttttatcacgcaatacctcagcgagcatttctctcagaacaacccgacgatcgcaccaaaacgctggaaggacggacaggaaggcaaagttggcggtgagacggccgagtggcttcgatggcagtatctgctgcattacgtcgaaggctcgttcctatcgctgttgatgatcggcatggttctcggcatgctgaaaagccccaaggttcccttcttcctgcgccccatcacaggattagtagccaatcaggtcttcgcctcttttgtattccccaatctgaagacacaattgggcttcctcgagaagcaacttgagacctctggaggagacttcttgtgcgggcagagtttgacgtcagcagatattctgatatctttcgccctgatcagtgcaaaggataagattgcggagttcggcacctggccggcaggcagcccgaaggctacataccctaagctttacgaatatatcgaaagattggagtcacagcctggatataagaaatctgttgaaaaagtcaagcaaattgattcgagtctcggcatcaacttctaa

SEQ ID NO: 5642 - protein, 264 aa, Muscodor strobelii
  misc_feature: SGI Peptide ID NO. 561601
  misc_feature (131)..(244): Pfam Id: PF00043 Pfam Desc: Glutathione S-transferase, C-terminal domain
  misc_feature (7)..(88): Pfam Id: PF02798 Pfam Desc: Glutathione S-transferase, N-terminal domain
  misc_feature (169)..(244): Pfam Id: PF00043 Pfam Desc: Glutathione S-transferase, C-terminal domain
  misc_feature (1)..(257): NCBI GI: 261354276 Blast Desc: glutathione S-transferase I [Verticillium albo-atrum VaMs.102]
  misc_feature (4)..(262): NCBI GI: 116207314 Blast Desc: CHGG_02950 [Chaetomium globosum CBS 148.51] gi|88183547|gb|EAQ91015.1| CHGG_02950 [Chaetomium globosum CBS 148.51]
  misc_feature (9)..(262): NCBI GI: 145615563 Blast Desc: glutathione S-transferase [Magnaporthe grisea 70-15] gi|145022370|gb|EDK06390.1| glutathione S-transferase [Magnaporthe grisea 70-15]
  misc_feature (3)..(257): NCBI GI: 156051824 Blast Desc: SS1G_07319 [Sclerotinia sclerotiorum 1980] gi|154705097|gb|EDO04836.1| SS1G_07319 [Sclerotinia sclerotiorum 1980]
  misc_feature (1)..(260): NCBI GI: 119494321 Blast Desc: glutathione S-transferase, [Neosartorya fischeri NRRL 181] gi|119412218|gb|EAW22159.1| glutathione S-transferase, [Neosartorya fischeri NRRL 181]
  misc_feature (1)..(260): NCBI GI: 70996628 Blast Desc: glutathione S-transferase [Aspergillus fumigatus Af293] gi|66850704|gb|EAL91031.1| glutathione S-transferase, [Aspergillus fumigatus Af293] gi|159131805|gb|EDP56918.1| A1163]
  misc_feature (3)..(258): NCBI GI: 164424117 Blast Desc: NCU05706 [Neurospora crassa OR74A] gi|157070381|gb|EAA33832.2| conserved [Neurospora crassa OR74A]
  misc_feature (1)..(260): NCBI GI: 256725800 Blast Desc: NECHADRAFT_94562 [Nectria haematococca mpVI 77-13-4]
  misc_feature (1)..(257): NCBI GI: 67516695 Blast Desc: AN0629.2 [Aspergillus nidulans FGSC A4] gi|40746016|gb|EAA65172.1| AN0629.2 [Aspergillus nidulans FGSC A4] gi|259489105|tpe|CBF89101.1| TPA: glutathione S-transferase,
  misc_feature (14)..(257): NCBI GI: 154291389 Blast Desc: BC1G_15218 [Botryotinia fuckeliana B05.10] gi|150846821|gb|EDN22014.1| BC1G_15218 [Botryotinia fuckeliana B05.10]
  misc_feature (9)..(264): SWISSPROT Homolog: EC 2.5.1.18 Glutathione transferase
  misc_feature: Useful for introducing or modulating the production of volatile compounds
MATSDQTKVTLYWLERSRAQNILWLLEELKIDYELETFRRNKETLLAPEELKKIHPLGKSPLVSITPAGASEPLVLAESGFITQYLSEHFSQNNPTIAPKRWKDGQEGKVGGETAEWLRWQYLLHYVEGSFLSLLMIGMVLGMLKSPKVPFFLRPITGLVANQVFASFVFPNLKTQLGFLEKQLETSGGDFLCGQSLTSADILISFALISAKDKIAEFGTWPAGSPKATYPKLYEYIERLESQPGYKKSVEKVKQIDSSLGINF

SEQ ID NO: 5643 - DNA, 6651 bp, Muscodor strobelii
  misc_feature: SGI EST ID NO. CUFF.14754.0
  misc_feature: Variant of the nucleotide sequence at SEQ ID NO 5641
tggatacaatgtcactgtggcattagaataccgaacaaccatgaagtgtgaaccgagagagtgaacatcaatgtcgcggtaaaatgccaattgagatcttgggtccagagtctaccattgatgactactttctacaccggaacatatgaaacatgatcattttgtacagttcagagtgtcaaggaaaagttcgcgtaatgtgtgatttgtcttaggattggtgtctaatattcggatatcatgtctcctttcctcttccctcgcatatcccatcttccctataacgcacactcatgtcagcatgatggccaattcctcaagatctgtgcaaaatcgcttatgggaggttcgattgggaggggctcttacgtcggtctggtaggcaagcacgccgacaatggtagggatgataacagcgtagacgaccgtgatgccggcggttctcttggtccagcggaaatacctgtgtcggttggtttgcatggctgtcggtcgcgggtcagttcagcgagctcttcggacgattcgttcgaaggttgtacgtactacccagcttctggatggccgggtccagcgcgagacctggggggattagttagcttctattgcgcgcaattgacggagatgggagaccgctgagggggcagaacgtacggaagtgttggagaccacccatactgacagcggttggcggttgccgcgtactgactagacgatatggagtggaagggttggttgttgcggttgagcggctttggcaagcttgtcggagcttggtgttcgagggtcgtttgaattgaggcttgatgactaacactcagccacagctcatggctggagccacacacggtagtggacctaggccaacctgatgagagctaatgtggcttgtgagcagatacccatcttggcatgtgcacttccacactttaacaaggttaagtttccgacccgttcgctatctcggcctattgcgttagtgtcacggagcaccctcaatccgtacatcgcgtgctggtaagactcattgaatggtttgatttttgcagttgaagtttgagatgccgaggcatgacgtgcgtatatatagtatcgaagaccattagagcagaaatctgagaaatatatcatgtttgatcgtttcgcaagaatctttggcgaataatccaaggtttcaagttgtgtaaaacagttcgtctacatacaccgacgtcatggctacctccgatcagaccaaagtcacattatactggctggagcgttctcgtgcccagaatatattatggctcttagaggagctcaagattgactatgagcttgaaacttttcgtcgcaataaagagactctgttggccccagaggaactgaagaaaattcacccactaggcaaatcccccttagtttctatcacacctgctggtgcatctgagccgcttgttctggccgagagtggttttatcacgcaatacctcagcgagcatttctctcagaacaacccgacgatcgcaccaaaacgctggaaggacggacaggaaggcaaagttggcggtgagacggccgagtggcttcgatggcagtatctgctgcattacgtcgaaggctcgttcctatcgctgttgatgatcggcatggttctcggcatgctgaaaagccccaaggttcccttcttcctgcgccccatcacaggattagtagccaatcaggtcttcgcctcttttgtattccccaatctgaagacacaattgggcttcctcgagaagcaacttgagacctctggaggagacttcttgtgcgggcagagtttgacgtcagcagatattctgatatctttcgccctgatcagtgcaaaggataagattgcggagttcggcacctggccggcaggcagcccgaaggctacataccctaagctttacgaatatatcgaaagattggagtcacagcctggatataagaaatctgttgaaaaagtcaagcaaattgattcgagtctcggcatcaacttctaatgacgcgaagaaggggatttgaaggaccctgcgcagtcttccgaaccgtcccggaatctccactttgtgtatgtatcatttgtgatacacctctctagccctgggccaatcgaatcatgtgtatagggagaatattacctgaattacataataatactgttgcctggaaattgtttcttgctgccttgattacagcatggtcttgaccctaggacaaagtggaaactcgaacatgaagagatccaaaccaaagactcggctgagaggtgggataacgacactccagtgagatggcatcatccaattgaaccatgtgaagccgtaaactgcctatgcgataacatatttctttagaattagtcgaaatgcttccatgagcatatgtaaattaagagagcattctgcagtcagggttgaaagataagcctccaatgcaacttggcaccatgtacctcgatgcggaaggcccctcatttagacttgggcgccaaggaccgttgaatgggagacatgtgtgatttaagcgtagctctatcagctcaggcacattttgcccatgctactactaccttatcataattcaccatgaactatgtgacctattatttgatggcatatgcgggaattccgtattcccgtattccatgcgtgttgttattaatatctcggcggtgttttgtggcatctgcaggaatgccccagcgctcctccacgatttctgagacctgctccaagaagacagagcgatgttgacatcgagcgcaatcaaatcgattacgaacagacaatttgattcgacctaagtgatagccaactaaatgatacacgcactagtctaggtaactttactctttacttcctggtaccaaatcagggtccatgacgtcaaaattatgtcttgcgcaaaggtggcgcagagggttatgacagctacggtatctggcctgtttatcagcaggaacagcttgtcgcgatgaggcggtcaatcggcaacaaagtctggcttgccgtgtaagcacagcatcagcagcaaaacagcggcaccgaggcacaaacaaagaaaaatccccgtcgaaattaatctagagcctcatcgatcctacagtctccattacagacccgttccgagcgaccggtgttcgcgggtgtggctatgtccgtcgttacccactagtaccacgagaactcgactataacattggactgaagttcacatctcgagtcgtacacccgctactttggaccgagttcctggggaaacaaggtcactgtgagtttgataaaaggaccgacaaactccagcgttctcctagttagcgacccgacatgacctagacatgcggtgctacctgacgttcctcttcctttcgcagctttcaaagaaaagagcatcgtgtgagtgggccgtcggggtctaattgtctccctagcctacttctctcaccaggaaacttcaatcaatatctgttgtcttttttagtttaagaaaaaatactactaaagtaccggaccatccggcccccaagtctctccaacggcccccgacgcgccgattgcagtttctgcccggatgccgtgcaatcacagccgggttgggtcactgcttgttgggtttgttggaggttcatcacctacgaggtgacattttattggatgccatgtcgtctgttgttactccagaattacccgtaatcccaggacacgagatgcagaaacctgtgtccgatgaagatgcctcgccgccaacatcagacggggaggatcccctcgagatcgaccaagatgctgtccacgaaataattcagccagctcttagtcctttggcgacgagacttaccctacccaaaacgcctgcggccgaaaaggctgccgcaatggattacttccccggcggtgggttgttcagtgttatggaagatactccccaaccgagttcttcactaccacccaagcagactgccgtattgcaaacgccgtcaaatcggacacgccctcgggggcttacgctgggttcattatcaaacctcccttatgtaaatcgattaccgtcaccgtggcagtcaggtccgaaagaattggttgtggacgatgaatctggctctaaaactgcccttgcgtccgtttttggacagaaccgccaacaccgttcgtcatccggaggacaagataccttaaagaggatacgcgaagccctgcccgctttgccaaccatttcgctgccttcgattttttcagggccggcttcggctaaaagtaccgatgtagaatcgaagcgcgcgttcaactcaggcgatggggctgcggaatcaaaagattttgtgccaagtctaccttctgcagagacgagacgcgacatgctgcttccgacgagtcactttagtcattccaaggaaatgctaacaacgtcacgcccaccaccttccaataggcctcggaccatacgaaggtcaacgtcggatgagtccatgctataccattccctgtctagggtctcttcgtacggagatgatgaaaggtggaacgatatccgagaacagaaaaacagccgtttcaaagctatcacggacagctgggatcgtccaacttttaaacttcctcagctacctaatattatacccgccccgttaaagagacatactctacttaactctgaatcatcagaaacttcatttgatcaaatgcggtctactagcacatttgatataaatgatccaaacgtttcggaactagatcgtgctttggaatcgctaaccggtgacgttgtagtaatgggaggatatcgaggctcagtactccgggctacacgcacgagacgccaggtatgggtacccgtgaaagtcggattaaacattcgaaaggtgaacctggaagtaggtctcgaccccgaagatgaagacaatatggagcagactatttacgcctccgggatgcttcaaaatattggacctgtcgatatttcaaaacgactgttcaaacgactcagggactgtgaaaatgcgaggaatggaaagcttagagtatgggattatggctatgactggagacttagtccacatttgttgtctcggaggcttatcaacttcctcaagcatttaccatccaatcagggtgtagatggtccacgaaatatgggcgctaccgtcatcgcacacagccttggcggtctgatcacacgtcatgccgtaaatcaacgaccagagttgtttgccggcgtggtctatgctggtacgccccaaagatgtgttaatgttttagggccactaagaaatggggacgcggtgctattcaacgaaaaggtcttaacagcacaggtcaacttttcactaagaacaactttcgttttcttgccagaagacgggttctgttttgtcaataagttcactggcgaggaatatacagttgacttctacgaccccgcgcactggaaaaagtatgctctgtcgccctgcatcgaaccgcctttacctgcttacaacaaccgctcaacggctcggagctccttaaaagaactgtctgaaagactgccctcacctttacgaggtcgtggtaacagcgcgactggcgactcaaaaccatctcaggctttcataaatcgaaatatgcctgctgatgctgctcggaagctggaggtcgcgcatgatcgcacactcgcgccgcagataggaacactctctggtgacagtgatgcagcgcaagaaggccaacgagatgctaacagcaatgggaaagatcgcaatacagcctatctcacacggatactcgctgagactaagagatttcgcatggagacttactataagcccgaacacagcgagtcaaattcgtaccctccacttggccttatctacggcaaagacatacccacagtttatgctgctcatgtatcttcaagagatgctatagcctgctctgacgcctacgaagatcttgttttcaggagtggcgacggcgtagtccttgcgaaagaagcgatgcttccagatggttacgaattggtgaagggaggccgaatcagcacggatcgaggccacatcacgatgctgggtgatttggaggccgttggacgggccttgcaggcagttattagaggtcgaaggaaagggatcggcatggggaaggatgttgccgttcgcgcgaagaccgattcgtttgggagtgacaacatggcgccgcaatgagtacctacgctgatacaacccatcgattaactacgatggcttggaaaagatctcgaaatagattggatatggcattagcattcacactggctcctggcgtcctatgaaaagcaaaggttacagaaaagcgccattgttggctcttgtatagttacgaaatacaaagtagcattccaaccaacgaatcttcatgtacgtacaaaattcgtgtgggctgcctataagtcggtaggaagatgttcacagcgcaacgggtatcgatgtctgattccttggctatctaaatcactcggtcttctgccgccatcttattgcttcttattaggcagaaggtatcatgttgattaagcagcacctgaggatgacctaaggctctacttagatgcaagtagccagtatcgcattgtcgaacaccatctaagtttaggcctgatacgtgttcggcgcaagaattcattaatcgg

SEQ ID NO: 5644 - DNA, 228 bp, Muscodor strobelii
  misc_feature: SGI cDNA ID NO. 561602
  misc_feature: Encodes the peptide sequence at SEQ ID NO 5645
atgggtggtctccaacacttccgtctcgcgctggacccggccatccagaagctgggtaccatgcaaaccaaccgacacaggtatttccgctggaccaagagaaccgccggcatcacggtcgtctacgctgttatcatccctaccattgtcggcgtgcttgcctaccagaccgacggaagatgggatatgcgagggaagaggaaaggagacatgatatccgaatattag

SEQ ID NO: 5645 - protein, 75 aa, Muscodor strobelii
  misc_feature: SGI Peptide ID NO. 561602
  misc_feature (1)..(75): NCBI GI: 164428896 Blast Desc: NADH:ubiquinone oxidoreductase 6.6kD subunit [Neurospora crassa OR74A] gi|157072328|gb|EAA27437.2| NADH:ubiquinone oxidoreductase 6.6kD subunit [Neurospora crassa
  misc_feature (1)..(75): NCBI GI: 154291387 Blast Desc: BC1G_15217 [Botryotinia fuckeliana B05.10] gi|150846820|gb|EDN22013.1| BC1G_15217 [Botryotinia fuckeliana B05.10]
  misc_feature (9)..(74): NCBI GI: 116207312 Blast Desc: [Chaetomium globosum CBS 148.51] gi|88183546|gb|EAQ91014.1| [Chaetomium globosum CBS 148.51]
  misc_feature (1)..(75): NCBI GI: 189208352 Blast Desc: PTRG_10177 [Pyrenophora tritici-repentis Pt-1C-BFP] gi|187976602|gb|EDU43228.1| PTRG_10177 [Pyrenophora tritici-repentis Pt-1C-BFP]
  misc_feature (1)..(75): NCBI GI: 169598136 Blast Desc: SNOG_01867 [Phaeosphaeria nodorum SN15] gi|160704339|gb|EAT90079.2| SNOG_01867 [Phaeosphaeria nodorum SN15]
  misc_feature (2)..(69): NCBI GI: 261354275 Blast Desc: VDBG_02812 [Verticillium albo-atrum VaMs.102]
  misc_feature (9)..(75): NCBI GI: 242778946 Blast Desc: conserved [Talaromyces stipitatus ATCC 10500] gi|218722961|gb|EED22379.1| conserved [Talaromyces stipitatus ATCC 10500]
  misc_feature (4)..(74): NCBI GI: 46111307 Blast Desc: FG02535.1 [Gibberella zeae PH-1]
  misc_feature (21)..(75): NCBI GI: 156051822 Blast Desc: [Sclerotinia sclerotiorum 1980] gi|154705096|gb|EDO04835.1| [Sclerotinia sclerotiorum 1980]
  misc_feature (4)..(74): NCBI GI: 256725794 Blast Desc: [Nectria haematococca mpVI 77-13-4]
MGGLQHFRLALDPAIQKLGTMQTNRHRYFRWTKRTAGITVVYAVIIPTIVGVLAYQTDGRWDMRGKRKGDMISEY

SEQ ID NO: 5646 - DNA, 2761 bp, Muscodor strobelii
  misc_feature: SGI EST ID NO. CUFF.14753.1
  misc_feature: Variant of the nucleotide sequence at SEQ ID NO 5644
ttgcgcaagacataattttgacgtcatggaccctgatttggtaccaggaagtaaagagtaaagttacctagactagtgcgtgtatcatttagttggctatcacttaggtcgaatcaaattgtctgttcgtaatcgatttgattgcgctcgatgtcaacatcgctctgtcttcttggagcaggtctcagaaatcgtggaggagcgctggggcattcctgcagatgccacaaaacaccgccgagatattaataacaacacgcatggaatacgggaatacggaattcccgcatatgccatcaaataataggtcacatagttcatggtgaattatgataaggtagtagtagcatgggcaaaatgtgcctgagctgatagagctacgcttaaatcacacatgtctcccattcaacggtccttggcgcccaagtctaaatgaggggccttccgcatcgaggtacatggtgccaagttgcattggaggcttatctttcaaccctgactgcagaatgctctcttaatttacatatgctcatggaagcatttcgactaattctaaagaaatatgttatcgcataggcagtttacggcttcacatggttcaattggatgatgccatctcactggagtgtcgttatcccacctctcagccgagtctttggtttggatctcttcatgttcgagtttccactttgtcctagggtcaagaccatgctgtaatcaaggcagcaagaaacaatttccaggcaacagtattattatgtaattcaggtaatattctccctatacacatgattcgattggcccagggctagagaggtgtatcacaaatgatacatacacaaagtggagattccgggacggttcggaagactgcgcagggtccttcaaatccccttcttcgcgtcattagaagttgatgccgagactcgaatcaatttgcttgactttttcaacagatttcttatatccaggctgtgactccaatctttcgatatattcgtaaagcttagggtatgtagccttcgggctgcctgccggccaggtgccgaactccgcaatcttatcctttgcactgatcagggcgaaagatatcagaatatctgctgacgtcaaactctgcccgcacaagaagtctcctccagaggtctcaagttgcttctcgaggaagcccaattgtgtcttcagattggggaatacaaaagaggcgaagacctgattggctactaatcctgtgatggggcgcaggaagaagggaaccttggggcttttcagcatgccgagaaccatgccgatcatcaacagcgataggaacgagccttcgacgtaatgcagcagatactgccatcgaagccactcggccgtctcaccgccaactttgccttcctgtccgtccttccagcgttttggtgcgatcgtcgggttgttctgagagaaatgctcgctgaggtattgcgtgataaaaccactctcggccagaacaagcggctcagatgcaccagcaggtgtgatagaaactaagggggatttgcctagtgggtgaattttcttcagttcctctggggccaacagagtctctttattgcgacgaaaagtttcaagctcatagtcaatcttgagctcctctaagagccataatatattctgggcacgagaacgctccagcctaagttacctaattagctatgagaacttgagggtcaatcgtcgacccagaacgtatgtgtttgacttgccagtataatgtgactttggtctgatcggaggtagccatgacgtcggtgtatgtagacgaactgttttacacaacttgaaaccttggattattcgccaaagattcttgcgaaacgatcaaacatgatatatttctcagatttctgctctaatggtcttcgatactatatatacgcacgtcatgcctcggcatctcaaacttcaactgcaaaaatcaaaccattcaatgagtcttaccagcacgcgatgtacggattgagggtgctccgtgacactaacgcaataggccgagatagcgaacgggtcggaaacttaaccttgttaaagtgtggaagtgcacatgccaagatgggtatctgctcacaagccacattagctctcatcaggttggcctaggtccactaccgtgtgtggctccagccatgagctgtggctgagtgttagtcatcaagcctcaattcaaacgaccctcgaacaccaagctccgacaagcttgccaaagccgctcaaccgcaacaaccaacccttccactccatatcgtctagtcagtacgcggcaaccgccaaccgctgtcagtatgggtggtctccaacacttccgtctcgcgctggacccggccatccagaagctgggtaccatgcaaaccaaccgacacaggtatttccgctggaccaagagaaccgccggcatcacggtcgtctacgctgttatcatccctaccattgtcggcgtgcttgcctaccagaccgacggaagatgggatatgcgagggaagaggaaaggagacatgatatccgaatattagacaccaatcctaagacaaatcacacattacgcgaacttttccttgacactctgaactgtacaaaatgatcatgtttcatatgttccggtgtagaaagtagtcatcaatggtagactctggacccaagatctcaattggcattttaccgcgacattgatgttcactctctcggttcacacttcatggttgttcggtattctaatgccacagtgacattgtatcca

SEQ ID NO: 5647 - DNA, 729 bp, Muscodor strobelii
  misc_feature: SGI cDNA ID NO. 561603
  misc_feature: Reduced expression when VOC is produced
  misc_feature: Encodes the peptide sequence at SEQ ID NO 5648
atggaccgctcaacgactgctccctttgcgctgcagctcttctatcggactgcggcatttcataggccagacgagttcgctgccgaaatactccccgagcacatcactatacatacctggaatgactgcactctcgttgagctcactcaccacctcgagaccgccgatggcaacctattgcctaatcctgctattggcacacgcttagcctttcgcctgttcttccaggacactagaggtccagccactgctgggagatatgccatcaaggatatgggtagtgttgtcataggtgatggaggcccgggtctcgaccctgacaagccagatgccaacatcaccctcgaggacacagaaccttacaagacattgaacgacgctaggtttgtcgtcggtgactacatctcatgtgccatcctgccgccactgccagatggctccgtcgccccagcctccagcgcgcgcggtggtagaggcactggcgctggtgaatctccctttgctgtcggccggccacccactgccccctcacgagatcgtgagaacggcttcatgcgccgcaatcaggggcccgcgagcaatattagagctggaaacgaaggatggggaagagggggccgtagcaatcgaggccgtgtgccgatgggggaatggaggagaggagaggagctgcctgagatcccacctgaaagacggccgtatgatagggacaggctcgacagattctag

SEQ ID NO: 5648 - protein, 242 aa, Muscodor strobelii
  misc_feature: SGI Peptide ID NO. 561603
  misc_feature (1)..(139): Pfam Id: PF06487 Pfam Desc: Sin3 associated polypeptide p18 (SAP18)
  misc_feature (122)..(139): Pfam Id: PF06487 Pfam Desc: Sin3 associated polypeptide p18 (SAP18)
  misc_feature (3)..(238): NCBI GI: 39941538 Blast Desc: MGG_05680 [Magnaporthe grisea 70-15] gi|145022373|gb|EDK06393.1| MGG_05680 [Magnaporthe grisea 70-15]
  misc_feature (1)..(228): NCBI GI: 154291385 Blast Desc: BC1G_15216 [Botryotinia fuckeliana B05.10] gi|150846819|gb|EDN22012.1| BC1G_15216 [Botryotinia fuckeliana B05.10]
  misc_feature (3)..(226): NCBI GI: 256726198 Blast Desc: NECHADRAFT_106211 [Nectria haematococca mpVI 77-13-4]
  misc_feature (3)..(226): NCBI GI: 46111305 Blast Desc: FG02534.1 [Gibberella zeae PH-1]
  misc_feature (1)..(226): NCBI GI: 239612578 Blast Desc: Sin3-associated polypeptide Sap18 [Ajellomyces dermatitidis ER-3]
  misc_feature (1)..(226): NCBI GI: 261189092 Blast Desc: Sin3-associated polypeptide Sap18 [Ajellomyces dermatitidis SLH14081] gi|239591848|gb|EEQ74429.1| Sin3-associated polypeptide Sap18 [Ajellomyces dermatitidis
  misc_feature (1)..(226): NCBI GI: 240111626 Blast Desc: CPC735_000300 [Coccidioides posadasii C735 delta SOWgp]
  misc_feature (1)..(226): NCBI GI: 225677773 Blast Desc: conserved [Paracoccidioides brasiliensis Pb03]
  misc_feature (1)..(227): NCBI GI: 240274396 Blast Desc: Sin3-associated polypeptide Sap18 [Ajellomyces capsulatus H143]
  misc_feature (1)..(226): NCBI GI: 119185899 Blast Desc: CIMG_02997 [Coccidioides immitis RS]
  misc_feature: Useful for introducing or modulating the production of volatile compounds
MDRSTTAPFALQLFYRTAAFHRPDEFAAEILPEHITIHTWNDCTLVELTHHLETADGNLLPNPAIGTRLAFRLFFQDTRGPATAGRYAIKDMGSVVIGDGGPGLDPDKPDANITLEDTEPYKTLNDARFVVGDYISCAILPPLPDGSVAPASSARGGRGTGAGESPFAVGRPPTAPSRDRENGFMRRNQGPASNIRAGNEGWGRGGRSNRGRVPMGEWRRGEELPEIPPERRPYDRDRLDRF

SEQ ID NO: 5649 - DNA, 2052 bp, Muscodor strobelii
  misc_feature: SGI EST ID NO. CUFF.14260.0
  misc_feature: Variant of the nucleotide sequence at SEQ ID NO 5647
tatatgcagccctatgactgccattcaggcctagtgcgcaatcaatggaaagcgctacgaaatgtttccaacgcgtcttagctgccagtgactcaaatgacggcaacaaggaggtcgcagttcgcatctggaagtcgcaagagatcgaaccgtcgtgttcaactcccttcccctcgtccttgtgtcaagatgccaatttacttaagagctttcagtactaactatccgtaacattgcttgtcgacatcgaattatcgccattagcaagcctagctcaagtattgcgaatactcgttggtaaactcgaggtcaatttaacagctttccaacagctttgcaacagcactatggaccgctcaacgactgctccctttgcgctgcagctcttctatcggactgcggcatttcataggccagacgagttcgctgccgaaatactccccgagcacatcactatacatacctggaatgactgcactctcgttgagctcactcaccacctcgagaccgccgatggcaacctattgcctaatcctgctattggcacacgcttagcctttcgcctgttcttccaggacactagaggtccagccactgctgggagatatgccatcaaggatatgggtagtgttgtcataggtgatggaggcccgggtctcgaccctgacaagccagatgccaacatcaccctcgaggacacagaaccttacaagacattgaacgacgctaggtttgtcgtcggtgactacatctcatgtgccatcctgccgccactgccagatggctccgtcgccccagcctccagcgcgcgcggtggtagaggcactggcgctggtgaatctccctttgctgtcggccggccacccactgccccctcacgagatcgtgagaacggcttcatgcgccgcaatcaggggcccgcgagcaatattagagctggaaacgaaggatggggaagagggggccgtagcaatcgaggccgtgtgccgatgggggaatggaggagaggagaggagctgcctgagatcccacctgaaagacggccgtatgatagggacaggctcgacagattctagggtgaatcgaacgaatcttcagggtccaattcatataagccgtctgaccttttcgcacccaatacaggcccgaaaaggaccagacggaacagagatactggtggtcctgggggggttaatggtccacctgaaagaaaatggaatacaggggaagagctgccagaacgccccaaacccggcaatggagaccacctcggagagccccgggaggggaggttgccgcaggacaagtcgagcagtcaacgtgatcctcagacaccaacgaacgatctcgagcgagacgagccgaagtttagccattcaccagaagatgggggaccgctgaccaggcaacctcgtaggcaacagccattcatctatggttcacaggaagacgcccgagcttcgatgtcaagtgcctttggagatatttctaattcattttcgtcaatcagttcgctgacatcggtacccgacactgaagacttctccgagtgtgatacgaatcagcagctagcagggacgtcgccaattcgagaggcgacaaggacagaggctgaagttcctccccttcccacgagcgagccgaggattcgtgaaccgagcagtctattccgagattttgagggactggattgggtagaagatgtgattgaatccatggcggcgagagaagtaccgacaacgaggacgttcaagaggttccgtcgaagatgataacacaattgcattgaaggagcagttatcgacagaaacattctctagcttgggccgtaggctatcgcagataagataaaggagagattgagcatcgattataattgagcagggcacgatgcaccccagcctatcgactagaatggagtataatatcattatcgagacttgggtcgatattctgatacaggcagatgcaacagaacttaactggcaccagacaattccataacagtttagtagataataaggtattagcccagtgctacgtcgccagaga

SEQ ID NO: 5650 - DNA, 1074 bp, Muscodor strobelii
  misc_feature: SGI cDNA ID NO. 561604
  misc_feature: Encodes the peptide sequence at SEQ ID NO 5651
atggatttcgcatccctaatgtccagcgaaatcgcaaaagcgaaacccgacaccacaccctcctcctcctcgaacaaaaaataccaacgccgtgccgaagccgaggccgagcgcgaagccgcctaccgcaccgaacaaaaagccctagaggaaaagcgcgcagcccgcgccgcagagaagcgcaagcgcgaggacgaggcagccgaagaagcacaggagcgtgaggaacgccgaagaaaactccaagaagagacacggcgacgcagagaggaagccgcagaggcggaagagagagcaaggaggaaacgtttgggcctgccggacctgaagaaggaggatagcgccgatgcggaagtggaagagggcgaggaggatatacctgatgaggaactcacaaataaactccgcgatttgggcgaaccggcgacgttattcggagagacacatggaagacggttgaagagatatcgccgtctgaccactgttgtcacgcgtggtcctatcccgacgacattgcaacttgtcgaggagaaggatatgaaggtctccgccgacaacatacccaaagacagcgcaggacgcaaatatctcttccgacagctcgcctcgtatttcaccatggttctgcgggaatgggagattgcgctcgcgcgggagagacaggcggctggggaggaaaaggcggcggagtcgtttgccagtaaagcagctatcaacgccatggtatcaagtcgtgagaacatgactccactgttccgcaagttcgagagcggcgacctcgacgacgatattcttaagcccgttgtcgagatcgtacaggccgcccaagagaggagatacgtcgacgccaacgacggctacttgaccttgagtatcggcaaggctgcctggcccatcggtgttaccatggtgggtatccacgagcgtagcgctcgcgagaagctgcacaatggcgagaaaggtcacgttatgggtgatgaggtcacgaggaagtatctacagagtatcaagcggtgtttgactttcgcccaggtacgctggccgcccgaggacattagacaacttatgggatag

SEQ ID NO: 5651 - protein, 357 aa, Muscodor strobelii
  misc_feature: SGI Peptide ID NO. 561604
  misc_feature (201)..(350): Pfam Id: PF02840 Pfam Desc: Prp18 domain
  misc_feature (131)..(160): Pfam Id: PF08799 Pfam Desc: pre-mRNA processing factor 4 (PRP4) like
  misc_feature (250)..(350): Pfam Id: PF02840 Pfam Desc: Prp18 domain
  misc_feature (1)..(357): NCBI GI: 46111303 Blast Desc: FG02533.1 [Gibberella zeae PH-1]
  misc_feature (1)..(357): NCBI GI: 156051818 Blast Desc: SS1G_07316 [Sclerotinia sclerotiorum 1980] gi|154705094|gb|EDO04833.1| SS1G_07316 [Sclerotinia sclerotiorum 1980]
  misc_feature (1)..(357): NCBI GI: 154291383 Blast Desc: BC1G_15215 [Botryotinia fuckeliana B05.10] gi|150846818|gb|EDN22011.1| BC1G_15215 [Botryotinia fuckeliana B05.10]
  misc_feature (27)..(357): NCBI GI: 256725795 Blast Desc: NECHADRAFT_16505 [Nectria haematococca mpVI 77-13-4]
  misc_feature (1)..(357): NCBI GI: 85081169 Blast Desc: NCU00158 [Neurospora crassa OR74A] gi|28917744|gb|EAA27435.1| conserved [Neurospora crassa OR74A]
  misc_feature (1)..(357): NCBI GI: 238838924 Blast Desc: pre-mRNA-splicing factor 18 [Microsporum canis CBS 113480]
  misc_feature (1)..(357): NCBI GI: 154282331 Blast Desc: conserved [Ajellomyces capsulatus NAm1] gi|150410141|gb|EDN05529.1| conserved [Ajellomyces capsulatus NAm1]
  misc_feature (1)..(357): NCBI GI: 171686004 Blast Desc: protein product [Podospora anserina] gi|170942963|emb|CAP68616.1| protein product [Podospora anserina]
  misc_feature (1)..(357): NCBI GI: 189208516 Blast Desc: potassium channel regulatory factor [Pyrenophora tritici-repentis Pt-1C-BFP] gi|187976684|gb|EDU43310.1| potassium channel regulatory factor [Pyrenophora tritici-repentis
  misc_feature (1)..(357): NCBI GI: 212533815 Blast Desc: mRNA splicing factor (Prp18), [Penicillium marneffei ATCC 18224] gi|210072428|gb|EEA26517.1| mRNA splicing factor (Prp18), [Penicillium marneffei ATCC 18224]
MDFASLMSSEIAKAKPDTTPSSSSNKKYQRRAEAEAEREAAYRTEQKALEEKRAARAAEKRKREDEAAEEAQEREERRRKLQEETRRRREEAAEAEERARRKRLGLPDLKKEDSADAEVEEGEEDIPDEELTNKLRDLGEPATLFGETHGRRLKRYRRLTTVVTRGPIPTTLQLVEEKDMKVSADNIPKDSAGRKYLFRQLASYFTMVLREWEIALARERQAAGEEKAAESFASKAAINAMVSSRENMTPLFRKFESGDLDDDILKPVVEIVQAAQERRYVDANDGYLTLSIGKAAWPIGVTMVGIHERSAREKLHNGEKGHVMGDEVTRKYLQSIKRCLTFAQVRWPPEDIRQLMG

SEQ ID NO: 5652 - DNA, 1431 bp, Muscodor strobelii
  misc_feature: SGI cDNA ID NO. 561605
  misc_feature: Encodes the peptide sequence at SEQ ID NO 5653
atgacggctaatcaggacatggttctccttcactactttacccagatggaaaaccagggtcacatgattgtccgagacatgccaaagctagatctcgatctttacgtagccaactacaaaggccgaactcgtttcgagcgccttctaaccattgggcagtgctcggtgccactctgtgttgatgctctaaaagctgccgttgccgaggctttgagcggcaaagatgtcgaacggtaccgtgaagctgttcatctcattcatgacgcagctccgaacgaaccagaggctaggttgcatcagagttggataaactctactgagagctcaaaccacgaaactacgaaacggttagaatctgaacttaagggatataagaataacctcatcaaggagagcattcgtattggtaatagagatcttggcgagcattacgagagcataggaaagttagacctggctcaggcagcgtacgtccagatgggtcccgatgcgagcacacagtcccatgttattgatgtcggcaaacacgtcatcggcactatgttacagaagcgcgactgggccggcatcctcgcaaactgcaacaagatggtctccgcgaagatgaccccggaggagatgacaatagagcagccctatcagagaatggtgacaggactggcaaatctgggcctcctgaaatatagagaggcggccagaagcttccttgatgttggagatgccatcaccgctcaacgttacaacgatgtcatgagtacaaatgacgttgctatctatggaggtttgctcgcacttgctaccttaaaccgagaagacttgcagttctacgtcttggataactcctccttccggaacttcctcgagctggagcctcatatccgtaaggcggtttcgatgtttgtcaacggtcgttacgcctcctgtctggagattcttgagacctaccgcaccgactactatctcgacgtctacctccagaaacacgttgactccatatactccgcaatcaggagcaagtgtatcattcattactttttgccgttctcatgcgtcaccctagacactatgaggaacacatttggcaagcccgacttagatgtagaaaaggaattggtgcagatgatcaagagcgggtccttgaaagcccggatcaatacaatcgacaagctccttgtggctgtttctacggagcctcgcattgcgatgcagatcaaaggcttagagactgccaagaagtacgagaaggaggccctggagcgcattcggcgcatgagtattgctgctgcggagctcgaggtgaaaggttcccaacggaaactaccaggaatgggttctgtacctagcagcgctatgggcggcagcttatccgatttcgacttcatgtaccccgacagtcaactaggaggaaccgatgagggaacaatactctga

SEQ ID NO: 5653 - protein, 476 aa, Muscodor strobelii
  misc_feature: SGI Peptide ID NO. 561605
  misc_feature (291)..(395): Pfam Id: PF01399 Pfam Desc: PCI domain
  misc_feature (9)..(454): NCBI GI: 39941542 Blast Desc: MGG_05682 [Magnaporthe grisea 70-15] gi|145022375|gb|EDK06395.1| MGG_05682 [Magnaporthe grisea 70-15]
  misc_feature (9)..(446): NCBI GI: 171686002 Blast Desc: protein product [Podospora anserina] gi|170942962|emb|CAP68615.1| protein product [Podospora anserina]
  misc_feature (9)..(444): NCBI GI: 256726199 Blast Desc: NECHADRAFT_43081 [Nectria haematococca mpVI 77-13-4]
  misc_feature (34)..(443): NCBI GI: 116207306 Blast Desc: CHGG_02946 [Chaetomium globosum CBS 148.51] gi|88183543|gb|EAQ91011.1| CHGG_02946 [Chaetomium globosum CBS 148.51]
  misc_feature (9)..(442): NCBI GI: 46111301 Blast Desc: FG02532.1 [Gibberella zeae PH-1]
  misc_feature (10)..(449): NCBI GI: 85081165 Blast Desc: NCU00157 [Neurospora crassa OR74A] gi|74613892|sp|Q7RXQ1.1|CSN1_NEUCR RecName: Full=COP9 signalosome complex subunit 1; Short=CSN complex subunit 1 conserved crassa
  misc_feature (9)..(459): NCBI GI: 261354272 Blast Desc: COP9 signalosome complex subunit 1 [Verticillium albo-atrum VaMs.102]
  misc_feature (41)..(434): NCBI GI: 154291044 Blast Desc: BC1G_15410 [Botryotinia fuckeliana B05.10] gi|150847139|gb|EDN22332.1| BC1G_15410 [Botryotinia fuckeliana B05.10]
  misc_feature (20)..(439): NCBI GI: 145253158 Blast Desc: An16g07940 [Aspergillus niger] gi|134083651|emb|CAK47043.1| protein product [Aspergillus niger]
  misc_feature (24)..(440): NCBI GI: 121719799 Blast Desc: COP9 signalosome subunit 1 (CsnA), [Aspergillus clavatus NRRL 1] gi|119404810|gb|EAW15172.1| COP9 signalosome subunit 1 (CsnA), [Aspergillus clavatus NRRL 1]
MTANQDMVLLHYFTQMENQGHMIVRDMPKLDLDLYVANYKGRTRFERLLTIGQCSVPLCVDALKAAVAEALSGKDVERYREAVHLIHDAAPNEPEARLHQSWINSTESSNHETTKRLESELKGYKNNLIKESIRIGNRDLGEHYESIGKLDLAQAAYVQMGPDASTQSHVIDVGKHVIGTMLQKRDWAGILANCNKMVSAKMTPEEMTIEQPYQRMVTGLANLGLLKYREAARSFLDVGDAITAQRYNDVMSTNDVAIYGGLLALATLNREDLQFYVLDNSSFRNFLELEPHIRKAVSMFVNGRYASCLEILETYRTDYYLDVYLQKHVDSIYSAIRSKCIIHYFLPFSCVTLDTMRNTFGKPDLDVEKELVQMIKSGSLKARINTIDKLLVAVSTEPRIAMQIKGLETAKKYEKEALERIRRMSIAAAELEVKGSQRKLPGMGSVPSSAMGGSLSDFDFMYPDSQLGGTDEGTIL

SEQ ID NO: 5654 - DNA, 3365 bp, Muscodor strobelii
  misc_feature: SGI EST ID NO. CUFF.14309.0
  misc_feature: Variant of the nucleotide sequence at SEQ ID NO 5652
cttgcctgcctagcactattttatgataatgaccgcgacttgataagtctggcagcaacaaccacggaaaacttcctggcttattccagaagcacaggcatatcggatcacctctgttgtcaggcagtgtgctccctgctcgatcaggaggtgtcctctaagctgaccactttcgacgacgttctgatacttgggcgcctatgctcagacttgtccttctcaagagtgcggcgattgtcctgatttcacagttggagcagcccgagccatccgtcattgcccatcatgacggctaatcaggacatggttctccttcactactttacccagatggaaaaccagggtcacatgattgtccgagacatgccaaagctagatctcgatctttacgtagccaactacaaaggccgaactcgtttcgagcgccttctaaccattgggcagtgctcggtgccactctgtgttgatgctctaaaagctgccgttgccgaggctttgagcggcaaagatgtcgaacggtaccgtgaagctgttcatctcattcatgacgcagctccgaacgaaccagaggctaggttgcatcagagttggataaactctactgagagctcaaaccacgaaactacgaaacggttagaatctgaacttaagggatataagaataacctcatcaaggagagcattcgtattggtaatagagatcttggcgagcattacgagagcataggaaagttagacctggctcaggcagcgtacgtccagatgggtcccgatgcgagcacacagtcccatgttattgatgtcggcaaacacgtcatcggcactatgttacagaagcgcgactgggccggcatcctcgcaaactgcaacaagatggtctccgcgaagatgaccccggaggagatgacaatagagcagccctatcagagaatggtgacaggactggcaaatctgggcctcctgaaatatagagaggcggccagaagcttccttgatgttggagatgccatcaccgctcaacgttacaacgatgtcatgagtacaaatgacgttgctatctatggaggtttgctcgcacttgctaccttaaaccgagaagacttgcagttctacgtcttggataactcctccttccggaacttcctcgagctggagcctcatatccgtaaggcggtttcgatgtttgtcaacggtcgttacgcctcctgtctggagattcttgagacctaccgcaccgactactatctcgacgtctacctccagaaacacgttgactccatatactccgcaatcaggagcaagtgtatcattcattactttttgccgttctcatgcgtcaccctagacactatgaggaacacatttggcaagcccgacttagatgtagaaaaggaattggtgcagatgatcaagagcgggtccttgaaagcccggatcaatacaatcgacaagctccttgtggctgtttctacggagcctcgcattgcgatgcagatcaaaggcttagagactgccaagaagtacgagaaggaggccctggagcgcattcggcgcatgagtattgctgctgcggagctcgaggtgaaaggttcccaacggaaactaccaggaatgggttctgtacctagcagcgctatgggcggcagcttatccgatttcgacttcatgtaccccgacagtcaactaggaggaaccgatgagggaacaatactctgagcactgatcgacgaaagccggaatgaacttgtgaagaaataggggcatgacgatcagccaaaagcatcaggaagtagatggtctctcctcgagactttaccatctgtgtcacattatgataaaagtgacgactagcacgacctacccatgaggtcagatgtgcggagaggagactggctgctagcggaaacttagcatcacgactcagaggagctgtgatgtagctagatgggagacatcaccagagatattgaggagcgcaagaaaagaacgcacggtgtgactagtcatagcatcgcaacttagtcccacgaaagagaagcgcacgtcaacggtagacagatcgttagatgctagatgtggacaatagatactcattttctctactactatcccataagttgtctaatgtcctcgggcggccagcgtacctgggcgaaagtcaaacaccgcttgatactctgtagatacttcctcgtgacctcatcacccataacgtgacctttctcgccattgtgcagcttctcgcgagcgctacgctcgtggatacccaccatggtaacaccgatgggccaggcagccttgccgatactcaaggtcaagtagccgtcgttggcgtcgacgtatctcctctcttgggcggcctgtacgatctcgacaacgggcttaagaatatcgtcgtcgaggtcgccgctctcgaacttgcggaacagtggagtcatgttctcacgacttgataccatggcgttgatagctgctttactggcaaacgactccgccgccttttcctccccagccgcctgtctctcccgcgcgagcgcaatctcccattcccgcagaaccatggtgaaatacgaggcgagctgtcggaagagatatttgcgtcctgcgctgtctttgggtatgttgtcggcggagaccttcatatccttctcctcgacaagttgcaatgtcgtcgggataggaccacgcgtgacaacagtggtcagacggcgatatctcttcaaccgtcttccatgtgtctctccgaataacgtcgccggttcgcccaaatcgcggagtttatttgtgagttcctcatcaggtatatcctcctcgccctcttccacttccgcatcggcgctatcctccttcttcaggtccggcaggcccaaacgtttcctccttgctctctcttccgcctctgcggcttcctctctgcgtcgccgtgtctcttcttggagttttcttcggcgttcctcacgctcctgtgcttcttcggctgcctcgtcctcgcgcttgcgcttctctgcggcgcgggctgcgcgcttttcctctagggctttttgttcggtgcggtaggcggcttcgcgctcggcctcggcttcggcacggcgttggtattttttgttcgaggaggaggagggtgtggtgtcgggtttcgcttttgcgatttcgctggacattagggatgcgaaatccatcttgactcgttccgttgccggcggcggggatttataccggatttcttttgcggcggtgcgatatctagatctatttctcagaaatggcaggaagcgaactcttgagtaggatgtctagcgagttgttgtgttcgcaagccaccggtagattaagatgcagatgctcgttccggtctctgggtgccg

SEQ ID NO: 5655 - DNA, 1692 bp, Muscodor strobelii
  misc_feature: SGI cDNA ID NO. 561606
  misc_feature: Encodes the peptide sequence at SEQ ID NO 5656
atggagggcaaacaacagatataccaggccccgaagttctcggactccgttgtcaccctcacggagccggagcccatcgagcccccgaagccagacaacaccctcacctggttccgacgacaaaccgatcacgccagcattacgcccgcagttttggagtggaggtacaaaggacagggcacgccggaggacccttacgttgttgacttcatccccaacgacaaccgcaacgcgctcctattcccagcatggaagaaatggtccatcactgtcttcaaggctatagctgtcttggctgtggccttcgtttctaccgcatattcatcaactttgggttctattatcgatgaattccacattactcccgaactcgccctctcgggtgtctccctcttcgttcttggttttgctatcggccccttgttctgggcacctttgggtgagatgtacggcagacagattacgttcttcatctcttatgcctttctgacacttttcaacggcatcactatttcctcacacaatattggcacgattgcggttctgcgattcttggctggggcgtttggcagctcacctttgaccaattctggaggtgtcattgccgatatgttcatgccaaaggatagaggtttcgctactgccctcttcgcaaccgctcctttcttgggaccggccatcggacctatcgctggtggttttctcagtgacgctgcaggatggcgctgggttgaggctttgatggccatcttcactggcaccctgtggatcgctgtatctctttacgtaccggaaacttatgcgcctgtcttgttgcgcaagcgagctgctgcccttaccaagcttactggccacacctatatgtcgaaacttgatgtcggccggccaaagaagacgaaattcgagcaattcaagatcgctctgtctcgaccctggatccttctcttccgcgagcctatcgtgttcttgctcactatctacctcgctattatctacggaacattgtatttgatgttcgcagcattccccattatcttccaagaaattcgacactggggtaacggtatcagcggtcttgcttacttgggtcttgctgttggtatggtttttgccgtgctctatagtggcttcgacaacatccggtaccaaaggatttgtatcgccaacggcggtcttcctgttccggaggctcgcctgcgtccttcgctcattggcagcttcctctgccccatcggactgttcatcttcgctttcacgaacggtcccaatgttcactggattgttcccatcatcgcctcaggtatcttcggagctggcctggtcgcagtgttcctcagctccaccaactacctcgtcgattcctacaccgtttacgctgcttctgtcctcgctgccaactcgattctccgatcgctgttcggtgcagcattccctctcttcacttcacccttgtacgctgccgcaggtatccactggggcagcaccgttcccgccttcctggccctcatctgccttcccttcccctggattttcaacaaatacggagcacgtatccgagccaaatgcaagtatgctgctgaggcccaggagatgctcaagaagatccgaatgcaaaatgcacaggctatgaagggtggtggtgctaatgacaaggttcggcttgaaaagccaaagccggctcaaaccgtctaa

SEQ ID NO: 5656 - protein, 563 aa, Muscodor strobelii
  misc_feature: SGI Peptide ID NO. 561606
  misc_feature (93)..(478): Pfam Id: PF07690 Pfam Desc: Major Facilitator Superfamily
  misc_feature (33)..(534): NCBI GI: 256733183 Blast Desc: NECHADRAFT_92827 [Nectria haematococca mpVI 77-13-4]
  misc_feature (47)..(524): NCBI GI: 85086887 Blast Desc: NCU00306 [Neurospora crassa OR74A] gi|28918872|gb|EAA28541.1| NCU00306 [Neurospora crassa OR74A]
  misc_feature (20)..(540): NCBI GI: 256724286 Blast Desc: [Nectria haematococca mpVI 77-13-4]
  misc_feature (20)..(556): NCBI GI: 46115766 Blast Desc: FG03725.1 [Gibberella zeae PH-1]
  misc_feature (20)..(556): NCBI GI: 226501004 Blast Desc: LOC100272831 [Zea mays] gi|194700944|gb|ACF84556.1| [Zea mays]
  misc_feature (23)..(541): NCBI GI: 121701221 Blast Desc: MFS multidrug transporter, [Aspergillus clavatus NRRL 1] gi|119397018|gb|EAW07449.1| MFS multidrug transporter, [Aspergillus clavatus NRRL 1]
  misc_feature (22)..(542): NCBI GI: 159131504 Blast Desc: MFS multidrug transporter, [Aspergillus fumigatus A1163]
  misc_feature (24)..(542): NCBI GI: 70995990 Blast Desc: MFS multidrug transporter [Aspergillus fumigatus Af293] gi|66850385|gb|EAL90712.1| MFS multidrug transporter, [Aspergillus fumigatus Af293]
  misc_feature (24)..(559): NCBI GI: 212531991 Blast Desc: MFS multidrug transporter, [Penicillium marneffei ATCC 18224] gi|210071516|gb|EEA25605.1| MFS multidrug transporter, [Penicillium marneffei ATCC 18224]
  misc_feature (21)..(560): NCBI GI: 115492087 Blast Desc: ATEG_00585 [Aspergillus terreus NIH2624] gi|114197531|gb|EAU39231.1| ATEG_00585 [Aspergillus terreus NIH2624]
MEGKQQIYQAPKFSDSVVTLTEPEPIEPPKPDNTLTWFRRQTDHASITPAVLEWRYKGQGTPEDPYVVDFIPNDNRNALLFPAWKKWSITVFKAIAVLAVAFVSTAYSSTLGSIIDEFHITPELALSGVSLFVLGFAIGPLFWAPLGEMYGRQITFFISYAFLTLFNGITISSHNIGTIAVLRFLAGAFGSSPLTNSGGVIADMFMPKDRGFATALFATAPFLGPAIGPIAGGFLSDAAGWRWVEALMAIFTGTLWIAVSLYVPETYAPVLLRKRAAALTKLTGHTYMSKLDVGRPKKTKFEQFKIALSRPWILLFREPIVFLLTIYLAIIYGTLYLMFAAFPIIFQEIRHWGNGISGLAYLGLAVGMVFAVLYSGFDNIRYQRICIANGGLPVPEARLRPSLIGSFLCPIGLFIFAFTNGPNVHWIVPIIASGIFGAGLVAVFLSSTNYLVDSYTVYAASVLAANSILRSLFGAAFPLFTSPLYAAAGIHWGSTVPAFLALICLPFPWIFNKYGARIRAKCKYAAEAQEMLKKIRMQNAQAMKGGGANDKVRLEKPKPAQTV

SEQ ID NO: 5657 - DNA, 2599 bp, Muscodor strobelii
  misc_feature: SGI EST ID NO. CUFF.14290.0
  misc_feature: Variant of the nucleotide sequence at SEQ ID NO 5655
atgtgttgaacaacgtgagaacattgcatacagccagcagggaacctcacaatgactctcctagcacgtgtcgagtcctgagagtcatcatgttcaccaggacaggcgagttgcacatcgagggccatgataggcgtggcgttcagggatctggcgcaaggtccttgcataactatgcacaagttcatccacttcagcatggtgtatgacagataccacatcgactagtaccacctacagtactcccatacgtacaatgctgcgtatgaagcactaggccgatggcgagagcgaagcctctttaattggcaacatggcacacggctattccaaagcggaaagaggtcaaaacatgggaccaagaccaaagtgccgagactcttatattgcttgctccccggaaagacttaccaccatcttccccggtttcgtttccttgtgtcgtgacgatttcgatttccttcttttcgcaaacccgcttttagatttcaattgctattcttgaggtctatcgctggcgaaaggctcatcatggagggcaaacaacagatataccaggccccgaagttctcggactccgttgtcaccctcacggagccggagcccatcgagcccccgaagccagacaacaccctcacctggttccgacgacaaaccgatcacgccagcattacgcccgcagttttggagtggaggtacaaaggacagggcacgccggaggacccttacgttgttgacttcatccccaacgacaaccgcaacgcgctcctattcccagcatggaagaaatggtccatcactgtcttcaaggctatagctgtcttggctgtggccttcgtttctaccgcatattcatcaactttgggttctattatcgatgaattccacattactcccgaactcgccctctcgggtgtctccctcttcgttcttggttttgctatcggccccttgttctgggcacctttgggtgagatgtacggcagacagattacgttcttcatctcttatgcctttctgacacttttcaacggcatcactatttcctcacacaatattggcacgattgcggttctgcgattcttggctggggcgtttggcagctcacctttgaccaattctggaggtgtcattgccgatatgttcatgccaaaggatagaggtttcgctactgccctcttcgcaaccgctcctttcttgggaccggccatcggacctatcgctggtggttttctcagtgacgctgcaggatggcgctgggttgaggctttgatggccatcttcactggcaccctgtggatcgctgtatctctttacgtaccggaaacttatgcgcctgtcttgttgcgcaagcgagctgctgcccttaccaagcttactggccacacctatatgtcgaaacttgatgtcggccggccaaagaagacgaaattcgagcaattcaagatcgctctgtctcgaccctggatccttctcttccgcgagcctatcgtgttcttgctcactatctacctcgctattatctacggaacattgtatttgatgttcgcagcattccccattatcttccaagaaattcgacactggggtaacggtatcagcggtcttgcttacttgggtcttgctgttggtatggtttttgccgtgctctatagtggcttcgacaacatccggtaccaaaggatttgtatcgccaacggcggtcttcctgttccggaggctcgcctgcgtccttcgctcattggcagcttcctctgccccatcggactgttcatcttcgctttcacgaacggtcccaatgttcactggattgttcccatcatcgcctcaggtatcttcggagctggcctggtcgcagtgttcctcagctccaccaactacctcgtcgattcctacaccgtttacgctgcttctgtcctcgctgccaactcgattctccgatcgctgttcggtgcagcattccctctcttcacttcacccttgtacgctgccgcaggtatccactggggcagcaccgttcccgccttcctggccctcatctgccttcccttcccctggattttcaacaaatacggagcacgtatccgagccaaatgcaagtatgctgctgaggcccaggagatgctcaagaagatccgaatgcaaaatgcacaggctatgaagggtggtggtgctaatgacaaggttcggcttgaaaagccaaagccggctcaaaccgtctaagactttacaatatgaagataacgtcttacggtgggaataacatttggtttacttgctgcatagcgatttcattttattaaatatacctaacgctcatgacttaatctgagcataaataggccttcgatccaccaatctcctcagcagcttcgctgattctatgtatataacttatagacggacgagggtaccttatgtataaacgcgcgcacggtctatactgctttttcactgttgcattgcattttagaagggagcttgaaaagaagcttaacagacgaacaagaattgagcttgacattcaatgcttttatcaccttcgcttcgttgttgattctattaccaccgtaacttttaacttatatattcatttccg

SEQ ID NO: 5658 - DNA, 909 bp, Muscodor strobelii
  misc_feature: SGI cDNA ID NO. 561607
  misc_feature: Encodes the peptide sequence at SEQ ID NO 5659
atgggaatatatgtgcggcctcagcccccgatgacattgttgccttcgagtcaggaaatgagctatcgcggtatcacgggccgcgacatacgacagcgtttcctgctctcatggacacaacgcattcaacggcccgttttgacggaattgagcgaggagtctattgaagctttcaagaatgtcgacgaagttaatttcattgcttatctcgatcgagaagacgaaatcgcgaaagccactttcgcgcaggtagcagccaagtactcagcagagtttagttttggcattgccaccgacgcatccgttctcaagaaagagaacgtggaagcaccgctcattcgctgctataagccccttgatggcgatacacacgagaccaaagacgtggcagattcagcagcgcttgagaaattcctagtcgagtcgtcacgcttagttattggggagctgacgcaatacaaccgacaacgtcttcttgatcgaggatggcccatggtatacgtattcgcgaaaacggagactgagcgcttggcgctgcgaaacactttgaaggagatggctcatggatattataaaagcctcacaatggtgagcgtcgatccgctggagtttccggacctgcaagaaaaactcggtcttgagactggtgccttccccgctggtgcggtccatcagctatcgagcgataggatctatccgtatccaaagggaagagagatcactccacgtcagcttcagagctggggcttagacgtgtatcaagggcgagtcaagccttggacaccgcctggagttacaacgacatacgacaatattggtggcggaatcagagcgacgcaaaaggtctccatcaacataccaaatatacctggtgttaaaatcagagttggtggtagagatgagctatga

SEQ ID NO: 5659 - protein, 302 aa, Muscodor strobelii
  misc_feature: SGI Peptide ID NO. 561607
  misc_feature (45)..(302): NCBI GI: 39941554 Blast Desc: MGG_05688 [Magnaporthe grisea 70-15] gi|145022381|gb|EDK06401.1| MGG_05688 [Magnaporthe grisea 70-15]
  misc_feature (35)..(259): NCBI GI: 85091979 Blast Desc: protein disulfide-isomerase precursor [Neurospora crassa OR74A] gi|28920568|gb|EAA29931.1| protein disulfide-isomerase precursor [Neurospora crassa OR74A]
  misc_feature (35)..(259): NCBI GI: 154319484 Blast Desc: BC1G_02223 [Botryotinia fuckeliana B05.10] gi|150855881|gb|EDN31073.1| BC1G_02223 [Botryotinia fuckeliana B05.10]
  misc_feature (12)..(259): NCBI GI: 256734349 Blast Desc: [Nectria haematococca mpVI 77-13-4]
  misc_feature (35)..(259): NCBI GI: 39941684 Blast Desc: MGG_05753 [Magnaporthe grisea 70-15] gi|145022461|gb|EDK06481.1| MGG_05753 [Magnaporthe grisea 70-15]
  misc_feature (35)..(259): NCBI GI: 156061643 Blast Desc: SS1G_02967 [Sclerotinia sclerotiorum 1980] gi|154700368|gb|EDO00107.1| SS1G_02967 [Sclerotinia sclerotiorum 1980]
  misc_feature (35)..(259): NCBI GI: 1709618 Blast Desc: PDI_HUMIN RecName: Full=Protein disulfide-isomerase; Short=PDI; Flags: Precursor gi|712823|gb|AAC60578.1| protein disulfide isomerase [Humicola insolens] gi|1089933|prf||2018168A
  misc_feature (35)..(259): NCBI GI: 116180648 Blast Desc: protein disulfide-isomerase precursor [Chaetomium globosum CBS 148.51] gi|88185249|gb|EAQ92717.1| protein disulfide-isomerase precursor [Chaetomium globosum CBS 148.51]
  misc_feature (35)..(259): NCBI GI: 171687485 Blast Desc: protein product [Podospora anserina] gi|170943704|emb|CAP69356.1| protein product [Podospora anserina]
  misc_feature (5)..(260): NCBI GI: 171678215 Blast Desc: protein product [Podospora anserina] gi|170937177|emb|CAP61834.1| protein product [Podospora anserina]
  misc_feature (35)..(259): SWISSPROT Homolog: EC 5.3.4.1 Protein disulfide-isomerase
MGIYVRPQPPMTLLPSSQEMSYRGITGRDIRQRFLLSWTQRIQRPVLTELSEESIEAFKNVDEVNFIAYLDREDEIAKATFAQVAAKYSAEFSFGIATDASVLKKENVEAPLIRCYKPLDGDTHETKDVADSAALEKFLVESSRLVIGELTQYNRQRLLDRGWPMVYVFAKTETERLALRNTLKEMAHGYYKSLTMVSVDPLEFPDLQEKLGLETGAFPAGAVHQLSSDRIYPYPKGREITPRQLQSWGLDVYQGRVKPWTPPGVTTTYDNIGGGIRATQKVSINIPNIPGVKIRVGGRDEL

SEQ ID NO: 5660 - DNA, 376 bp, Muscodor strobelii
  misc_feature: SGI EST ID NO. CUFF.14282.0
  misc_feature: Variant of the nucleotide sequence at SEQ ID NO 5658
atcgcgaaagccactttcgcgcaggtagcagccaagtactcagcagagtttagttttggcattgccaccgacgcatccgttctcaagaaagagaacgtggaagcaccgctcattcgctgctataagccccttgatggcgatacacacgagaccaaagacgtggcagattcagcagcgcttgagaaattcctagtcgagtcgtcacgcttagttattggggagctgacgcaatacaaccgacaacgtcttcttgatcgaggatggcccatggtatacgtattcgcgaaaacggagactgagcgcttggcgctgcgaaacactttgaaggagatggctcatggatattataaaagcctcacaatggtgagcgtcgatc

SEQ ID NO: 5661 - DNA, 975 bp, Muscodor strobelii
  misc_feature: SGI cDNA ID NO. 561608
  misc_feature: Reduced expression when VOC is produced
  misc_feature: Encodes the peptide sequence at SEQ ID NO 5662
atgtcgggcaacgggacaggagggtattatacgacggatgggaaaccactcatctcttttggtcctgatgagacttgcaaactcaacacatgtcccattgaattttcaatatttcgttatcgcccgtcactggctgccaatgtcacttttcttgtattatatacccttctcctggccctccatgtcggcatcggcgtaaagacgaggagttgggtggtctctggttgtatatgggctgggtgcattttcaatatcatcggatatgcgggtcgaattatcatgtggcagaatcctttctcatacccaggcttcattttgcagattctctttgttggttcagcaccggtttggtattcggctgccatttacatcacggttgctcagacttttcgacatctcgacgagtctctctcccgtgtaacgccgaagctgtactacgctgctttcatcccatctgatgttctggccttgatcttacaggctggaggaggtattctttcgactctcgggaaaggtgacggcgacagcctcagcacggccggcgtagatctctcgcttggtgggctggctttgcaggtcgcatcgatggcgattattagtgcagtcatagtcgactttatggtccgatactttcgccgtaatgatcggtcctgggccactacaacgctgcatttcaaggtgtttatcttgtcattgtctctcgcctgtcttctcatcctaatccgttgctcctaccgtgttgcagaactcagtgagggctacagcggtcgcctataccacgaagagattccattcatcattttagagggtgtgttgatcttttttgctgttctggcgcttgctttcggtcatcctggtctggcgttgaggaagaacatcgactatacgacgagctcatcggagtctacggtatcgcccgttgtggagaatggcattgagatgaagaatcggagctcgggctcaagtctgcaatag

SEQ ID NO: 5662 - protein, 324 aa, Muscodor strobelii
  misc_feature: SGI Peptide ID NO. 561608
  misc_feature (79)..(301): Pfam Id: PF04479 Pfam Desc: RTA1 like protein
  misc_feature (79)..(213): Pfam Id: PF04479 Pfam Desc: RTA1 like protein
  misc_feature (10)..(311): NCBI GI: 46124557 Blast Desc: FG06656.1 [Gibberella zeae PH-1]
  misc_feature (17)..(292): NCBI GI: 256729058 Blast Desc: NECHADRAFT_40389 [Nectria haematococca mpVI 77-13-4]
  misc_feature (17)..(317): NCBI GI: 145608800 Blast Desc: MGG_12848 [Magnaporthe grisea 70-15] gi|145016231|gb|EDK00721.1| MGG_12848 [Magnaporthe grisea 70-15]
  misc_feature (17)..(303): NCBI GI: 46138817 Blast Desc: FG10923.1 [Gibberella zeae PH-1]
  misc_feature (17)..(323): NCBI GI: 261352476 Blast Desc: parasitic phase-specific protein PSP-1 [Verticillium albo-atrum VaMs.102]
  misc_feature (19)..(302): NCBI GI: 256724179 Blast Desc: NECHADRAFT_97633 [Nectria haematococca mpVI 77-13-4]
  misc_feature (10)..(302): NCBI GI: 256732838 Blast Desc: NECHADRAFT_79446 [Nectria haematococca mpVI 77-13-4]
  misc_feature (18)..(271): NCBI GI: 258571992 Blast Desc: conserved [Uncinocarpus reesii 1704] gi|237905062|gb|EEP79463.1| conserved [Uncinocarpus reesii 1704]
  misc_feature (17)..(305): NCBI GI: 116203567 Blast Desc: CHGG_09667 [Chaetomium globosum CBS 148.51] gi|88175795|gb|EAQ83263.1| CHGG_09667 [Chaetomium globosum CBS 148.51]
  misc_feature (17)..(324): NCBI GI: 256733890 Blast Desc: NECHADRAFT_67059 [Nectria haematococca mpVI 77-13-4]
  misc_feature: Useful for introducing or modulating the production of volatile compounds
MSGNGTGGYYTTDGKPLISFGPDETCKLNTCPIEFSIFRYRPSLAANVTFLVLYTLLLALHVGIGVKTRSWVVSGCIWAGCIFNIIGYAGRIIMWQNPFSYPGFILQILFVGSAPVWYSAAIYITVAQTFRHLDESLSRVTPKLYYAAFIPSDVLALILQAGGGILSTLGKGDGDSLSTAGVDLSLGGLALQVASMAIISAVIVDFMVRYFRRNDRSWATTTLHFKVFILSLSLACLLILIRCSYRVAELSEGYSGRLYHEEIPFIILEGVLIFFAVLALAFGHPGLALRKNIDYTTSSSESTVSPVVENGIEMKNRSSGSSLQ

SEQ ID NO: 5663 - DNA, 1811 bp, Muscodor strobelii
  misc_feature: SGI EST ID NO. CUFF.14355.0
  misc_feature: Variant of the nucleotide sequence at SEQ ID NO 5661
caacctagcacttgaaaaatagagttgcttgtccctgttgcatgtacacgtagcctcctacgtcctcggggccttgttaggcacccgtttaattcttgcattactatcgttccactggctgatatccagaaagtggaggaattatctaccaaaaagagaaaacttcaggtcaggatattggtcttggtctcggtcttggtattcattattgcagtcacggtgtttgggatcgatatatgaggatcagttgttcccatcgatagaagaactacataaggtctgatcactttatcttgagttttccaagaagggtaggaccggctatcgaaaattgactaccgaactatcgagacagccttcacgccacagtctcctgcttcttattccccgtggtctgctgctcaccttgttctggcaacttcaacgtcgattacacctctattccaacagttacaacaacaacaatcatgtcgggcaacgggacaggagggtattatacgacggatgggaaaccactcatctcttttggtcctgatgagacttgcaaactcaacacatgtcccattgaattttcaatatttcgttatcgcccgtcactggctgccaatgtcacttttcttgtattatatacccttctcctggccctccatgtcggcatcggcgtaaagacgaggagttgggtggtctctggttgtatatgggctgggtgcattttcaatatcatcggatatgcgggtcgaattatcatgtggcagaatcctttctcatacccaggcttcattttgcagattcgtaagtcgaaattgaaccctccgcgagtttacagaatcctctgtgactaacggttaagtatagtctttgttggttcagcaccggtttggtattcggctgccatttacatcacggttgctcagacttttcgacatctcgacgagtctctctcccgtgtaacgccgaagctgtactacgctgctttcatcccatctgatgttctggccttgatcttacaggctggaggaggtattctttcgactctcgggaaaggtgacggcgacagcctcagcacggccggcgtagatctctcgcttggtgggctggctttgcaggtcgcatcgatggcgattattagtgcagtcatagtcgactttatggtccgatactttcgccgtaatgatcggtcctgggccactacaacgctgcatttcaaggtgtttatcttgtcattgtctctcgcctgtcttctcatcctaatccgttgctcctaccgtgttgcagaactcagtgagggctacagcggtcgcctataccacgaagagattccattcatcattttagagggtgtgttgatcttttttgctgttctggcgcttgctttcggtcatcctggtctggcgttgaggaagaacatcgactatacgacgagctcatcggagtctacggtatcgcccgttgtggagaatggcattgagatgaagaatcggagctcgggctcaagtctgcaatagataaacataggagaaagatgggtcgtgttttgcatttagatggttatattggtatacatttaggagtatggggatcatctagaaaagtgaatttcttacgaggtggaacgatttcttgcgggatagaagacaccaggtaatcctagtgttggcctttgattacgagtatctacctagttcttttgttcacgggtgaagctgttggtgataggagtcaaccgtgagttcaatattaaagtaaccaggcttagccttgggcgctccatagctccttcgcaatggttattgtttgctcgcgaagcaagg

SEQ ID NO: 5664 - DNA, 1200 bp, Muscodor strobelii
  misc_feature: SGI cDNA ID NO. 561609
  misc_feature: Encodes the peptide sequence at SEQ ID NO 5665
atgccgtcctctacaaatacagaagctgccaccctgccgagagaccctgctgcgcggttcccacccatatcaaaaaatcacatactaaattgttcctacgattcgtggtttcccaaatacaaagcgtcatgcattaaatcgcgaataattcccctctcgccagagttcattgaatacattcgtgaagacggtatcatactagcagacgaggatcatgaaaaagacgaagatgatgaagaatgggatccggcgccgtctacgttccggccgcctcccgaggaaatgggatccgactccgacttaagcgatgaggaagatgaaactccgcggttacctcctgatcagagatttccagagttacatcaaatcattatagataaaatagctgagttgggtggcgccgtagctccaaagcttaactggtcctcgccgactgacgcaacgtggatctcgccgcatcagaacaccgtcaagtgcacaacgcccaacgatatttacctactactaaagagctcaaacttcatcacgtatgatttagagcatgcatttgatgactgcacaccgtcggccggaatagggccgagccaagcacagactttcaagcccgtgctggtgttgcgatctttctttaacccgcatacggcaatggagttccgctgtttcgttaagcacaggaatctcgttggtatctcgcagcgagatccgaatttctaccagtttctactttctctgaagcctcacatcatctcaagggtcagccaactcttcaacaacaagcttcggtacacattcccggacggaaatttcgcgttcgatgtctacatcccggagggagatgacgagcccctggatcgggcaaggctgatcgatatcaacgcttgggcgccgcatacagattcgctacttttcgattggcaggaattgctggacttggttgttccgaacccagtgctcggcgtgatggatgaggaacaagagaaagataaagatagcgagacaagttcagacgatgaggacgaagatgactacgtaccagacctcaggttgatcgagaaagatgatccgtctgcatacaacttcagttcgtctaggttctcagctcacaagctgcctaaggacgtagtggacgcgagtatggatggacagggcggcatgcgtgatttcgtccagaaatggcgggaagtaactgagaggagataa

SEQ ID NO: 5665 - protein, 399 aa, Muscodor strobelii
  misc_feature: SGI Peptide ID NO. 561609
  misc_feature (36)..(380): Pfam Id: PF07065 Pfam Desc: D123
  misc_feature (16)..(399): NCBI GI: 46122319 Blast Desc: FG05537.1 [Gibberella zeae PH-1]
  misc_feature (5)..(399): NCBI GI: 39974969 Blast Desc: MGG_00369 [Magnaporthe grisea 70-15] gi|145018740|gb|EDK03019.1| MGG_00369 [Magnaporthe grisea 70-15]
  misc_feature (20)..(399): NCBI GI: 116208066 Blast Desc: CHGG_03326 [Chaetomium globosum CBS 148.51] gi|88183923|gb|EAQ91391.1| CHGG_03326 [Chaetomium globosum CBS 148.51]
  misc_feature (8)..(399): NCBI GI: 85083526 Blast Desc: NCU06497 [Neurospora crassa OR74A] gi|28918223|gb|EAA27901.1| conserved [Neurospora crassa OR74A]
  misc_feature (1)..(395): NCBI GI: 154300606 Blast Desc: BC1G_10891 [Botryotinia fuckeliana B05.10] gi|206558271|sp|A6SDA8.1|CD123_BOTFB RecName: Full=Cell division cycle protein 123 gi|150856498|gb|EDN31690.1| BC1G_10891 B05.10]
  misc_feature (1)..(395): NCBI GI: 156048444 Blast Desc: SS1G_08953 [Sclerotinia sclerotiorum 1980] gi|206557753|sp|A7EUE6.1|CD123_SCLS1 RecName: Full=Cell division cycle protein 123 gi|154693350|gb|EDN93088.1| SS1G_08953 1980]
  misc_feature (110)..(399): NCBI GI: 171686410 Blast Desc: protein product [Podospora anserina] gi|170943166|emb|CAP68819.1| protein product [Podospora anserina]
  misc_feature (14)..(399): NCBI GI: 238840645 Blast Desc: cell division cycle protein 123 [Microsporum canis CBS 113480]
  misc_feature (20)..(399): NCBI GI: 70984314 Blast Desc: cell cycle control protein Cdc123 [Aspergillus fumigatus Af293] gi|74667514|sp|Q4WDA4.1|CD123_ASPFU RecName: Full=Cell division cycle protein 123 gi|66845299|gb|EAL85634.1|
  misc_feature (7)..(399): NCBI GI: 67540848 Blast Desc: AN6594.2 [Aspergillus nidulans FGSC A4] gi|74594270|sp|Q5AYN6.1|CD123_EMENI RecName: Full=Cell division cycle protein 123 gi|40738933|gb|EAA58123.1| AN6594.2 nidulans
MPSSTNTEAATLPRDPAARFPPISKNHILNCSYDSWFPKYKASCIKSRIIPLSPEFIEYIREDGIILADEDHEKDEDDEEWDPAPSTFRPPPEEMGSDSDLSDEEDETPRLPPDQRFPELHQIIIDKIAELGGAVAPKLNWSSPTDATWISPHQNTVKCTTPNDIYLLLKSSNFITYDLEHAFDDCTPSAGIGPSQAQTFKPVLVLRSFFNPHTAMEFRCFVKHRNLVGISQRDPNFYQFLLSLKPHIISRVSQLFNNKLRYTFPDGNFAFDVYIPEGDDEPLDRARLIDINAWAPHTDSLLFDWQELLDLVVPNPVLGVMDEEQEKDKDSETSSDDEDEDDYVPDLRLIEKDDPSAYNFSSSRFSAHKLPKDVVDASMDGQGGMRDFVQKWREVTERR

SEQ ID NO: 5666 - DNA, 1864 bp, Muscodor strobelii
  misc_feature: SGI EST ID NO. CUFF.14358.1
  misc_feature: Variant of the nucleotide sequence at SEQ ID NO 5664
ccgaacgtaaaatttcttatctggtcttgaataaaccttctgttattcatcttgagccacttcgatctcattttgaacattatttcaggatctgcacttgaaaaaaatgccgtcctctacaaatacagaagctgccaccctgccgagagaccctgctgcgcggttcccacccatatcaaaaaatcacatactaaattgttcctacgattcgtggtttcccaaatacaaagcgtcatgcattaaatcgcgaataattcccctctcgccagagttcattgaatacattcgtgaagacggtatcatactagcagacgaggatcatgaaaaagacgaagatgatgaagaatgggatccggcgccgtctacgttccggccgcctcccgaggaaatgggatccgactccgacttaagcgatgaggaagatgaaactccgcggttacctcctgatcagagatttccagagttacatcaaatcattatagataaaatagctgagttgggtggcgccgtagctccaaagcttaactggtcctcgccgactgacgcaacgtggatctcgccgcatcagaacaccgtcaagtgcacaacgcccaacgatatttacctactactaaagagctcaaacttcatcacgtatgatttagagcatgcatttgatgactgcacaccgtcggccggaatagggccgagccaagcacagactttcaagcccgtgctggtgttgcgatctttctttaacccgcatacggcaatggagttccgctgtttcgttaagcacaggaatctcgttggtatctcgcagcgagatccgaatttctaccagtttctactttctctgaagcctcacatcatctcaagggtcagccaactcttcaacaacaagcttcggtacacattcccggacggaaatttcgcgttcgatgtctacatcccggagggagatgacgagcccctggatcgggcaaggctgatcgatatcaacgcttgggcgccgcatacagattcgctacttttcgattggcaggaattgctggacttggttgttccgaacccagtgctcggcgtgatggatgaggaacaagagaaagataaagatagcgagacaagttcagacgatgaggacgaagatgactacgtaccagacctcaggttgatcgagaaagatgatccgtctgcatacaacttcagttcgtctaggttctcagctcacaagctgcctaaggacgtagtggacgcgagtatggatggacagggcggcatgcgtgatttcgtccagaaatggcgggaagtaactgagaggagataacaagttgccagtcagggaatgagggaatgagagaatgaaggaatgaaggaatgaaagtcattgcgctgacattgtgcgcatcaccatttacccgtgatacgagttttagtcccgtcttgtggtctaccgtatcggttcatgagcgaaatgatctggcaataggggcacaggaggtaccgattgtgcgagttgcatctttactgacctgtgttgcatccctcatagctgctgaggctgtgtgctatcaaaggatttggcatcacgcgtctgtctccgatttctcgaaaacaggaacctttgtcaccagccccgatgatcttgtatttttacacagattagccaagatcatgacatagcgacgacgtaactcgctctttacgaaattgtgttggctttataatgtctactaagacttgtagtttatcaacagtcttggcgatgcgcgtcgttgaatcctccgatgtgtaacgggaccgtttgtactaccggccttgagagccttgttcctacacagaccggtgcacgagttaagatgactatgacgaatcctaggaagga

SEQ ID NO: 5667 - DNA, 555 bp, Muscodor strobelii
  misc_feature: SGI cDNA ID NO. 561610
  misc_feature: Encodes the peptide sequence at SEQ ID NO 5668
atggagttccgctgtttcgttaagcacaggaatctcgttggtatctcgcagcgagatccgaatttctaccagtttctactttctctgaagcctcacatcatctcaagggtcagccaactcttcaacaacaagcttcggtacacattcccggacggaaatttcgcgttcgatgtctacatcccggagggagatgacgagcccctggatcgggcaaggctgatcgatatcaacgcttgggcgccgcatacagattcgctacttttcgattggcaggaattgctggacttggttgttccgaacccagtgctcggcgtgatggatgaggaacaagagaaagataaagatagcgagacaagttcagacgatgaggacgaagatgactacgtaccagacctcaggttgatcgagaaagatgatccgtctgcatacaacttcagttcgtctaggttctcagctcacaagctgcctaaggacgtagtggacgcgagtatggatggacagggcggcatgcgtgatttcgtccagaaatggcgggaagtaactgagaggagataa

SEQ ID NO: 5668 - protein, 184 aa, Muscodor strobelii
  misc_feature: SGI Peptide ID NO. 561610
  misc_feature (1)..(165): Pfam Id: PF07065 Pfam Desc: D123
  misc_feature (1)..(184): NCBI GI: 39974969 Blast Desc: MGG_00369 [Magnaporthe grisea 70-15] gi|145018740|gb|EDK03019.1| MGG_00369 [Magnaporthe grisea 70-15]
  misc_feature (1)..(184): NCBI GI: 256729691 Blast Desc: [Nectria haematococca mpVI 77-13-4]
  misc_feature (1)..(184): NCBI GI: 171686410 Blast Desc: protein product [Podospora anserina] gi|170943166|emb|CAP68819.1| protein product [Podospora anserina]
  misc_feature (1)..(184): NCBI GI: 46122319 Blast Desc: FG05537.1 [Gibberella zeae PH-1]
  misc_feature (1)..(184): NCBI GI: 85083526 Blast Desc: NCU06497 [Neurospora crassa OR74A] gi|28918223|gb|EAA27901.1| conserved [Neurospora crassa OR74A]
  misc_feature (1)..(184): NCBI GI: 116208066 Blast Desc: CHGG_03326 [Chaetomium globosum CBS 148.51] gi|88183923|gb|EAQ91391.1| CHGG_03326 [Chaetomium globosum CBS 148.51]
  misc_feature (1)..(180): NCBI GI: 154300606 Blast Desc: BC1G_10891 [Botryotinia fuckeliana B05.10] gi|206558271|sp|A6SDA8.1|CD123_BOTFB RecName: Full=Cell division cycle protein 123 gi|150856498|gb|EDN31690.1| BC1G_10891 B05.10]
  misc_feature (1)..(180): NCBI GI: 156048444 Blast Desc: SS1G_08953 [Sclerotinia sclerotiorum 1980] gi|206557753|sp|A7EUE6.1|CD123_SCLS1 RecName: Full=Cell division cycle protein 123 gi|154693350|gb|EDN93088.1| SS1G_08953 1980]
  misc_feature (27)..(181): NCBI GI: 261358137 Blast Desc: cell cycle control protein Cdc123 [Verticillium albo-atrum VaMs.102]
  misc_feature (1)..(184): NCBI GI: 70984314 Blast Desc: cell cycle control protein Cdc123 [Aspergillus fumigatus Af293] gi|74667514|sp|Q4WDA4.1|CD123_ASPFU RecName: Full=Cell division cycle protein 123 gi|66845299|gb|EAL85634.1|
MEFRCFVKHRNLVGISQRDPNFYQFLLSLKPHIISRVSQLFNNKLRYTFPDGNFAFDVYIPEGDDEPLDRARLIDINAWAPHTDSLLFDWQELLDLVVPNPVLGVMDEEQEKDKDSETSSDDEDEDDYVPDLRLIEKDDPSAYNFSSSRFSAHKLPKDVVDASMDGQGGMRDFVQKWREVTERR

SEQ ID NO: 5669 - DNA, 1917 bp, Muscodor strobelii
  misc_feature: SGI EST ID NO. CUFF.14357.0
  misc_feature: Variant of the nucleotide sequence at SEQ ID NO 5667
ccgaacgtaaaatttcttatctggtcttgaataaaccttctgttattcatcttgagccacttcgatctcattttgaacattatttcaggatctgcacttgaaaaaaatgccgtcctctacaaatacagaagctgccaccctgccgagagaccctgctgcgcggttcccacccatatcaaaaaatcacatactaaattgttcctacgattcgtggtttcccaagtaaatcatgcctctctttttcatgcctcacttgcacttacatacagatacagatacaaagcgtcatgcattaaatcgcgaataattcccctctcgccagagttcattgaatacattcgtgaagacggtatcatactagcagacgaggatcatgaaaaagacgaagatgatgaagaatgggatccggcgccgtctacgttccggccgcctcccgaggaaatgggatccgactccgacttaagcgatgaggaagatgaaactccgcggttacctcctgatcagagatttccagagttacatcaaatcattatagataaaatagctgagttgggtggcgccgtagctccaaagcttaactggtcctcgccgactgacgcaacgtggatctcgccgcatcagaacaccgtcaagtgcacaacgcccaacgatatttacctactactaaagagctcaaacttcatcacgtatgatttagagcatgcatttgatgactgcacaccgtcggccggaatagggccgagccaagcacagactttcaagcccgtgctggtgttgcgatctttctttaacccgcatacggcaatggagttccgctgtttcgttaagcacaggaatctcgttggtatctcgcagcgagatccgaatttctaccagtttctactttctctgaagcctcacatcatctcaagggtcagccaactcttcaacaacaagcttcggtacacattcccggacggaaatttcgcgttcgatgtctacatcccggagggagatgacgagcccctggatcgggcaaggctgatcgatatcaacgcttgggcgccgcatacagattcgctacttttcgattggcaggaattgctggacttggttgttccgaacccagtgctcggcgtgatggatgaggaacaagagaaagataaagatagcgagacaagttcagacgatgaggacgaagatgactacgtaccagacctcaggttgatcgagaaagatgatccgtctgcatacaacttcagttcgtctaggttctcagctcacaagctgcctaaggacgtagtggacgcgagtatggatggacagggcggcatgcgtgatttcgtccagaaatggcgggaagtaactgagaggagataacaagttgccagtcagggaatgagggaatgagagaatgaaggaatgaaggaatgaaagtcattgcgctgacattgtgcgcatcaccatttacccgtgatacgagttttagtcccgtcttgtggtctaccgtatcggttcatgagcgaaatgatctggcaataggggcacaggaggtaccgattgtgcgagttgcatctttactgacctgtgttgcatccctcatagctgctgaggctgtgtgctatcaaaggatttggcatcacgcgtctgtctccgatttctcgaaaacaggaacctttgtcaccagccccgatgatcttgtatttttacacagattagccaagatcatgacatagcgacgacgtaactcgctctttacgaaattgtgttggctttataatgtctactaagacttgtagtttatcaacagtcttggcgatgcgcgtcgttgaatcctccgatgtgtaacgggaccgtttgtactaccggccttgagagccttgttcctacacagaccggtgcacgagttaagatgactatgacgaatcctaggaagga

SEQ ID NO: 5670 - DNA, 519 bp, Muscodor strobelii
  misc_feature: SGI cDNA ID NO. 561611
  misc_feature: Encodes the peptide sequence at SEQ ID NO 5671
atgtccgacaacgtaggtctatccacgccgcgaggcagcggcacgtccggctacgtccagcgcaacctggcacacatgaagccgcgcgaccgcgaccgagcagcgccctacaaccgcgatctcgaccacctcaagcaccgccagcgcatgcccgacaaagggatcctagagcatgatcgaaagcgcgagatagaagtcaaggtctttgagcttcgggaccagctagaagacgaaggactcgaggaagacgagatcaacaaacgatgcgacactctgcgtaaagaactccaagataaaatgaacagatcgggtcgcgacgcgccgagaaggggaatcaaatcccatcaggttcatgagctcgcagacgccaagatcaaagagagcgagaggctcaggaacgcgctgaagatcagcaaaaactacgaggagggcggtcattggaagaggcaggaggagcggttgcgaaaagcgctcgatcgggaagcgagcgagatcaaggatgaaagggagagggactga

SEQ ID NO: 5671 - protein, 172 aa, Muscodor strobelii
  misc_feature: SGI Peptide ID NO. 561611
  misc_feature (49)..(93): Pfam Id: PF08312 Pfam Desc: cwf21
  misc_feature (1)..(167): NCBI GI: 256729882 Blast Desc: NECHADRAFT_29205 [Nectria haematococca mpVI 77-13-4]
  misc_feature (1)..(159): NCBI GI: 261358136 Blast Desc: pre-mRNA-splicing factor CWC21 [Verticillium albo-atrum VaMs.102]
  misc_feature (1)..(171): NCBI GI: 46122321 Blast Desc: FG05538.1 [Gibberella zeae PH-1] gi|82592777|sp|Q4IB70.1|CWC21_GIBZE RecName: Full=Pre-mRNA-splicing factor CWC21
  misc_feature (1)..(167): NCBI GI: 116208068 Blast Desc: CHGG_03327 [Chaetomium globosum CBS 148.51] gi|88183924|gb|EAQ91392.1| CHGG_03327 [Chaetomium globosum CBS 148.51]
  misc_feature (1)..(163): NCBI GI: 85083530 Blast Desc: pre-mRNA splicing factor CWC21 [Neurospora crassa OR74A] gi|74614092|sp|Q7RYH7.1|CWC21_NEUCR RecName: Full=Pre-mRNA-splicing factor cwc-21 gi|28918224|gb|EAA27902.1|
  misc_feature (1)..(170): NCBI GI: 39974967 Blast Desc: MGG_00370 [Magnaporthe grisea 70-15] gi|145018739|gb|EDK03018.1| MGG_00370 [Magnaporthe grisea 70-15]
  misc_feature (1)..(159): NCBI GI: 156048446 Blast Desc: SS1G_08954 [Sclerotinia sclerotiorum 1980] gi|154693351|gb|EDN93089.1| SS1G_08954 [Sclerotinia sclerotiorum 1980]
  misc_feature (1)..(160): NCBI GI: 154300604 Blast Desc: BC1G_10890 [Botryotinia fuckeliana B05.10] gi|150856497|gb|EDN31689.1| BC1G_10890 [Botryotinia fuckeliana B05.10]
  misc_feature (1)..(172): NCBI GI: 169597577 Blast Desc: SNOG_01575 [Phaeosphaeria nodorum SN15] gi|111070104|gb|EAT91224.1| SNOG_01575 [Phaeosphaeria nodorum SN15]
  misc_feature (1)..(158): NCBI GI: 171686408 Blast Desc: protein product [Podospora anserina] gi|170943165|emb|CAP68818.1| protein product [Podospora anserina]
MSDNVGLSTPRGSGTSGYVQRNLAHMKPRDRDRAAPYNRDLDHLKHRQRMPDKGILEHDRKREIEVKVFELRDQLEDEGLEEDEINKRCDTLRKELQDKMNRSGRDAPRRGIKSHQVHELADAKIKESERLRNALKISKNYEEGGHWKRQEERLRKALDREASEIKDERERD

SEQ ID NO: 5672 - DNA, 2344 bp, Muscodor strobelii
  misc_feature: SGI EST ID NO. CUFF.14484.0
  misc_feature: Variant of the nucleotide sequence at SEQ ID NO 5670
cgccaactgacaccgcctttctttccattcctaactcgacattcatatccctcgccaccatcaacatacccattgcgccctctgtaaccaaacaaaatctacaattatgtccgacaacgtaggtctatccacgccgcgaggcagcggcacgtccggctacgtccagcgcaacctggcacacatgaagccgcgcgaccgcgaccgagcagcgccctacaaccgcgatctcgaccacctcaagcaccgccagcgcatgcccgacaaagggatcctagagcatgatcgaaagcgcgagatagaagtcaaggtctttgagcttcgggaccagctagaagacgaaggactcgaggaagacgagatcaacaaacgatgcgacactctgcgtaaagaactccaagataaaatgaacagatcgggtcgcgacgcgccgagaaggggaatcaaatcccatcaggttcatgagctcgcagacgccaagatcaaagagagcgagaggctcaggaacgcgctgaagatcagcaaaaactacgaggagggcggtcattggaagaggcaggaggagcggttgcgaaaagcgctcgatcgggaagcgagcgagatcaaggatgaaagggagagggactgatcatttcacgcatccgagtactcggctttatgggcttcagcagcatgggctttggcagcatcacttgtacagaaggttcacgaaaacagcatattggtattagtcttacgcatggcgtcgggcgtttgatttcgagtcagtcggccaatctggcttaagttgtcttgtttactctagcattcataacggaatgacaatcatggttgatattcaaaatattggatttgtacatgtgtccatgcctatctatgttgttggcccccgtctatgtccttgggtatcatgttttcgattgtttagttcgccgcaagtatttccgcagcatcgaccggcggtgccctatcttctttcccgccgtttctcttgagttcttcagcctgcgcctctgcttccttttgttttctctgcctctcatggctgacgtaggtcgcataacgcagacttcccagagttaacacagccatgaagataatgcccagtacagaacgccgaataagtacccaacgtaggccttctatttcagatctcgagtcactgttaagtgtgacgctgattttgaggttgatttgttgaatctgaaggagagagtaagtgagaatacttatattctgataagggggcgggacttacagcactctccatgttcctctgctcttctcgcacattcattctccgatcattaaacagccccttcacatcgtccttcagtgtcatgatgtcctggctcatacgctgggtcaagatatcgacttcgtgctgcagatgcgtacgctgctggcgggtgtgctcatcagcggctttcctattgttcttaacctcagtgctgagctctgagcaggcggcgcgaaagagataggtctcgttgtccacatcgctcttgctcactaggccgtcctgagcgacgtctaagttttgtgctaagagtgctctgacagccttcatgacggtgatggcttggggctgagtgtagctcccctcctccagttgcttaacgagggtgtaggtgtcgaagtggtgcacatatggcggcttcgatatgtgaggatgctgcacagactccgggggaggcatgtgtaagactgcctccatggggccgctgtgctgcatcctctcttcggatgcaacctgctggggcgtttgagtagcagttttcttggttacctgcccctcagacgagtcggcctcggcagtagcctcgtttggcgggatgtcggtctcatttggatcttctgcctcctgcgccgagtttctctcctgtgcagcctcctgtatctcggaagatgttgggtcgtgggactgggcgggtggctgggaggtcgtcttctcgggcttcttgtctgggtgaggcaatttcacagcctcgggcgaaacagggatgggttcgacagccgtgccatgtctctcaaatgcagcctgtccagcccgtgcagaggttgcgaaattagaagtgtgatgtgcagcatgttgttgtcgggagcggcaatccggtttgcgatatcgggtctttgtggtttgcgccgcagacggggatgcagactcggcgaggcgagcagctcggaagagatgagggtacaaaaagctaagacgaacggtggacatgatcaatggatatgtagcgattagctggacgtttggacaaaacaagacatgattggggtgcaagttaaaaggagtgacgaggttgaggatggtatctcatagttggctttgctataggta

SEQ ID NO: 5673 - DNA, 1248 bp, Muscodor strobelii
  misc_feature: SGI cDNA ID NO. 561612
  misc_feature: Encodes the peptide sequence at SEQ ID NO 5674
atgtccaccgttcgtcttagctttttgtaccctcatctcttccgagctgctcgcctcgccgagtctgcatccccgtctgcggcgcaaaccacaaagacccgatatcgcaaaccggattgccgctcccgacaacaacatgctgcacatcacacttctaatttcgcaacctctgcacgggctggacaggctgcatttgagagacatggcacggctgtcgaacccatccctgtttcgcccgaggctgtgaaattgcctcacccagacaagaagcccgagaagacgacctcccagccacccgcccagtcccacgacccaacatcttccgagatacaggaggctgcacaggagagaaactcggcgcaggaggcagaagatccaaatgagaccgacatcccgccaaacgaggctactgccgaggccgactcgtctgaggggcaggtaaccaagaaaactgctactcaaacgccccagcaggttgcatccgaagagaggatgcagcacagcggccccatggaggcagtcttacacatgcctcccccggagtctgtgcagcatcctcacatatcgaagccgccatatgtgcaccacttcgacacctacaccctcgttaagcaactggaggaggggagctacactcagccccaagccatcaccgtcatgaaggctgtcagagcactcttagcacaaaacttagacgtcgctcaggacggcctagtgagcaagagcgatgtggacaacgagacctatctctttcgcgccgcctgctcagagctcagcactgaggttaagaacaataggaaagccgctgatgagcacacccgccagcagcgtacgcatctgcagcacgaagtcgatatcttgacccagcgtatgagccaggacatcatgacactgaaggacgatgtgaaggggctgtttaatgatcggagaatgaatgtgcgagaagagcagaggaacatggagagtgctattcaacaaatcaacctcaaaatcagcgtcacacttaacagtgactcgagatctgaaatagaaggcctacgttgggtacttattcggcgttctgtactgggcattatcttcatggctgtgttaactctgggaagtctgcgttatgcgacctacgtcagccatgagaggcagagaaaacaaaaggaagcagaggcgcaggctgaagaactcaagagaaacggcgggaaagaagatagggcaccgccggtcgatgctgcggaaatacttgcggcgaactaa

SEQ ID NO: 5674 - protein, 415 aa, Muscodor strobelii
  misc_feature: SGI Peptide ID NO. 561612
  misc_feature (6)..(407): NCBI GI: 145611316 Blast Desc: MGG_11570 [Magnaporthe grisea 70-15] gi|145018620|gb|EDK02899.1| MGG_11570 [Magnaporthe grisea 70-15]
  misc_feature (5)..(415): NCBI GI: 85091684 Blast Desc: NCU08994 [Neurospora crassa OR74A] gi|28920418|gb|EAA29786.1| conserved [Neurospora crassa OR74A]
  misc_feature (1)..(415): NCBI GI: 261358305 Blast Desc: conserved [Verticillium albo-atrum VaMs.102]
  misc_feature (1)..(415): NCBI GI: 116207510 Blast Desc: CHGG_03048 [Chaetomium globosum CBS 148.51] gi|88183645|gb|EAQ91113.1| CHGG_03048 [Chaetomium globosum CBS 148.51]
  misc_feature (2)..(415): NCBI GI: 256732811 Blast Desc: NECHADRAFT_100220 [Nectria haematococca mpVI 77-13-4]
  misc_feature (1)..(415): NCBI GI: 156048626 Blast Desc: SS1G_09045 [Sclerotinia sclerotiorum 1980] gi|154693441|gb|EDN93179.1| SS1G_09045 [Sclerotinia sclerotiorum 1980]
  misc_feature (1)..(415): NCBI GI: 154297461 Blast Desc: BC1G_12327 [Botryotinia fuckeliana B05.10] gi|150858523|gb|EDN33715.1| BC1G_12327 [Botryotinia fuckeliana B05.10]
  misc_feature (5)..(402): NCBI GI: 46124663 Blast Desc: FG06709.1 [Gibberella zeae PH-1]
  misc_feature (193)..(415): NCBI GI: 171686310 Blast Desc: protein product [Podospora anserina] gi|170943116|emb|CAP68769.1| protein product [Podospora anserina]
  misc_feature (1)..(385): NCBI GI: 189194846 Blast Desc: conserved [Pyrenophora tritici-repentis Pt-1C-BFP] gi|187979640|gb|EDU46266.1| conserved [Pyrenophora tritici-repentis Pt-1C-BFP]
MSTVRLSFLYPHLFRAARLAESASPSAAQTTKTRYRKPDCRSRQQHAAHHTSNFATSARAGQAAFERHGTAVEPIPVSPEAVKLPHPDKKPEKTTSQPPAQSHDPTSSEIQEAAQERNSAQEAEDPNETDIPPNEATAEADSSEGQVTKKTATQTPQQVASEERMQHSGPMEAVLHMPPPESVQHPHISKPPYVHHFDTYTLVKQLEEGSYTQPQAITVMKAVRALLAQNLDVAQDGLVSKSDVDNETYLFRAACSELSTEVKNNRKAADEHTRQQRTHLQHEVDILTQRMSQDIMTLKDDVKGLFNDRRMNVREEQRNMESAIQQINLKISVTLNSDSRSEIEGLRWVLIRRSVLGIIFMAVLTLGSLRYATYVSHERQRKQKEAEAQAEELKRNGGKEDRAPPVDAAEILAAN

SEQ ID NO: 5675 - DNA, 2346 bp, Muscodor strobelii
  misc_feature: SGI EST ID NO. CUFF.14485.1
  misc_feature: Variant of the nucleotide sequence at SEQ ID NO 5673
tacctatagcaaagccaactatgagataccatcctcaacctcgtcactccttttaacttgcaccccaatcatgtcttgttttgtccaaacgtccagctaatcgctacatatccattgatcatgtccaccgttcgtcttagctttttgtaccctcatctcttccgagctgctcgcctcgccgagtctgcatccccgtctgcggcgcaaaccacaaagacccgatatcgcaaaccggattgccgctcccgacaacaacatgctgcacatcacacttctaatttcgcaacctctgcacgggctggacaggctgcatttgagagacatggcacggctgtcgaacccatccctgtttcgcccgaggctgtgaaattgcctcacccagacaagaagcccgagaagacgacctcccagccacccgcccagtcccacgacccaacatcttccgagatacaggaggctgcacaggagagaaactcggcgcaggaggcagaagatccaaatgagaccgacatcccgccaaacgaggctactgccgaggccgactcgtctgaggggcaggtaaccaagaaaactgctactcaaacgccccagcaggttgcatccgaagagaggatgcagcacagcggccccatggaggcagtcttacacatgcctcccccggagtctgtgcagcatcctcacatatcgaagccgccatatgtgcaccacttcgacacctacaccctcgttaagcaactggaggaggggagctacactcagccccaagccatcaccgtcatgaaggctgtcagagcactcttagcacaaaacttagacgtcgctcaggacggcctagtgagcaagagcgatgtggacaacgagacctatctctttcgcgccgcctgctcagagctcagcactgaggttaagaacaataggaaagccgctgatgagcacacccgccagcagcgtacgcatctgcagcacgaagtcgatatcttgacccagcgtatgagccaggacatcatgacactgaaggacgatgtgaaggggctgtttaatgatcggagaatgaatgtgcgagaagagcagaggaacatggagagtgctattcaacaaatcaacctcaaaatcagcgtcacacttaacagtgactcgagatctgaaatagaaggcctacgttgggtacttattcggcgttctgtactgggcattatcttcatggctgtgttaactctgggaagtctgcgttatgcgacctacgtcagccatgagaggcagagaaaacaaaaggaagcagaggcgcaggctgaagaactcaagagaaacggcgggaaagaagatagggcaccgccggtcgatgctgcggaaatacttgcggcgaactaaacaatcgaaaacatgatacccaaggacatagacgggggccaacaacatagataggcatggacacatgtacaaatccaatattttgaatatcaaccatgattgtcattccgttatgaatgctagagtaaacaagacaacttaagccagattggccgactgactcgaaatcaaacgcccgacgccatgcgtaagactaataccaatatgctgttttcgtgaaccttctgtacaagtgatgctgccaaagcccatgctgctgaagcccataaagccgagtactcggatgcgtgaaatgatcagtccctctccctttcatccttgatctcgctcgcttcccgatcgagcgcttttcgcaaccgctcctcctgcctcttccaatgaccgccctcctcgtagtttttgctgatcttcagcgcgttcctgagcctctcgctctctttgatcttggcgtctgcgagctcatgaacctgatgggatttgattccccttctcggcgcgtcgcgacccgatctgttcattttatcttggagttctttacgcagagtgtcgcatcgtttgttgatctcgtcttcctcgagtctggtagccgttagtcctttgtcgcttgcagagccgattggtcctgggtgaacgtacccttcgtcttctagctggtcccgaagctcaaagaccttgacttctatctcgcgctttcgatcatgctctaggatccctttgtcgggcatgcgctggcggtgcttgaggtggtcgagatcgcggttgtagggcgctgctcggtcgcggtcgcgcggcttcatgtgtgccaggttgcgctggacgtagccggacgtgccgctgcctcgcggcgtggatagacctacgttgtcggacataattgtagattttgtttggttacagagggcgcaatgggtatgttgatggtggcgagggatatgaatgtcgagttaggaatggaaagaaaggcggtgtcagttggcg

SEQ ID NO: 5676 - DNA, 2553 bp, Muscodor strobelii
  misc_feature: SGI cDNA ID NO. 561613
  misc_feature: Encodes the peptide sequence at SEQ ID NO 5677
atgacggcggccgacaagctgtcggcccccgggtcggccagctacgactccgacaccatgaccgtcggcgatggcacatgggactttaccaagaataccttcctcctccccaatctagtcgggctcaatttcgagactatgcaatacaatggcatgggcaatcgattctcaactttgtcgcaataccacacgctcatcctaggccatggaattctcgctgcaatcgtgttcctcttcatcatccccttctctatcctatatgccaggttttctcgcgaccgtgatcacgacagaatccggcgcaaccatgcgtacctaggtgttgttgctcttggactgtccacagtaatcttcattctaggtttctttgctgtcggcccgtcccgcgccctgaccaaccctcaccatggcattggcgttgcaatctacgtcctgatcttgtggcaagctattagcggccgtatggtcaagtatatctggaaaagatcattccgcctgatggttcatcgatggtctggcagaactgccgccatcctgggtattgtccaggtgccacttggattgactctgtacggctctccaaaattcaccttcatcttgtatgctttgtggatgagtttcctcctcctgcttttcttcctcttgtgctggagacaagagcgcgacagaggtgatgcgtacggcggtcggtccacggttactggtgccacaggtaccgaatggacacagtctgaagtcaaatcccgacgtggattcggatgggtagcaccgttagccgggggactcggtgccctggcgcttttccgtcgagggcgcaaacgtgggagcgagcatagcgggagcagccgcagccgatcacgatcacacagccgacgaacgccagaggtcctaccgtcaaggagaggttccgcgagctatctggacgagaagtactcagaaagaacagatcgcaaaggcggcgggattatgaataagctacttgcagtcggaggtgtactcggagctggagcgctggtgaagaaactggcagaccgtagggaaaaccgacgttatgcagacgaggaatattccgcagtggcaacggatactcctagtcgattccgacccaatagatcgagactgccaccgaaacgacacgatgagtatacagaatccgagttcactgaagacagaactgaactcacaacccgacgaccacgtacacctccaggaaatcggccacgtacgcctttgctaccaggtcctggagatccagtggctacagccgcagcattgagtgcatctgcgcctcgacccacgcgaccacccgcatccactagactcgacaccgaggactactccgactacacatcttaccggagtccttcaaggcgaacaaaggccgatgatcaccacggcggtgcagggaagggcattctcgcggctgtgggccttggctggtttgcaaagaagatgaaggatcgacgggaccgaaaagccgaggatgaacggtacagactagaagaggagagacgagatggccgtcatggctcgagatttaccggagatggtctcgggacaccgacacgcccaccacgacattctacccgaataccagctgctgccccaactgttaccaccatgacgggcatgactgaagatacggagtcgtctttggtcgaaagtcgtccggctggtactgcacttagtggcccaccaatgccaccttttgtcgcagggaatgctcctcctccgcctcctgtacctgttcccgctcccgttcccggacctagctcccactccagatcaagatcaagatcgcgccacgacaccaatcctgtctctatgccgccaatgccccctgacccacacggagtgttgcatccaatacgccaacatgaatctggtagcgagtcattcatgtctgctggcggccacccacatcggcggcattcgtctcgccaggggagagaaggtgatatagccgcagcggaagagtcatcacgacaccgcaaccctagccaagcgccaagtcagcctgtcagtgtcaaagtaaagtatcacgatgataaggatcgtaacataacattgagaaggctcacagacgaggaggcgcgacgtgagcggcgcgggatgagatcaggctcggtgagcagcctctcagggaacgagacgccgacgcgccagcgctaccgaagagaatcatccagcgcgcggaaagctgcagatgaagcagaagcagagcgccttgttgctgaacctctatcaccgcccacgcctgcgtttgcaggaaagcgacgagccgcaggaaaggactcggcttattattccggacagccagggccctcaggagccacgccattggccgcacagactgtctctagcatcgatagtcccgatagccatggaacgtggagtgcgttgagcccgacgcccagcggtccagtcgccgagaagccggccggttcggtggcggcatctgcagcggagcgaagacgaagaagacgcttagagagaaaccgggacgcaagaccccagaccggcggaacgggcggaacagttgatttctcctaa

SEQ ID NO: 5677 - protein, 850 aa, Muscodor strobelii
  misc_feature: SGI Peptide ID NO. 561613
  misc_feature (1)..(818): NCBI GI: 261358332 Blast Desc: conserved [Verticillium albo-atrum VaMs.102]
  misc_feature (3)..(810): NCBI GI: 256729853 Blast Desc: NECHADRAFT_47257 [Nectria haematococca mpVI 77-13-4]
  misc_feature (3)..(813): NCBI GI: 46122425 Blast Desc: FG05590.1 [Gibberella zeae PH-1]
  misc_feature (4)..(804): NCBI GI: 164423960 Blast Desc: NCU07571 [Neurospora crassa OR74A] gi|157070306|gb|EAA29029.2| [Neurospora crassa OR74A]
  misc_feature (50)..(802): NCBI GI: 145614498 Blast Desc: MGG_04669 [Magnaporthe grisea 70-15] gi|145021410|gb|EDK05539.1| MGG_04669 [Magnaporthe grisea 70-15]
  misc_feature (62)..(803): NCBI GI: 154312770 Blast Desc: BC1G_05086 [Botryotinia fuckeliana B05.10] gi|150849788|gb|EDN24981.1| BC1G_05086 [Botryotinia fuckeliana B05.10]
  misc_feature (1)..(726): NCBI GI: 121703121 Blast Desc: conserved [Aspergillus clavatus NRRL 1] gi|119397968|gb|EAW08399.1| conserved [Aspergillus clavatus NRRL 1]
  misc_feature (52)..(579): NCBI GI: 171686260 Blast Desc: protein product [Podospora anserina] gi|170943091|emb|CAP68744.1| protein product [Podospora anserina]
  misc_feature (1)..(381): NCBI GI: 145229225 Blast Desc: An01g04950 [Aspergillus niger] gi|134055022|emb|CAK37029.1| protein product [Aspergillus niger]
  misc_feature (3)..(218): NCBI GI: 156051610 Blast Desc: SS1G_07212 [Sclerotinia sclerotiorum 1980] gi|154704990|gb|EDO04729.1| SS1G_07212 [Sclerotinia sclerotiorum 1980]
MTAADKLSAPGSASYDSDTMTVGDGTWDFTKNTFLLPNLVGLNFETMQYNGMGNRFSTLSQYHTLILGHGILAAIVFLFIIPFSILYARFSRDRDHDRIRRNHAYLGVVALGLSTVIFILGFFAVGPSRALTNPHHGIGVAIYVLILWQAISGRMVKYIWKRSFRLMVHRWSGRTAAILGIVQVPLGLTLYGSPKFTFILYALWMSFLLLLFFLLCWRQERDRGDAYGGRSTVTGATGTEWTQSEVKSRRGFGWVAPLAGGLGALALFRRGRKRGSEHSGSSRSRSRSHSRRTPEVLPSRRGSASYLDEKYSERTDRKGGGIMNKLLAVGGVLGAGALVKKLADRRENRRYADEEYSAVATDTPSRFRPNRSRLPPKRHDEYTESEFTEDRTELTTRRPRTPPGNRPRTPLLPGPGDPVATAAALSASAPRPTRPPASTRLDTEDYSDYTSYRSPSRRTKADDHHGGAGKGILAAVGLGWFAKKMKDRRDRKAEDERYRLEEERRDGRHGSRFTGDGLGTPTRPPRHSTRIPAAAPTVTTMTGMTEDTESSLVESRPAGTALSGPPMPPFVAGNAPPPPPVPVPAPVPGPSSHSRSRSRSRHDTNPVSMPPMPPDPHGVLHPIRQHESGSESFMSAGGHPHRRHSSRQGREGDIAAAEESSRHRNPSQAPSQPVSVKVKYHDDKDRNITLRRLTDEEARRERRGMRSGSVSSLSGNETPTRQRYRRESSSARKAADEAEAERLVAEPLSPPTPAFAGKRRAAGKDSAYYSGQPGPSGATPLAAQTVSSIDSPDSHGTWSALSPTPSGPVAEKPAGSVAASAAERRRRRRLERNRDARPQTGGTGGTVDFS

SEQ ID NO: 5678 - DNA, 3305 bp, Muscodor strobelii
  misc_feature: SGI EST ID NO. CUFF.14447.0
  misc_feature: Variant of the nucleotide sequence at SEQ ID NO 5676
cccagcggtgcagtgccatgtcaccagtctctccactgttgcagcgtcgacgatctgcacgtactgggtatctacctgaggtctttaatccatatcttcgggtgttttgcatttgttcgccgttgaactctttgcattgcagcttctacgacttcaattattgtcatacctcatcgccgttcgcactctcgccagtgctgccccgctatcacttacactagcattccaactctgccgccaccgccgaactttccacattccacgagtcgcagctgacccaaatgctcatctcgtcttgatagcagctgcattccaacaattccgcattcttgggcttgccgcctgcgctccggccttgtcaattgcccgtctgagacataggactgcctgtccacaggcaccgccgtcctcatgacggcggccgacaagctgtcggcccccgggtcggccagctacgactccgacaccatgaccgtcggcgatggcacatgggactttaccaagaataccttcctcctccccaatctagtcgggctcaatttcgagactatgcaatacaatggcatgggcaatcgattctcaactttgtcgcaataccacacgctcatcctaggccatggaattctcgctgcaatcgtgttcctcttcatcatccccttctctatcctatatgccaggttttctcgcgaccgtgatcacgacagaatccggcgcaaccatgcgtacctaggtgttgttgctcttggactgtccacagtaatcttcattctaggtttctttgctgtcggcccgtcccgcgccctgaccaaccctcaccatggcattggcgttgcaatctacgtcctgatcttgtggcaagctattagcggccgtatggtcaagtatatctggaaaagatcattccgcctgatggttcatcgatggtctggcagaactgccgccatcctgggtattgtccaggtgccacttggattgactctgtacggctctccaaaattcaccttcatcttgtatgctttgtggatgagtttcctcctcctgcttttcttcctcttgtgctggagacaagagcgcgacagaggtgatgcgtacggcggtcggtccacggttactggtgccacaggtaccgaatggacacagtctgaagtcaaatcccgacgtggattcggatgggtagcaccgttagccgggggactcggtgccctggcgcttttccgtcgagggcgcaaacgtgggagcgagcatagcgggagcagccgcagccgatcacgatcacacagccgacgaacgccagaggtcctaccgtcaaggagaggttccgcgagctatctggacgagaagtactcagaaagaacagatcgcaaaggcggcgggattatgaataagctacttgcagtcggaggtgtactcggagctggagcgctggtgaagaaactggcagaccgtagggaaaaccgacgttatgcagacgaggaatattccgcagtggcaacggatactcctagtcgattccgacccaatagatcgagactgccaccgaaacgacacgatgagtatacagaatccgagttcactgaagacagaactgaactcacaacccgacgaccacgtacacctccaggaaatcggccacgtacgcctttgctaccaggtcctggagatccagtggctacagccgcagcattgagtgcatctgcgcctcgacccacgcgaccacccgcatccactagactcgacaccgaggactactccgactacacatcttaccggagtccttcaaggcgaacaaaggccgatgatcaccacggcggtgcagggaagggcattctcgcggctgtgggccttggctggtttgcaaagaagatgaaggatcgacgggaccgaaaagccgaggatgaacggtacagactagaagaggagagacgagatggccgtcatggctcgagatttaccggagatggtctcgggacaccgacacgcccaccacgacattctacccgaataccagctgctgccccaactgttaccaccatgacgggcatgactgaagatacggagtcgtctttggtcgaaagtcgtccggctggtactgcacttagtggcccaccaatgccaccttttgtcgcagggaatgctcctcctccgcctcctgtacctgttcccgctcccgttcccggacctagctcccactccagatcaagatcaagatcgcgccacgacaccaatcctgtctctatgccgccaatgccccctgacccacacggagtgttgcatccaatacgccaacatgaatctggtagcgagtcattcatgtctgctggcggccacccacatcggcggcattcgtctcgccaggggagagaaggtgatatagccgcagcggaagagtcatcacgacaccgcaaccctagccaagcgccaagtcagcctgtcagtgtcaaagtaaagtatcacgatgataaggatcgtaacataacattgagaaggctcacagacgaggaggcgcgacgtgagcggcgcgggatgagatcaggctcggtgagcagcctctcagggaacgagacgccgacgcgccagcgctaccgaagagaatcatccagcgcgcggaaagctgcagatgaagcagaagcagagcgccttgttgctgaacctctatcaccgcccacgcctgcgtttgcaggaaagcgacgagccgcaggaaaggactcggcttattattccggacagccagggccctcaggagccacgccattggccgcacagactgtctctagcatcgatagtcccgatagccatggaacgtggagtgcgttgagcccgacgcccagcggtccagtcgccgagaagccggccggttcggtggcggcatctgcagcggagcgaagacgaagaagacgcttagagagaaaccgggacgcaagaccccagaccggcggaacgggcggaacagttgatttctcctaaactgtgcgcactcatgagaacaggaatgagctaacctcaagatcattacgcggcgttattggcgttctattgctgtcatttgctttgcattttcctatgtgcagcattgcaaacatacccacgaagtcgctcagagacgagttttatgatggaaaaattaacacgaaggagccaattgcattgttgctagatgtcatctgattgatcggaagctatcatcttcaagctgacagatagatgaatactcagagacgacaacgtgtactagatataatgagctttaatcatgaacgattgtacttatagttgagcatgagctgaatgaataccatgttgccgat

SEQ ID NO: 5679 - DNA, 699 bp, Muscodor strobelii
  misc_feature: SGI cDNA ID NO. 561614
  misc_feature: Encodes the peptide sequence at SEQ ID NO 5680
atggcctcggagccaacaacaaaccccgacccttcacaggcgcaagccaatgcgcaacaaccatcagaacaagcacccgcctccccaccactccctcaacgacacacagccataacacctggtgcgcgcgcaacacaattacagaagacctacgagaaggtactctcgggaacactaaacaagatcagctgggataactttgcgacatgttacccgacgatcgcggcgcaagccccggctacgctgcgcctggtgcagggacagatggtggataggttacggtcgctttgtaagaaagaattcgaatcaatacaacaagcgcgcaacgtaatcgcaaagctcaacgaactcgacagcctagtgagcgtcgcagaacaaaagcgggatgacagcggtggtggggagcctccagtgccaccccacgtcctcccagcagaagacgtcctagcagcacacctagcaccccatctagcacaacagcaatcccagctaaacgccaagctacaaaccacacaagcgcacaacgccaagttatactcagacatacagcgtcagcgcgccgaaatagaatcactcaccacgctcctagagaaagtcctagaagacgtcgacagcacgaatgagctctacgacggcgtcgtcagcgatgtagcacgcgagaccaggaccgtcgaggtagagatggccgatacgtcataa

SEQ ID NO: 5680 - protein, 232 aa, Muscodor strobelii
  misc_feature: SGI Peptide ID NO. 561614
  misc_feature (79)..(188): Pfam Id: PF03980 Pfam Desc: Nnf1
  misc_feature (15)..(222): NCBI GI: 46124661 Blast Desc: FG06708.1 [Gibberella zeae PH-1]
  misc_feature (5)..(222): NCBI GI: 256732812 Blast Desc: NECHADRAFT_79394 [Nectria haematococca mpVI 77-13-4]
  misc_feature (34)..(231): NCBI GI: 39945372 Blast Desc: [Magnaporthe grisea 70-15] gi|145021411|gb|EDK05540.1| [Magnaporthe grisea 70-15]
  misc_feature (47)..(228): NCBI GI: 116207790 Blast Desc: CHGG_03188 [Chaetomium globosum CBS 148.51] gi|88183785|gb|EAQ91253.1| CHGG_03188 [Chaetomium globosum CBS 148.51]
  misc_feature (38)..(231): NCBI GI: 164423960 Blast Desc: NCU07571 [Neurospora crassa OR74A] gi|157070306|gb|EAA29029.2| [Neurospora crassa OR74A]
  misc_feature (32)..(229): NCBI GI: 261358328 Blast Desc: conserved [Verticillium albo-atrum VaMs.102]
  misc_feature (3)..(229): NCBI GI: 171686258 Blast Desc: protein product [Podospora anserina] gi|170943090|emb|CAP68743.1| protein product [Podospora anserina]
  misc_feature (38)..(205): NCBI GI: 121717666 Blast Desc: MIND kinetochore complex component Nnf1, [Aspergillus clavatus NRRL 1] gi|119404316|gb|EAW14692.1| MIND kinetochore complex component Nnf1, [Aspergillus clavatus NRRL 1]
  misc_feature (18)..(228): NCBI GI: 189202416 Blast Desc: conserved [Pyrenophora tritici-repentis Pt-1C-BFP] gi|187984643|gb|EDU50131.1| conserved [Pyrenophora tritici-repentis Pt-1C-BFP]
  misc_feature (38)..(205): NCBI GI: 119498725 Blast Desc: spindle pole protein Nnf1, [Neosartorya fischeri NRRL 181] gi|119414284|gb|EAW24223.1| spindle pole protein Nnf1, [Neosartorya fischeri NRRL 181]
MASEPTTNPDPSQAQANAQQPSEQAPASPPLPQRHTAITPGARATQLQKTYEKVLSGTLNKISWDNFATCYPTIAAQAPATLRLVQGQMVDRLRSLCKKEFESIQQARNVIAKLNELDSLVSVAEQKRDDSGGGEPPVPPHVLPAEDVLAAHLAPHLAQQQSQLNAKLQTTQAHNAKLYSDIQRQRAEIESLTTLLEKVLEDVDSTNELYDGVVSDVARETRTVEVEMADTS

SEQ ID NO: 5681 - DNA, 4455 bp, Muscodor strobelii
  misc_feature: SGI EST ID NO. CUFF.15039.0
  misc_feature: Variant of the nucleotide sequence at SEQ ID NO 5679
gcgtgaagcagtcccccaattgcactttcgacctccgagactcatgatcacaaatactgactaactgattttctattcgcgtccatataccagacttatactctactgtgtattgaaaagcgaccaaaattgacgtctccacgacacgtataagctgcaagaatcaaccaaccttgcgcacgataccgaagcaacaacatctcttgctcacacacccgtctctcgcaatttccaacccttacaaaccaaacgaatacgcgagcgcatcacacagttcacaattgcgacgatggcctcggagccaacaacaaaccccgacccttcacaggcgcaagccaatgcgcaacaaccatcagaacaagcacccgcctccccaccactccctcaacgacacacagccataacacctggtgcgcgcgcaacacaattacagaagacctacgagaaggtactctcgggaacactaaacaagatcagctgggataactttgcgacatgttacccgacgatcgcggcgcaagccccggctacgctgcgcctggtgcagggacagatggtggataggttacggtcgctttgtaagaaagaattcgaatcaatacaacaagcgcgcaacgtaatcgcaaagctcaacgaactcgacagcctagtgagcgtcgcagaacaaaagcgggatgacagcggtggtggggagcctccagtgccaccccacgtcctcccagcagaagacgtcctagcagcacacctagcaccccatctagcacaacagcaatcccagctaaacgccaagctacaaaccacacaagcgcacaacgccaagttatactcagacatacagcgtcagcgcgccgaaatagaatcactcaccacgctcctagagaaagtcctagaagacgtcgacagcacgaatgagctctacgacggcgtcgtcagcgatgtagcacgcgagaccaggaccgtcgaggtagagatggccgatacgtcataagcgcgttgctgtttccttgggtttttcaagaatcaggatttacctcagtctcggggaatggcttgatagacacgaggaggtacggtttgagatccgcgccgagttggaccgtttcatttcgctgaggacggactgctgccaagaagatagtgtgtgaagtccatattcgatataataaggaccactagtccagaaacgtaaaagtgctccctgtacatatagtctatagctaccaatagtgtcatgaagagctgtgaatctcgagaacccaagagccgacccgtcctcacagaaccaagttggccacgaggaaatgaaataacaacacccataacaaaccagatatcccgatcgtccacttccataacccgcgtttcgtattcagaccgggaaggcatcgtcacaaacatagtcaacagacggaaacttttgtaaccataaattcatggttgtcattacactaatacatgggttgtgatgttgtgaaatatcgtacaaccatacagagtgggtagataaggattttttgtcagtccacttcgcccgcttttactcctttccatgcagatgcgagccttgaacttttccagccggatgaaaatgtatacacttgcccccagacagacctcattatgctacctgaatggtaggctcgtgcaaaatgcacgcatacgcatgtccatgcatgccagattggatatcatcatgtgctttccgcccaaattcccccggacaccagataccatcgagagtgatcctggatccaccaatcatcatatcatcactaaagtgaccgtccgatgcaggcaccataaattttggggccaaatgtatcgttgttgtttgtcgttgtgccatctccataatatgttatatgagagtatggcttaagcgtttgtggcctgcgaagctccacggccaccgcgcggcatgccacctctggcgcggttctgtcctccgaagttgccacgtccaccctggctgccagcgcgaccgccctcgaatcccccacgtccgccgcggctctgcgcgttgccacgtccagcgttgtagttgctaccaccataagcaccagccttgggacgacgtggctcgacaacgatgctctcgccgttgatcacgtgggggttggcagcaacagcggcttggtatccagcggcagtcttgaattcgacgaaagcgcaattctattaagagagttagttcatcacagtgttcattcacgactgaatgttcttcaaacataccttttgacgattgatgtcgaaataagccagatcaccatgctgtgccagagcagcttcaagctcatcgcgaccgaccttgtcagtgacgtacttaacatagcccagggtgccatccttatcaacaggaggacctgagatcgactgaggtctattctgacgcttcgagtctccacccgcggtctgccactcggtagaagtctccttggccggcgcagcaggcgcatcggtggtctgggtggcagtagcagcaggttgagaggcagcgggagttgcggtggtagcagcagctcgggcgggagcagggacaggtgcggtcttgagcggcatggccggtttcacggcgggctggacagcagcagcggcgcggcttgcccacgacatgggcttgggaggttgggcaggagccggggctgcggcaggaggagggggcttgcgagcaacaacgggagtcggggatggatcagcgggcttctcgggctccttgacggcctcttcctcaagctctcgtgcagtaacctcggggtcagggacggcaatatcctcatcagccttggtggttgcctcggggacgtctacagatccctcagcggtctgcacggaagcagcatcgccattgacggaggcaggctccttcagggtgacctcctcgagcttcttgtcaatgataccagcatccagggcggcaggctgctcctcaacggacggctccggaacagcctcgacctcctcaggctcctgtgcgggctggacaacttcctctggctcgtcagtcgacggcatctggacggtggagccgggttcctcgtcgccctcttcatcgatgaagcgcaggatatcgttgaggacaaagtagccagaaggctgctgggcaagaacaaaggtctggacgaacttcttgggttcgccagccttgttggaggtctcgccgatgacttgaatcacaatgttctcgaaagaggcctgggagtcgacgttggagacacgaactttgcagttctggaagtcgaggtccttgatgcgctcctggatgacctggcaagatattcgaagtaagcgagctgcaggcagaaggacaaattaacttggtaacatacctggcggccgacggagacattggcagactggccctcctggccgtagacgaactgggatcgctttccatagaacagctggtggcctgttagcaggggaatattgcgaccaagataggcagatgtgagcagtgcatacatggagcttctccgggttcttgctcagggttgtgtagtattgctcgacgaagtaccaggcaacctcatcctttccaagatcggcattggccgggtcggcggcggcggagggagcagtggtggcagccgaggacgcgtactggtcggtgtggctggagggaccgttcgtagccatggttgtggtgctcgcaagagggatgtcgaggtttgcgcgtggatgtggtgataagaaagaagggaatgattaactccgaaggcaattcagagagtatcaagcagtcaacaaagtcaccgaaactagagagagcatggtcagcggactgcagaatacccaactgtatgtcatatatgtatttactttcaaggtgagcaaacacgaaggcaagcgccggtgaagcggatgggcagaagaggcgagaagtcgggcgggaaggacggcgagagcgagagggcaaaagaaagaagcagaaagtcggcgcagtatagtttcgcagaggaatgctgaaacagttcacaatccaccaatccaccgattgatgcaaaagctgcaggtagaaaagtgaggcaggcaggtcggactcgagggagtgtgggagctggagggggatttatttttttgggtgtcgattggagacgtcgggaggaggaaggaagtggtaggtcggggaagggttggagtcgagcaacgcgatagcgcgttagcagacggaatatggagtacctcagaagtagagagaagcggccaaagctggatgcgggagcggggaaagagacgaaactcaatgcgaccgcactatgtctatagacagctgttgcaatcggagaatccgagaaggggtgaatgtgcctgagagcgcaatcggtaattagatgggatgagttcgtcgttgacgagagagggttgtggtggcggcgagagatatggaaggcgggttgtgtgaattgtgaattaattgccctttgcacctggttggttggcgatgggcaggag

SEQ ID NO: 5682 - DNA, 1581 bp, Muscodor strobelii
  misc_feature: SGI cDNA ID NO. 561615
  misc_feature: Reduced expression when VOC is produced
  misc_feature: Encodes the peptide sequence at SEQ ID NO 5683
atggctacgaacggtccctccagccacaccgaccagtacgcgtcctcggctgccaccactgctccctccgccgccgccgacccggccaatgccgatcttggaaaggatgaggttgcctggtacttcgtcgagcaatactacacaaccctgagcaagaacccggagaagctccatctgttctatggaaagcgatcccagttcgtctacggccaggagggccagtctgccaatgtctccgtcggccgccaggtcatccaggagcgcatcaaggacctcgacttccagaactgcaaagttcgtgtctccaacgtcgactcccaggcctctttcgagaacattgtgattcaagtcatcggcgagacctccaacaaggctggcgaacccaagaagttcgtccagacctttgttcttgcccagcagccttctggctactttgtcctcaacgatatcctgcgcttcatcgatgaagagggcgacgaggaacccggctccaccgtccagatgccgtcgactgacgagccagaggaagttgtccagcccgcacaggagcctgaggaggtcgaggctgttccggagccgtccgttgaggagcagcctgccgccctggatgctggtatcattgacaagaagctcgaggaggtcaccctgaaggagcctgcctccgtcaatggcgatgctgcttccgtgcagaccgctgagggatctgtagacgtccccgaggcaaccaccaaggctgatgaggatattgccgtccctgaccccgaggttactgcacgagagcttgaggaagaggccgtcaaggagcccgagaagcccgctgatccatccccgactcccgttgttgctcgcaagccccctcctcctgccgcagccccggctcctgcccaacctcccaagcccatgtcgtgggcaagccgcgccgctgctgctgtccagcccgccgtgaaaccggccatgccgctcaagaccgcacctgtccctgctcccgcccgagctgctgctaccaccgcaactcccgctgcctctcaacctgctgctactgccacccagaccaccgatgcgcctgctgcgccggccaaggagacttctaccgagtggcagaccgcgggtggagactcgaagcgtcagaatagacctcagtcgatctcaggtcctcctgttgataaggatggcaccctgggctatgttaagtacgtcactgacaaggtcggtcgcgatgagcttgaagctgctctggcacagcatggtgatctggcttatttcgacatcaatcgtcaaaagaattgcgctttcgtcgaattcaagactgccgctggataccaagccgctgttgctgccaacccccacgtgatcaacggcgagagcatcgttgtcgagccacgtcgtcccaaggctggtgcttatggtggtagcaactacaacgctggacgtggcaacgcgcagagccgcggcggacgtgggggattcgagggcggtcgcgctggcagccagggtggacgtggcaacttcggaggacagaaccgcgccagaggtggcatgccgcgcggtggccgtggagcttcgcaggccacaaacgcttaa

SEQ ID NO: 5683 - protein, 526 aa, Muscodor strobelii
  misc_feature: SGI Peptide ID NO. 561615
  misc_feature (38)..(153): Pfam Id: PF02136 Pfam Desc: Nuclear transport factor 2 (NTF2) domain
  misc_feature (395)..(458): Pfam Id: PF00076 Pfam Desc: RNA recognition motif. (a.k.a. RRM, RBD, or RNP domain)
  misc_feature (1)..(467): NCBI GI: 256733272 Blast Desc: NECHADRAFT_79396 [Nectria haematococca mpVI 77-13-4]
  misc_feature (1)..(468): NCBI GI: 46124657 Blast Desc: FG06706.1 [Gibberella zeae PH-1]
  misc_feature (1)..(523): NCBI GI: 154312782 Blast Desc: BC1G_05092 [Botryotinia fuckeliana B05.10] gi|150849794|gb|EDN24987.1| BC1G_05092 [Botryotinia fuckeliana B05.10]
  misc_feature (1)..(522): NCBI GI: 156051624 Blast Desc: SS1G_07219 [Sclerotinia sclerotiorum 1980] gi|154704997|gb|EDO04736.1| SS1G_07219 [Sclerotinia sclerotiorum 1980]
  misc_feature (1)..(478): NCBI GI: 116207794 Blast Desc: CHGG_03190 [Chaetomium globosum CBS 148.51] gi|88183787|gb|EAQ91255.1| CHGG_03190 [Chaetomium globosum CBS 148.51]
  misc_feature (21)..(473): NCBI GI: 225562869 Blast Desc: NTF2 and RRM domain-containing protein [Ajellomyces capsulatus G186AR]
  misc_feature (21)..(463): NCBI GI: 261196530 Blast Desc: NTF2 and RRM domain-containing protein [Ajellomyces dermatitidis SLH14081] gi|239595913|gb|EEQ78494.1| NTF2 and RRM domain-containing protein [Ajellomyces dermatitidis SLH14081]
  misc_feature (8)..(506): NCBI GI: 67902562 Blast Desc: AN8268.2 [Aspergillus nidulans FGSC A4] gi|40739816|gb|EAA59006.1| AN8268.2 [Aspergillus nidulans FGSC A4] gi|259481059|tpe|CBF74246.1| TPA: NTF2 and RRM domain protein
  misc_feature (21)..(473): NCBI GI: 154280060 Blast Desc: [Ajellomyces capsulatus NAm1] gi|150412786|gb|EDN08173.1| [Ajellomyces capsulatus NAm1]
  misc_feature (21)..(463): NCBI GI: 239609487 Blast Desc: NTF2 and RRM domain-containing protein [Ajellomyces dermatitidis ER-3]
  misc_feature: Useful for introducing or modulating the production of volatile compounds
MATNGPSSHTDQYASSAATTAPSAAADPANADLGKDEVAWYFVEQYYTTLSKNPEKLHLFYGKRSQFVYGQEGQSANVSVGRQVIQERIKDLDFQNCKVRVSNVDSQASFENIVIQVIGETSNKAGEPKKFVQTFVLAQQPSGYFVLNDILRFIDEEGDEEPGSTVQMPSTDEPEEVVQPAQEPEEVEAVPEPSVEEQPAALDAGIIDKKLEEVTLKEPASVNGDAASVQTAEGSVDVPEATTKADEDIAVPDPEVTARELEEEAVKEPEKPADPSPTPVVARKPPPPAAAPAPAQPPKPMSWASRAAAAVQPAVKPAMPLKTAPVPAPARAAATTATPAASQPAATATQTTDAPAAPAKETSTEWQTAGGDSKRQNRPQSISGPPVDKDGTLGYVKYVTDKVGRDELEAALAQHGDLAYFDINRQKNCAFVEFKTAAGYQAAVAANPHVINGESIVVEPRRPKAGAYGGSNYNAGRGNAQSRGGRGGFEGGRAGSQGGRGNFGGQNRARGGMPRGGRGASQATNA

SEQ ID NO: 5684 - DNA, 3573 bp, Muscodor strobelii
  misc_feature: SGI EST ID NO. CUFF.15040.2
  misc_feature: Variant of the nucleotide sequence at SEQ ID NO 5682
tcacaattcacacaacccgccttccatatctctcgccgccaccacaaccctctctcgtcaacgacgaactcatcccatctaattaccgattgcgctctcaggcacattcaccccttctcggattctccgattgcaacagctgtctatagacatagtgcggtcgcattgagtttcgtctctttccccgctcccgcatccagctttggccgcttctctctacttctgaggtactccatattccgtctgctaacgcgctatcgcgttgctcgactccaacccttccccgacctaccacttccttcctcctcccgacgtctccaatcgacacccaaaaaaataaatccccctccagctcccacactccctcgagtccgacctgcctgcctcacttttctacctgcagcttttgcatcaatcggtggattggtggattgtgaactgtttcagcattcctctgcgaaactatactgcgccgactttctgcttctttcttttgccctctcgctctcgccgtccttcccgcccgacttctcgcctcttctgcccatccgcttcaccggcgcttgccttcgtgtttgctcaccttgaaatttcggtgactttgttgactgcttgatactctctgaattgccttcggagttaatcattcccttctttcttatcaccacatccacgcgcaaacctcgacatccctcttgcgagcaccacaaccatggctacgaacggtccctccagccacaccgaccagtacgcgtcctcggctgccaccactgctccctccgccgccgccgacccggccaatgccgatcttggaaaggatgaggttgcctggtacttcgtcgagcaatactacacaaccctgagcaagaacccggagaagctccatctgttctatggaaagcgatcccagttcgtctacggccaggagggccagtctgccaatgtctccgtcggccgccaggtcatccaggagcgcatcaaggacctcgacttccagaactgcaaagttcgtgtctccaacgtcgactcccaggcctctttcgagaacattgtgattcaagtcatcggcgagacctccaacaaggctggcgaacccaagaagttcgtccagacctttgttcttgcccagcagccttctggctactttgtcctcaacgatatcctgcgcttcatcgatgaagagggcgacgaggaacccggctccaccgtccagatgccgtcgactgacgagccagaggaagttgtccagcccgcacaggagcctgaggaggtcgaggctgttccggagccgtccgttgaggagcagcctgccgccctggatgctggtatcattgacaagaagctcgaggaggtcaccctgaaggagcctgcctccgtcaatggcgatgctgcttccgtgcagaccgctgagggatctgtagacgtccccgaggcaaccaccaaggctgatgaggatattgccgtccctgaccccgaggttactgcacgagagcttgaggaagaggccgtcaaggagcccgagaagcccgctgatccatccccgactcccgttgttgctcgcaagccccctcctcctgccgcagccccggctcctgcccaacctcccaagcccatgtcgtgggcaagccgcgccgctgctgctgtccagcccgccgtgaaaccggccatgccgctcaagaccgcacctgtccctgctcccgcccgagctgctgctaccaccgcaactcccgctgcctctcaacctgctgctactgccacccagaccaccgatgcgcctgctgcgccggccaaggagacttctaccgagtggcagaccgcgggtggagactcgaagcgtcagaatagacctcagtcgatctcaggtcctcctgttgataaggatggcaccctgggctatgttaagtacgtcactgacaaggtcggtcgcgatgagcttgaagctgctctggcacagcatggtgatctggcttatttcgacatcaatcgtcaaaagaattgcgctttcgtcgaattcaagactgccgctggataccaagccgctgttgctgccaacccccacgtgatcaacggcgagagcatcgttgtcgagccacgtcgtcccaaggctggtgcttatggtggtagcaactacaacgctggacgtggcaacgcgcagagccgcggcggacgtgggggattcgagggcggtcgcgctggcagccagggtggacgtggcaacttcggaggacagaaccgcgccagaggtggcatgccgcgcggtggccgtggagcttcgcaggccacaaacgcttaagccatactctcatataacatattatggagatggcacaacgacaaacaacaacgatacatttggccccaaaatttatggtgcctgcatcggacggtcactttagtgatgatatgatgattggtggatccaggatcactctcgatggtatctggtgtccgggggaatttgggcggaaagcacatgatgatatccaatctggcatgcatggacatgcgtatgcgtgcattttgcacgagcctaccattcaggtagcataatgaggtctgtctgggggcaagtgtatacattttcatccggctggaaaagttcaaggctcgcatctgcatggaaaggagtaaaagcgggcgaagtggactgacaaaaaatccttatctacccactctgtatggttgtacgatatttcacaacatcacaacccatgtattagtgtaatgacaaccatgaatttatggttacaaaagtttccgtctgttgactatgtttgtgacgatgccttcccggtctgaatacgaaacgcgggttatggaagtggacgatcgggatatctggtttgttatgggtgttgttatttcatttcctcgtggccaacttggttctgtgaggacgggtcggctcttgggttctcgagattcacagctcttcatgacactattggtagctatagactatatgtacagggagcacttttacgtttctggactagtggtccttattatatcgaatatggacttcacacactatcttcttggcagcagtccgtcctcagcgaaatgaaacggtccaactcggcgcggatctcaaaccgtacctcctcgtgtctatcaagccattccccgagactgaggtaaatcctgattcttgaaaaacccaaggaaacagcaacgcgcttatgacgtatcggccatctctacctcgacggtcctggtctcgcgtgctacatcgctgacgacgccgtcgtagagctcattcgtgctgtcgacgtcttctaggactttctctaggagcgtggtgagtgattctatttcggcgcgctgacgctgtatgtctgagtataacttggcgttgtgcgcttgtgtggtttgtagcttggcgtttagctgggattgctgttgtgctagatggggtgctaggtgtgctgctaggacgtcttctgctgggaggacgtggggtctgggtttgggttagttggtggtttggtagggaggatttaatatacgggaggaaaaataagaattatatgatggcgatagcttgaacggtaatgaaaataccgacaatca

SEQ ID NO: 5685 - DNA, 969 bp, Muscodor strobelii
  misc_feature: SGI cDNA ID NO. 561616
  misc_feature: Encodes the peptide sequence at SEQ ID NO 5686
atgacgaagtgtggtgacccaggatggccgcttgtcgtcaacggcatgtgctgtccctcctcaagtcttccaatcgtacttgccggaggaacaactgttctctgttgtccacagaacggcgattgcacagcaattcaacccataaactgtgacatcagcttgcaggttctgaacccccatccaaaagatgacgaagagccacccatgatccaaacgatctttacgagtgaggaattagtcacctgcgataacatgtgctgcccttggggctatagctgcaaaaccggcaaagtcaatggggagcaagtgacagactgtgtggagaagcctgaccaagaccatcaacccgatggaaagccaggcatctcttcagctccaagcacaacttcgagtacagagtcacataaaactacgagccctacatcctcaatgacctctaaggagagcgatacatcgactgtcgccagtgagacaaccagcgagactgctagtcagattactaccgagacacctgatgatcccttgtcttcagagacgtctagtccgtcctcgacgccttcaacctctgacatcaccgtggtggtcaccccgacgaacacgcccgtagagacatcaattggagacagtaacagtacagcaccttcctctgcctccgatcccctgagcaactcggctgtcgcaggtatcgctgtagctagcgtcgctgtcctcattatcctcgcctcccttgtgttctacttatggcgccgacaccaatcgatgacccgcgacgctttggaccgagacaacaatgattacaattcaattgctggggttggtatggacgaaagattcggtattggcttggcaacaattcccgaggtcgaaagagagaaagtctctgagctacctgctgccaatcgcccttcagagctaggaaatacccagttcacacgcccgccgcgttttaatcactacgagctggcatga

SEQ ID NO: 5686 - protein, 322 aa, Muscodor strobelii
  misc_feature: SGI Peptide ID NO. 561616
  misc_feature (16)..(164): NCBI GI: 116180734 Blast Desc: CHGG_00995 [Chaetomium globosum CBS 148.51] gi|88185292|gb|EAQ92760.1| CHGG_00995 [Chaetomium globosum CBS 148.51]
  misc_feature (12)..(94): NCBI GI: 67537958 Blast Desc: AN5149.2 [Aspergillus nidulans FGSC A4] gi|40743140|gb|EAA62330.1| AN5149.2 [Aspergillus nidulans FGSC A4] gi|259484599|tpe|CBF80960.1| TPA: [Aspergillus nidulans FGSC
  misc_feature (3)..(98): NCBI GI: 238484981 Blast Desc: conserved [Aspergillus flavus NRRL3357] gi|220701779|gb|EED58117.1| conserved [Aspergillus flavus NRRL3357]
  misc_feature (3)..(98): NCBI GI: 169768036 Blast Desc: [Aspergillus oryzae RIB40] gi|83766344|dbj|BAE56487.1| protein product [Aspergillus oryzae]
  misc_feature (16)..(118): NCBI GI: 256733057 Blast Desc: NECHADRAFT_78974 [Nectria haematococca mpVI 77-13-4]
  misc_feature (16)..(103): NCBI GI: 156057071 Blast Desc: SS1G_04266 [Sclerotinia sclerotiorum 1980] gi|154702052|gb|EDO01791.1| SS1G_04266 [Sclerotinia sclerotiorum 1980]
  misc_feature (1)..(96): NCBI GI: 238839678 Blast Desc: conserved [Microsporum canis CBS 113480]
  misc_feature (1)..(95): NCBI GI: 85091395 Blast Desc: NCU07388 [Neurospora crassa OR74A] gi|28920270|gb|EAA29645.1| [Neurospora crassa OR74A]
  misc_feature (3)..(252): NCBI GI: 70991529 Blast Desc: conserved [Aspergillus fumigatus Af293] gi|66848246|gb|EAL88575.1| conserved [Aspergillus fumigatus Af293] gi|159124169|gb|EDP49287.1| conserved [Aspergillus A1163]
  misc_feature (3)..(103): NCBI GI: 154290716 Blast Desc: BC1G_15277 [Botryotinia fuckeliana B05.10] gi|150847433|gb|EDN22626.1| BC1G_15277 [Botryotinia fuckeliana B05.10]
MTKCGDPGWPLVVNGMCCPSSSLPIVLAGGTTVLCCPQNGDCTAIQPINCDISLQVLNPHPKDDEEPPMIQTIFTSEELVTCDNMCCPWGYSCKTGKVNGEQVTDCVEKPDQDHQPDGKPGISSAPSTTSSTESHKTTSPTSSMTSKESDTSTVASETTSETASQITTETPDDPLSSETSSPSSTPSTSDITVVVTPTNTPVETSIGDSNSTAPSSASDPLSNSAVAGIAVASVAVLIILASLVFYLWRRHQSMTRDALDRDNNDYNSIAGVGMDERFGIGLATIPEVEREKVSELPAANRPSELGNTQFTRPPRFNHYELA

SEQ ID NO: 5687 - DNA, 1310 bp, Muscodor strobelii
  misc_feature: SGI EST ID NO. CUFF.14324.0
  misc_feature: Variant of the nucleotide sequence at SEQ ID NO 5685
gtgacagactgtgtggagaagcctgaccaagaccatcaacccgatggaaagccaggcatctcttcagctccaagcacaacttcgagtacagagtcacataaaactacgagccctacatcctcaatgacctctaaggagagcgatacatcgactgtcgccagtgagacaaccagcgagactgctagtcagattactaccgagacacctgatgatcccttgtcttcagagacgtctagtccgtcctcgacgccttcaacctctgacatcaccgtggtggtcaccccgacgaacacgcccgtagagacatcaattggagacagtaacagtacagcaccttcctctgcctccgatcccctgagcaactcggctgtcgcaggtatcgctgtagctagcgtcgctgtcctcattatcctcgcctcccttgtgttctacttatggcgccgacaccaatcgatgacccgcgacgctttggaccgagacaacaatgattacaattcaattgctggggttggtatggacgaaagattcggtattggcttggcaacaattcccgaggtcgaaagagagaaagtctctgagctacctgctgccaatcgcccttcagagctaggaaatacccagttcacacgcccgccgcgttttaatcactacgagctggcatgatgccacggtaactggctcataggctctgaagaaagagtcatgtgttcatttcaatcagcattcagagctctgggctctcaatcacatggaattgaagcgaaccgcacccttttctttcgtctacaaatcgtcatgtgcgacatgatccgaagcggccagcgagggccattacgaccgatcgactaatacttgcgagacagaagtgtaggatcacaggattttcacacaataatgtgccgtcgtcgatcttggatcccagatctcggtatacaatgttgctgtttaacctgagaatactcttccgctcggcttcctgctgggtttctgattgtacgaatacgcttgtatgccattcgcgacggtgtgaaaagggctcacaggcaaaattgggatttcaggaggttaaatatatgaataagttgattactctcatctgggagagtcctcacgaacctgtactctcacatcggtggagagataatgataactcaactgcgtgaccacgtcatgagaattatacagatcaaccagacagtgctatcaatcgagtaattcatcaacgtgagacgaaatttgtctcctattcatacttgcctctctgtatttttccgtattcaagccgaagtctactgacaatgaaaacacag

SEQ ID NO: 5688 - DNA, 936 bp, Muscodor strobelii
  misc_feature: SGI cDNA ID NO. 561617
  misc_feature: Encodes the peptide sequence at SEQ ID NO 5689
atggcaaatacacagaaaccacacgggtggcttgatattcatgctcatttcttcgtccctcgaccagcttctgaagatgcgacaattgtggccagtttacgtgatgctcatttcatggccagcgaagccccgcgcttcaatgctaccgaaatgattgcctattgtgatcgcgcaggaattgtcatgcagatgctatccaatattccgatgacatccgcagccctcagagcatccaacgactatggcgcgttgatcgtgaaagaaaaccccacgagatttggtctcctcgccgcactacctacggacgagccagaggaggcgctccgagagatcaatagggtgaagcctctagaggcaaagcaggaacccggctccctggttccagatgggtttgccgtgacgaccaataggaatggtatcctgcttggagacccaagacttagacctgtctggaaagagctcgatagccgcagcgaggttgtcttcgtccatcccaatgcatatttgcgaggacaggatggccgaccgtcggcgttgattgacatttcccgcatattaaatgggttttttgcccatagtggcggcgcgttccctgctctttctgggcgtgtgttattgcttggcgctcaatcatgggttcctaatcacaacaatgtcacgagagaagaaatgcaggcccaaatgagaagcctttatgtcgacacggctgcgacagctcacaccggaatggaacccgcaattaagatgaccggtatcgaacatgttgtatacggtgcagattgtggcgtgccctgttccacggaggcgacgatggagcaaaaccggcatgccgttcgcgacattgctgcaaaaggaaagggcgatggcgattttgttggtatgaatggcttcaatttgtttccagcagcgagacttcgagcattgggccagagctaa

SEQ ID NO: 5689 - protein, 311 aa, Muscodor strobelii
  misc_feature: SGI Peptide ID NO. 561617
  misc_feature (11)..(302): Pfam Id: PF04909 Pfam Desc: Amidohydrolase
  misc_feature (11)..(168): Pfam Id: PF04909 Pfam Desc: Amidohydrolase
  misc_feature (10)..(307): NCBI GI: 242773897 Blast Desc: C6 transcription factor, [Talaromyces stipitatus ATCC 10500] gi|218721952|gb|EED21370.1| C6 transcription factor, [Talaromyces stipitatus ATCC 10500]
  misc_feature (7)..(306): NCBI GI: 169772713 Blast Desc: [Aspergillus oryzae RIB40] gi|83768686|dbj|BAE58823.1| protein product [Aspergillus oryzae]
  misc_feature (1)..(307): NCBI GI: 145236910 Blast Desc: An07g00090 [Aspergillus niger] gi|134075567|emb|CAK39233.1| protein product [Aspergillus niger]
  misc_feature (7)..(306): NCBI GI: 238490622 Blast Desc: 2-amino-3-carboxymuconate-6-semialdehyde decarboxylase, [Aspergillus flavus NRRL3357] gi|220696961|gb|EED53302.1| decarboxylase, [Aspergillus flavus
  misc_feature (7)..(305): NCBI GI: 256667090 Blast Desc: hydrolase [Streptomyces sp. AA4]
  misc_feature (79)..(269): NCBI GI: 226362708 Blast Desc: hydrolase [Rhodococcus opacus B4] gi|226241193|dbj|BAH51541.1| hydrolase [Rhodococcus opacus B4]
  misc_feature (9)..(260): NCBI GI: 256395586 Blast Desc: amidohydrolase 2 [Catenulispora acidiphila DSM 44928] gi|256361812|gb|ACU75309.1| amidohydrolase 2 [Catenulispora acidiphila DSM 44928]
  misc_feature (8)..(311): NCBI GI: 91783089 Blast Desc: metal-dependent hydrolase [Burkholderia xenovorans LB400] gi|91687043|gb|ABE30243.1| metal-dependent hydrolase [Burkholderia xenovorans LB400]
  misc_feature (76)..(310): NCBI GI: 78063801 Blast Desc: amidohydrolase 2 [Burkholderia sp. 383] gi|77971686|gb|ABB13065.1| Amidohydrolase 2 [Burkholderia sp. 383]
  misc_feature (9)..(288): NCBI GI: 118470949 Blast Desc: amidohydrolase 2 [Mycobacterium smegmatis str. MC2 155] gi|118172236|gb|ABK73132.1| amidohydrolase 2 [Mycobacterium smegmatis str. MC2 155]
  misc_feature (52)..(264): SWISSPROT Homolog: EC 4.1.1.45 Aminocarboxymuconate-semialdehyde decarboxylase
MANTQKPHGWLDIHAHFFVPRPASEDATIVASLRDAHFMASEAPRFNATEMIAYCDRAGIVMQMLSNIPMTSAALRASNDYGALIVKENPTRFGLLAALPTDEPEEALREINRVKPLEAKQEPGSLVPDGFAVTTNRNGILLGDPRLRPVWKELDSRSEVVFVHPNAYLRGQDGRPSALIDISRILNGFFAHSGGAFPALSGRVLLLGAQSWVPNHNNVTREEMQAQMRSLYVDTAATAHTGMEPAIKMTGIEHVVYGADCGVPCSTEATMEQNRHAVRDIAAKGKGDGDFVGMNGFNLFPAARLRALGQS

SEQ ID NO: 5690 - DNA, 678 bp, Muscodor strobelii
  misc_feature: SGI cDNA ID NO. 561618
  misc_feature: Encodes the peptide sequence at SEQ ID NO 5691
atgcacgtcaaccgagagtctcggtatgaagctttgaggcatctggaccttatctcattgagttacgttttcaaacacgaggcgccggtcgattggagagcgccgtatctctctgaacaccccaaggttgaaaagaaacacatgctcgcaatcaactggcaatgcgatcttatcagtacatcacagactccaatgctcgcttttgaaaacacccccttcaccaaagctacccggtttgcattagatgtagatacagtcttgtggattctcccatcgcccacgcataggagtttctgggttctcaaaccgtgtctttcaatattcccaaggctcaaatacctagcgatcatcttcgatgggaatttcggaacgaaggcgagggcggtcttccacggttacgaaagttacgactatattgccacgctgaacaggatgcccaaagatgagcactactttattctatcacccagagaagcaatagatggttggcttctccgtgtccgttcagagctgcgggcgaacccgtaccttcaagaacatacagatggctgcgacacttggggctatcactcgggacgtggcactcttcaggatacggagactcttcgacaggctattacatacttacgacccgaagtggtcgtacaggatgtattagatccgacacaatgtaagtga

SEQ ID NO: 5691 - protein, 225 aa, Muscodor strobelii
  misc_feature: SGI Peptide ID NO. 561618
MHVNRESRYEALRHLDLISLSYVFKHEAPVDWRAPYLSEHPKVEKKHMLAINWQCDLISTSQTPMLAFENTPFTKATRFALDVDTVLWILPSPTHRSFWVLKPCLSIFPRLKYLAIIFDGNFGTKARAVFHGYESYDYIATLNRMPKDEHYFILSPREAIDGWLLRVRSELRANPYLQEHTDGCDTWGYHSGRGTLQDTETLRQAITYLRPEVVVQDVLDPTQCK

SEQ ID NO: 5692 - DNA, 2405 bp, Muscodor strobelii
  misc_feature: SGI EST ID NO. CUFF.14331.0
  misc_feature: Variant of the nucleotide sequence at SEQ ID NO 5690
tttccactaccgaactcaagggcaaccaacccagcgaccgaatgcttggatcacggagatgaatctatagtcaaatcagaatttccgtaatcacgtctccagaatacggttatccgcaacgcagttacctccctgctgaagttcgtgttgcaatatggggctatgcgtgttggagccctacgagactacatctgacaaggactataaagaccactcaggacgtacgtggaaaacgcaaaaggaaggacaagactaccaagaccaccactatctgggaaactcctggtaaatgggagaggcatgtgtccatgcgccagcgccagcgcttcgtcatcatgcacgtcaaccgagagtctcggtatgaagctttgaggcatctggaccttatctcattgagttacgttttcaaacacgaggcgccggtcgattggagagcgccgtatctctctgaacaccccaaggttgaaaagaaacacatgctcgcaatcaactggcaatgcgatcttatcagtacatcacagactccaatgctcgcttttgaaaacacccccttcaccaaagctacccggtttgcattagatgtagatacagtcttgtggattctcccatcgcccacgcataggagtttctgggttctcaaaccgtgtctttcaatattcccaaggctcaaatacctagcgatcatcttcgatgggaatttcggaacgaaggcgagggcggtcttccacggttacgaaagttacgactatattgccacgctgaacaggatgcccaaagatgagcactactttattctatcacccagagaagcaatagatggttggcttctccgtgtccgttcagagctgcgggcgaacccgtaccttcaagaacatacagatggctgcgacacttggggctatcactcgggacgtggcactcttcaggatacggagactcttcgacaggctattacatacttacgacccgaagtggtcgtacaggatgtattagatccgacacaatgtaagtgatctgacgtgtcaaagatcagaaatcagccctttgtctcagaacccgtggccccgcgaagtcgtgaaaagtaactaacgcgacatcgttccggctaccagacatgaaacaagtggcctaaagaatcgttgcccactcagataactatattgcaactcataatgatgtttagctctggcccaatgctcgaagtctcgctgctggaaacaaattgaagccattcataccaacaaaatcgccatcgccctttccttttgcagcaatgtcgcgaacggcatgccggttttgctccatcgtcgcctccgtggaacagggcacgccacaatctgcaccgtatacaacatgttcgataccggtcatcttaattgcgggttccattccggtgtgagctgtcgcagccgtgtcgacataaaggcttctcatttgggcctgcatttcttctctcgtgacattgttgtgattaggaacccatgattgagcgccaagcaataacacacgcccagaaagagcagggaacgcgccgccactatgggcaaaaaacccatttaatatgcgggaaatctaaaaatatgcggttgtatagcatgtcggtgattgttcgcgcagtgtcaaatgcaacgtcaatcaacgccgacggtcggccatcctgtcctcgcaaatatgcattgggatggacgaagacaacctcgctgcggctatcgagctctttccagacaggtctaagtcttgggtctccaagcaggataccattcctattggtcgtcacggcaaacccatctggaaccagggagccgggttcctgctttgcctctagaggcttcaccctattgatctctcggagcgcctcctctggctcgtccgtaggtagtgcggcgaggagaccaaatctcgtggggttttctttcacgatcaacgcgccatagtcgttggatgctctgagggctgcggatgtcatcggaatattggatagcatctgcatgacaattcctgcgcgatcacaataggcaatcatttcggtagcattgaagcgcggggcttcgctggccatgaaatgagcatcacgtaaactggccacaattgtcgcatcttcagaagctggtcgagggacgaagaaatgagcatgaatatcaagccacccgtgtggtttctgtgtatttgccattgtgatatggtagatcaattactagtgtctctcaatatggcgtaacagacatacttatcaatttttttcgaagggcaattacactttcgaattccttacaatgactattcttatgcgacttctcattctgtttgtaaatagtcaagatgagagtgggcatcagaagtgtgatatggacattggacggacacattcggacatatcagatagtatgcacacttttacactaaac

SEQ ID NO: 5693 - DNA, 654 bp, Muscodor strobelii
  misc_feature: SGI cDNA ID NO. 561619
  misc_feature: Elevated expression when VOC is produced
  misc_feature: Encodes the peptide sequence at SEQ ID NO 5694
atggttacatacgaagcccacgcgcctcgcggccctgtaccgcctcattatgaggcgcctcacgaaccgagcagcgggtatacgacgtaccgaagaggacctccgagccagttcaacaccggccttcgtcggttctcatcgattccactgatcgtgctcttgtacagcgcggccctgcctttcaatccggtctcctgggtggtccccatggacggcgccttcttcatcgaccgtctttgtgccggggtcattctgatctgcgcttgctacttccaatggcagatcgccgggctcactcgtccgatcgcaattagcattccgaccggcggaggcacccaaactattcggaacggacgcatgcagggtggagctggcgcaatcgagcttgtctggcaaacaagcaattactggtcctatgccgcgtgcgaggtccttctcctcgccttagccgagtttggtcccagcgagatgctccgccgattacttgtctgcggtgtgttggccgggctctggatcatcggctggcccgccaccccacagcggtatcgcgcgtgggcttgggagcacatcaaagctctttggttttggattgtactacgggaactgttggacgttggacgagccaacgtggctaggagagcacggcgatattag

SEQ ID NO: 5694 - protein, 217 aa, Muscodor strobelii
  misc_feature: SGI Peptide ID NO. 561619
  misc_feature (43)..(207): NCBI GI: 171682670 Blast Desc: protein product [Podospora anserina] gi|170941294|emb|CAP66944.1| protein product [Podospora anserina]
  misc_feature: Useful for introducing or modulating the production of volatile compounds
MVTYEAHAPRGPVPPHYEAPHEPSSGYTTYRRGPPSQFNTGLRRFSSIPLIVLLYSAALPFNPVSWVVPMDGAFFIDRLCAGVILICACYFQWQIAGLTRPIAISIPTGGGTQTIRNGRMQGGAGAIELVWQTSNYWSYAACEVLLLALAEFGPSEMLRRLLVCGVLAGLWIIGWPATPQRYRAWAWEHIKALWFWIVLRELLDVGRANVARRARRY

SEQ ID NO: 5695 - DNA, 1497 bp, Muscodor strobelii
  misc_feature: SGI EST ID NO. CUFF.14333.0
  misc_feature: Variant of the nucleotide sequence at SEQ ID NO 5693
tggggccaaaggcaaggtcgaaataacactctgcttgcgtgcaattaattagagccgtgaagcatagatctataagtaggtagtgccaagcagatgcgacggtaacatcagtttccgtatttagaattagttgcagtgacacctcaaaatcctcaacggcagccttaagaatatgaggttgtacacgccgccgcctagcgtctgccttgtaggattgcgtttcaggcatccttcattcacgccgcacccaaactatatataacacaatcatgccaaataagcatcatgaagttttcccttcgtcttgtgcctgcgtgattgtgcccgaaatgcgaatgccctcgcctcgctgttgtcgactattaccgcctgtcactcttcactcgtgcaagaaagcaattagttaactattcctgagtccgataaccaagaagctactgaaaatggttacatacgaagcccacgcgcctcgcggccctgtaccgcctcattatgaggcgcctcacgaaccgagcagcgggtatacgacgtaccgaagaggacctccgagccagttcaacaccggccttcgtcggttctcatcgattccactgatcgtgctcttgtacagcgcggccctgcctttcaatccggtctcctgggtggtccccatggacggcgccttcttcatcgaccgtctttgtgccggggtcattctgatctgcgcttgctacttccaatggcagatcgccgggctcactcgtccgatcgcaattagcattccgaccggcggaggcacccaaactattcggaacggacgcatgcagggtggagctggcgcaatcgagcttgtctggcaaacaagcaattactggtcctatgccgcgtgcgaggtccttctcctcgccttagccgagtttggtcccagcgagatgctccgccgattacttgtctgcggtgtgttggccgggctctggatcatcggctggcccgccaccccacagcggtatcgcgcgtgggcttgggagcacatcaaagctctttggttttggattgtactacgggaactgttggacgttggacgagccaacgtggctaggagagcacggcgatattagatcggcggacggagcaatttcagatggaaattctttcattgagcttggcaggatatatttccaattgaccacgtaccgctcgacgctttgcgcggccaaaggcaggatgcatacctatgtacgtaacacccctttggcaccgttttaccagttgttagtatgtaaacttagagcgccagcctcagaacttagagagttttgaccatgctagttttttgacaaaaagactcctgtaaatgagacggacttcagctgggtaaaagtcatggtaaagggcggctcaatacatgacctgaaacaattgggttgcagccgctcttgtgcttttaatagcgttttgcatatcgtctacggatgtacagaaacaacccacttggaagccgctacgacacggcatcaa

SEQ ID NO: 5696 - DNA, 663 bp, Muscodor strobelii
  misc_feature: SGI cDNA ID NO. 561620
  misc_feature: Encodes the peptide sequence at SEQ ID NO 5697
atgtctttcgaaaacaagggcccggtgtctactactgatttcgaggttgatccaagagatatgctcgccgagaggcagcaacgcaagattcgtctcctcaacagcgttcgtctcggactcacggttctcgctcttctgagtggtatcaccatcctaggcacgtctgccaattcgatcatggtgtacaaagagactcatctcccaagcgactacaatctaccactctggccggcacaatttgatctccgacctactgtagcacttgtcgcagggagctccttcatcgttgcggtcaatcttgcatctgttgtgtttggaagagtcaagaatcttcgtggtagcatcgttcacagcgcagtcatcttcactacgcctttcatcggatttgttgccgcgttggtcggtctgactttcttcttcgctgtcaacgcttccacctcggtcgatacgcttcagagttggacttgtcagtggagttacgccaacatgaacacgcaaccacacttcagtaccctttgcaaccaaagcaagacagccctttacttgtcggtcatacttgtacctgtcgagcttattgctctcagtgttgctggtgttgagctattcctcgagcgaagagcgtacgagccgactcgtaaggcgagcagcccggccttgtcataa

SEQ ID NO: 5697 - protein, 220 aa, Muscodor strobelii
  misc_feature: SGI Peptide ID NO. 561620
  misc_feature (10)..(220): NCBI GI: 256729739 Blast Desc: NECHADRAFT_46756 [Nectria haematococca mpVI 77-13-4]
  misc_feature (1)..(220): NCBI GI: 46122125 Blast Desc: FG05440.1 [Gibberella zeae PH-1]
  misc_feature (14)..(205): NCBI GI: 116207318 Blast Desc: CHGG_02952 [Chaetomium globosum CBS 148.51] gi|88183549|gb|EAQ91017.1| CHGG_02952 [Chaetomium globosum CBS 148.51]
  misc_feature (15)..(220): NCBI GI: 171685868 Blast Desc: protein product [Podospora anserina] gi|170942895|emb|CAP68548.1| protein product [Podospora anserina]
  misc_feature (1)..(220): NCBI GI: 164428900 Blast Desc: NCU11172 [Neurospora crassa OR74A] gi|157072330|gb|EDO65404.1| [Neurospora crassa OR74A]
  misc_feature (1)..(218): NCBI GI: 39941562 Blast Desc: MGG_05692 [Magnaporthe grisea 70-15] gi|145022385|gb|EDK06405.1| MGG_05692 [Magnaporthe grisea 70-15]
  misc_feature (4)..(216): NCBI GI: 261360168 Blast Desc: conserved [Verticillium albo-atrum VaMs.102]
  misc_feature (48)..(220): NCBI GI: 154315334 Blast Desc: [Botryotinia fuckeliana B05.10] gi|150847669|gb|EDN22862.1| [Botryotinia fuckeliana B05.10]
  misc_feature (2)..(194): NCBI GI: 156037788 Blast Desc: SS1G_12608 [Sclerotinia sclerotiorum 1980] gi|154698016|gb|EDN97754.1| SS1G_12608 [Sclerotinia sclerotiorum 1980]
  misc_feature (20)..(205): NCBI GI: 255930189 Blast Desc: Pc06g00390 [Penicillium chrysogenum Wisconsin 54-1255] gi|211581267|emb|CAP79032.1| Pc06g00390 [Penicillium chrysogenum Wisconsin 54-1255]
MSFENKGPVSTTDFEVDPRDMLAERQQRKIRLLNSVRLGLTVLALLSGITILGTSANSIMVYKETHLPSDYNLPLWPAQFDLRPTVALVAGSSFIVAVNLASVVFGRVKNLRGSIVHSAVIFTTPFIGFVAALVGLTFFFAVNASTSVDTLQSWTCQWSYANMNTQPHFSTLCNQSKTALYLSVILVPVELIALSVAGVELFLERRAYEPTRKASSPALS

SEQ ID NO: 5698 - DNA, 1461 bp, Muscodor strobelii
  misc_feature: SGI EST ID NO. CUFF.14348.0
  misc_feature: Variant of the nucleotide sequence at SEQ ID NO 5696
gtttggaagagcattagttggatgggcgcctataggatggttgtgatgcttcattcatatttggtatgaagtgccccttatactgctcgtgccatctctaaatttgtttccttgggttcttttcaacatacgtctcatttgcttgcttagtttcaagtattcgcttcttcttcttttctttgactcgtattttctttacgtacactattatacacattcatttcataacacataccctctttcaacttaggtacctctcaacacacatactctgtcataatgtctttcgaaaacaagggcccggtgtctactactgatttcgaggttgatccaagagatatgctcgccgagaggcagcaacgcaagattcgtctcctcaacagcgttcgtctcggactcacggttctcgctcttctgagtggtatcaccatcctaggcacgtctgccaattcgatcatggtgtacaaagagactcatctcccaagcgactacaatctaccactctggccggcacaatttgatctccgacctactgtagcacttgtcgcagggagctccttcatcgttgcggtcaatcttgcatctgttgtgtttggaagagtcaagaatcttcgtggtagcatcgttcacagcgcagtcatcttcactacgcctttcatcggatttgttgccgcgttggtcggtctgactttcttcttcgctgtcaacgcttccacctcggtcgatacgcttcagagttggacttgtcagtggagttacgccaacatgaacacgcaaccacacttcagtaccctttgcaaccaaagcaagacagccctttacttgtcggtcatacttgtacctgtcgagcttattgctctcagtgttgctggtgttgagctattcctcgagcgaagagcgtacgagccgactcgtaaggcgagcagcccggccttgtcataattcaaacccagtgcgaactatcggcaagaaacaatctgaaacgatcaaattgccgagtttgaactctgtcatgaaggagttctccagatatcaatctcactggagatctctatgcaaggcacatgctacacgcattgcattgtccggtgctctgatcgtctgtcatcatatcaacagctatcaatccggtgttgtgaacagtaggaaagcctgttacctgtacattatacgcgcccaaggtattgtgtgatgagattacaagtcttacctggaaccttaccaggcatgaagaggtgtgtggatcttggaatgaatacattcttaacattaacaattatctaaatacaattttaacgaacgaaaatttgagattttaaactaattttctagtgtaattattccttggttttcgaaacgtgcgcccatcccatcctcctctcctagagagtagccgaatacacagtgcgtgcagtaggtgtggtatagttgaaaatgtacagttagagatatataaagagc

SEQ ID NO: 5699 - DNA, 1002 bp, Muscodor strobelii
  misc_feature: SGI cDNA ID NO. 561621
  misc_feature: Encodes the peptide sequence at SEQ ID NO 5700
atgcactcatcagcaacctggacttcaaacgccactacttcggaatccaaatcatcccgaacaagtagcgcaaagtctgcactccaagctgcacgtcgcggcgttgcaaaatcagtagatctgggacgcgtcacaatcgataaagcaaaacctatagtctcgtcaggtttatccaaaggtatgaagttaggcaaatccgccctcgtcgatcctatcgtcaacgcgaccgcggaaaggcgcgagaagaacgagaagaaacgtgaagaagtcgagaagaaatatgaaaagcaacagttcgacacggcaagaagtatgttgcctaattcattgcctttcgtctacgagacaggtaaggctccacgacgaagaggaagcagctcaccggactctctatactacaggcgcaggttaccgaaattgaagatacctgatcttaaaaccgcagtcgaagaagctctaaacaacccagcttcgaccaaaacgatcgactcacccacttggcagattctcgaaatgtcaccaacaagtgtagaacttcgttttagagtttctgcgcaagaaaaggagggctgtcgtgacaagcgcaatgagtattgcaacatgctctcagcacgacggcgtgtgagaaaaaccaagtttggtaaaacggtaagtagtcatcaaaaggcaagaccggattgggacgaattccagcttggtgctcccggaagctacagctaccaagatgcaaagcatcttttcgaggtcgtctgtgttctgcaagaacagaaagacgaagctacgaggctagtacaagccgcatcaaatgcgtacccgcgacttcgccccgtaaggatagccgggtcgacgatgaaggactactggcaaccgaagagctggtacaaaaagccgctcaagtggaccattaagccagagcaactggcagtacttttcaatgaggataaagagaggaagactgcggagaagcggaaaaatcggaaaaagatcgaagatattcggtaa

SEQ ID NO: 5700 - protein, 333 aa, Muscodor strobelii
  misc_feature: SGI Peptide ID NO. 561621
MHSSATWTSNATTSESKSSRTSSAKSALQAARRGVAKSVDLGRVTIDKAKPIVSSGLSKGMKLGKSALVDPIVNATAERREKNEKKREEVEKKYEKQQFDTARSMLPNSLPFVYETGKAPRRRGSSSPDSLYYRRRLPKLKIPDLKTAVEEALNNPASTKTIDSPTWQILEMSPTSVELRFRVSAQEKEGCRDKRNEYCNMLSARRRVRKTKFGKTVSSHQKARPDWDEFQLGAPGSYSYQDAKHLFEVVCVLQEQKDEATRLVQAASNAYPRLRPVRIAGSTMKDYWQPKSWYKKPLKWTIKPEQLAVLFNEDKERKTAEKRKNRKKIEDIR

SEQ ID NO: 5701 - DNA, 822 bp, Muscodor strobelii
  misc_feature: SGI cDNA ID NO. 561622
  misc_feature: Encodes the peptide sequence at SEQ ID NO 5702
atgaagttaggcaaatccgccctcgtcgatcctatcgtcaacgcgaccgcggaaaggcgcgagaagaacgagaagaaacgtgaagaagtcgagaagaaatatgaaaagcaacagttcgacacggcaagaagtatgttgcctaattcattgcctttcgtctacgagacaggtaaggctccacgacgaagaggaagcagctcaccggactctctatactacaggcgcaggttaccgaaattgaagatacctgatcttaaaaccgcagtcgaagaagctctaaacaacccagcttcgaccaaaacgatcgactcacccacttggcagattctcgaaatgtcaccaacaagtgtagaacttcgttttagagtttctgcgcaagaaaaggagggctgtcgtgacaagcgcaatgagtattgcaacatgctctcagcacgacggcgtgtgagaaaaaccaagtttggtaaaacggtaagtagtcatcaaaaggcaagaccggattgggacgaattccagcttggtgctcccggaagctacagctaccaagatgcaaagcatcttttcgaggtcgtctgtgttctgcaagaacagaaagacgaagctacgaggctagtacaagccgcatcaaatgcgtacccgcgacttcgccccgtaaggatagccgggtcgacgatgaaggactactggcaaccgaagagctggtacaaaaagccgctcaagtggaccattaagccagagcaactggcagtacttttcaatgaggataaagagaggaagactgcggagaagcggaaaaatcggaaaaagatcgaagatattcggtaa

SEQ ID NO: 5702 - protein, 273 aa, Muscodor strobelii
  misc_feature: SGI Peptide ID NO. 561622
MKLGKSALVDPIVNATAERREKNEKKREEVEKKYEKQQFDTARSMLPNSLPFVYETGKAPRRRGSSSPDSLYYRRRLPKLKIPDLKTAVEEALNNPASTKTIDSPTWQILEMSPTSVELRFRVSAQEKEGCRDKRNEYCNMLSARRRVRKTKFGKTVSSHQKARPDWDEFQLGAPGSYSYQDAKHLFEVVCVLQEQKDEATRLVQAASNAYPRLRPVRIAGSTMKDYWQPKSWYKKPLKWTIKPEQLAVLFNEDKERKTAEKRKNRKKIEDIR

SEQ ID NO: 5703 - DNA, 789 bp, Muscodor strobelii
  misc_feature: SGI cDNA ID NO. 561623
  misc_feature: Encodes the peptide sequence at SEQ ID NO 5704
atgccaccagcaggcccctcgttctccctccccatcaggcaaaagcccaagccgaaccccaacatgctcgagattctcccagcagaagtacgcattaagatctatgaatgggtcttcgatggtcttatagaagagctttcagataatttgtttggcgtcttctatctgtacgacaacctttatgattacaccggatcccatcatcagagccacgtaggcaaatccggtcttagtcttccgctctttgcgtgcaagcagatgcacgatgaagccttcaaagtgctttgtgaaaaagccgaattcgttgtcaacctgatgggtgatgacgatgaagacgataaagaacgagtcgatgtgcggcttccccctgacacacagatactgagatacgcttcgcatctgaaggtcaatgtcgaacctgagtttgacaaaaccattgatcgcttcgtcacgcgcattgagcggtttctcagcatgattggcgacggagccaatctacgttccttgatcatcaggatcgagtcaggcaagcttgaagaccctgagtcgatggagaaaattttggaggctttggcaaagttacaaaagacgcgcaggaactttgaggtctgtctgggagatgttccggagaagctgttgaatgcccggcggtttgacgagttcctggccacagtaaaggctactagcaatggtcgtggaacacctgcactggagccaaatcattacgagtatgaggacgaggatgaggacgaggagggcgatgatgatgacgacgacgatgataagtga

SEQ ID NO: 5704 - protein, 262 aa, Muscodor strobelii
  misc_feature: SGI Peptide ID NO. 561623
MPPAGPSFSLPIRQKPKPNPNMLEILPAEVRIKIYEWVFDGLIEELSDNLFGVFYLYDNLYDYTGSHHQSHVGKSGLSLPLFACKQMHDEAFKVLCEKAEFVVNLMGDDDEDDKERVDVRLPPDTQILRYASHLKVNVEPEFDKTIDRFVTRIERFLSMIGDGANLRSLIIRIESGKLEDPESMEKILEALAKLQKTRRNFEVCLGDVPEKLLNARRFDEFLATVKATSNGRGTPALEPNHYEYEDEDEDEEGDDDDDDDDK

SEQ ID NO: 5705 - DNA, 4890 bp, Muscodor strobelii
  misc_feature: SGI EST ID NO. CUFF.14490.0
  misc_feature: Variant of the nucleotide sequence at SEQ ID NO 5703
gtttgtgaaggtgcgactgatattctgctgtttggcagcggcatgtgctctagctccaccaggacgtatcaggtgcacatttcaatcaggcttacttgtccaccttcatgcttccgacatctcacttaccttgtaaatacccatacatatctacataagcttcacaaaagcttctcttgctccctgtgagattttgaaatccgttcaacacgagtgcgcttgacgtttggagctctgcttggtttgacagcaaccgcaaaaatgccaccagcaggcccctcgttctccctccccatcaggcaaaagcccaagccgaaccccaacatgctcgagattctcccagcagaagtacgcattaagatctatgaatgggtcttcgatggtcttatagaagagctttcagataatttgtttggcgtcttctatctgtacgacaacctttatgattacaccggatcccatcatcagagccacgtaggcaaatccggtcttagtcttccgctctttgcgtgcaagcagatgcacgatgaagccttcaaagtgctttgtgaaaaagccgaattcgttgtcaacctgatgggtgatgacgatgaagacgataaagaacgagtcgatgtgcggcttccccctgacacacagatactgagatacgcttcgcatctgaaggtcaatgtcgaacctgagtttgacaaaaccattgatcgcttcgtcacgcgcattgagcggtttctcagcatgattggcgacggagccaatctacgttccttgatcatcaggatcgagtcaggcaagcttgaagaccctgagtcgatggagaaaattttggaggctttggcaaagttacaaaagacgcgcaggaactttgaggtctgtctgggagatgttccggagaagctgttgaatgcccggcggtttgacgagttcctggccacagtaaaggctactagcaatggtcgtggaacacctgcactggagccaaatcattacgagtatgaggacgaggatgaggacgaggagggcgatgatgatgacgacgacgatgataagtgaaagagcttctttaatcatccttttcacggttgcagatacaccaatcaatgaggttacgcagcttggggatgggaatactagcaaatataactagagggtgtattgtgattatattcatgctccagccgcaggtacctgccctcgaacataaccaccacaaagatacatataactatataaagtgctgcctgctggtggaaaatgatgcctaggtcatttccgcacttccggcgtccatagcgaggacaaccgcaacatatctataatacacaatgaaatcgcatatataggtatctacgagttggcaaatttcacagtgacactggctgagggtgtaagtcagctgtgatatacctaaggttgaaagtctgtaacagaactgagatgttacctgaagctgctcagcgcaaccccgcaacggtagcattgggctaggcggtgcaggtgggatgagacacggttggcggggcagggagacgggacctgaacgtgacggagtaccgccaaatcctccaggccgttagttctccatatccacggtggttctcttgacatcgggaataaataagatcattcttcccgaattgtagctctatactcttctagttccattgggcttctactccgttggtgagacttctcccccggaagagaaaagacgctccacgctacagccctagaagcaagatgcagtctggcatagcagcttcgcaggagctgatctcacagttcaacgacttcgtatccgacgactccctcttcggtttcatcgtcaccatcaccggcgagagcctgacccgtgtagccacgctgccggcctcctcatccgacttcaagacgaatctcaacgagctcgcgccccaactcaacgatgactgccgtttcgtgatcctcaagcgatacccagatgcgccgcgtctggtgatagccacctactctcccgacaaagcccccatgcggtcgaggatgatcttcgcttccacgcggctctcgttcccaagagacttaggcctggaacatttccgcgagcagatgcgcgttgataaggcatcagagctttctgccgagggctttgaggcccacgatgcgcacaaggttgcggatgcaccattaacagaagaggagcggacgctgggcgaggtcaagcgggctgagagagaggcaggtagtgggacgggcggtcgtgcccttcaccccaaggccagtgtgagtatggagaccacccaagatggattggatgcattgcagaaattggccaataaagatactgactttgttatactccacataacaccggccgagaaagttgagcttgtccccgacaccccaaatccaacatcgctattcgaagccatggcatccattggcacgtcggagcccagatacaccttctatcgcttcaaaccatcctccggcggggaccaggaatacctcctcttcttctacacacatcccgctggccccagaagtatcaaagaccgcatgatgtatccgttgcagaaaagagcagtcatagccatggccgagagtcaatttggcctttccgtgtcgaagaactacgagattgaagatcccagtgagatcacagaggaatctgttctcgatgatctgacccccaagcaagagatcgcgaagccgcgcttcgctagacctaagagaccaggcaggtagacacgggtattctcacaaaggcaattgattagcaccaagtatagcaagcgactgaagattcacatttgagaatcatggtagattttataaacctcattgtgctttcggtgttcaatgggtggatacctacctacctacatatatgcaaatgccgcctgatcaaatatgctatgtatgaacacgatgcatgtatgtaatcccagggccatcccctcaactattaacacaaacccacaattgtcatatcaaatccatctatactatagacccatgccatctattcctcgaatctgtttctcgccgcgcctgacggtttactctgctccagcttgtctttcaggtactcgtacacggtaaacgtaactgcctgacccggcgcaacacgcatgacgcggggtgtgatgcccttgtagaaggcatggaaaccctcttgcctaccacaatgccttgttagtctctaacgatctcatcgtaagaacaagcaaagcgaaagatcacctacttgaacatatccgcagcaatcatgctgatccttcggaatgcactgacgcctggctcagccggcgtcttttgtaacctcgtcttgatagtgtcgatgggcgcattactcaaaggccccatagcaccactgacgagaccgatgaccgtcgtctgataactggggagcgcagcgtgatccggttgccagcgaagtagcgcctctttgaaatatgtgtacgccgtgaagttgaccgcctgattcgagccctgtctcagcgctgtgagacttacaccgcggtacagcgcgccggcaccttcctccttaacgacggtgtacagcgcatgcgcggcattgcggtacttcggcacatcaagagggtctgccatgctgtggtgttgcgcctgcagacggatcttgatgacttccattggcgttacgacagctacggcttcggtgacacccgctgcgagtccagcaaggaacgtcgcggagccagtaatggtccccgtttgcttgtccgccagcatctgcttgtatgcttcgaaggacgtgaaacggatcgccatctttggtacgatacccgttaatacggctcctaagcccttgtataaccccaacggcgtctctcgctttacgatctctgttccggtacggatgaatcctcgtttcggtgcgcctggttggcgcgcgcgacgtgaaagctgcatacggacttttatcgtgtctatatatccccaagtgtgttagttaagatgtcctgatgtgtttctctctcactttgatcttcaattggcaagagcaggaccaggttagacataccgagagggtgacatacgagcgcctccatcataccggcaccaccaccagctacaacgataacaagtcagtaaatagatagcgacgtagcatatatcgaatttgcaacgtaccgatcagattcgtcgctgcagatggcggcgccttgccatctttgccgcccactttagtcgccatcctgccgaggcaaatgtaggtttgcgctctatctctctatagtatgcccaatcccgtcagggacggccgtcgtatttttattcttcgcaactttttcaaccaatagcaagttcgagtaagaatgcgactataacgaagccaagtattcaaaatggcagaaaatcgcaatgcgccggcaagacacagaattccagcacaaatcgggtggcgacgtcaccaacggtctacaagtaatcctcaacggtagaaaaactttcgaacccgaatctcgtcctcgtgacctgtcttacgtgccccgcgtacgcgactggaatgcgcaagcaacgtggcggtatactttcggctagctgactcgatacgggacgaggcttaggtacggcgggagcaataatacgtaaacagatagcagtcctcggtattaccatgaacaagcaatgggaaaggaaaaagagagccaggagacaagagagaggaagaaaaagccactcaaaccttcatcttctaagccgaaagctggggtcatgggcctaagtatgtctatataagagggcaaggcaagcttaggtagcttaagggccaagtggtctcggccaccagataggtagcttgcgagtcacacatcctcgtccgcgtgcccggtagacttctactaggcaggtttcacgtcccgcggctcaggcgcgtgggaatcggtg

SEQ ID NO: 5706 - DNA, 1041 bp, Muscodor strobelii
  misc_feature: SGI cDNA ID NO. 561624
  misc_feature: Encodes the peptide sequence at SEQ ID NO 5707
atgcagtctggcatagcaggtaaggagcaccaacacatcgacctgcaacaaacaactgacccatcattgccaaaagcttcgcaggagctgatctcacagttcaacgacttcgtatccgacgactccctcttcggtttcatcgtcaccatcaccggcgagagcctgacccgtgtagccacgctgccggcctcctcatccgacttcaagacgaatctcaacgagctcgcgccccaactcaacgatgactgccgtttcgtgatcctcaagcgatacccagatgcgccgcgtctggtgatagccacctactctcccgacaaagcccccatgcggtcgaggatgatcttcgcttccacgcggctctcgttcccaagagacttaggcctggaacatttccgcgagcagatgcgcgttgataaggcatcagagctttctgccgagggctttgaggcccacgatgcgcacaaggttgcggatgcaccattaacagaagaggagcggacgctgggcgaggtcaagcgggctgagagagaggcaggtagtgggacgggcggtcgtgcccttcaccccaaggccagtgtgagtatggagaccacccaagatggattggatgcattgcagaaattggccaataaagatactgactttgttatactccacataacaccggccgagaaagttgagcttgtccccgacaccccaaatccaacatcgctattcgaagccatggcatccattggcacgtcggagcccagatacaccttctatcgcttcaaaccatcctccggcggggaccaggaatacctcctcttcttctacacacatcccgctggccccagaagtatcaaagaccgcatgatgtatccgttgcagaaaagagcagtcatagccatggccgagagtcaatttggcctttccgtgtcgaagaactacgagattgaagatcccagtgagatcacagaggaatctgttctcgatgatctgacccccaagcaagagatcgcgaagccgcgcttcgctagacctaagagaccaggcaggtag

SEQ ID NO: 5707 - protein, 346 aa, Muscodor strobelii
  misc_feature: SGI Peptide ID NO. 561624
  misc_feature (199)..(328): Pfam Id: PF00241 Pfam Desc: Cofilin/tropomyosin-type actin-binding protein
  misc_feature (28)..(151): Pfam Id: PF00241 Pfam Desc: Cofilin/tropomyosin-type actin-binding protein
  misc_feature (1)..(346): NCBI GI: 256726519 Blast Desc: NECHADRAFT_60521 [Nectria haematococca mpVI 77-13-4]
  misc_feature (26)..(346): NCBI GI: 46124379 Blast Desc: FG06567.1 [Gibberella zeae PH-1]
  misc_feature (26)..(346): NCBI GI: 116208712 Blast Desc: CHGG_03649 [Chaetomium globosum CBS 148.51] gi|88184246|gb|EAQ91714.1| CHGG_03649 [Chaetomium globosum CBS 148.51]
  misc_feature (26)..(346): NCBI GI: 171685202 Blast Desc: protein product [Podospora anserina] gi|170942562|emb|CAP68214.1| protein product [Podospora anserina]
  misc_feature (26)..(345): NCBI GI: 164423912 Blast Desc: NCU07512 [Neurospora crassa OR74A] gi|157070284|gb|EAA28748.2| conserved [Neurospora crassa OR74A]
  misc_feature (68)..(346): NCBI GI: 145609465 Blast Desc: MGG_07617 [Magnaporthe grisea 70-15] gi|145016826|gb|EDK01256.1| MGG_07617 [Magnaporthe grisea 70-15]
  misc_feature (26)..(346): NCBI GI: 156048130 Blast Desc: SS1G_08796 [Sclerotinia sclerotiorum 1980] gi|154693193|gb|EDN92931.1| SS1G_08796 [Sclerotinia sclerotiorum 1980]
  misc_feature (26)..(346): NCBI GI: 154300722 Blast Desc: BC1G_10949 [Botryotinia fuckeliana B05.10] gi|150856556|gb|EDN31748.1| BC1G_10949 [Botryotinia fuckeliana B05.10]
  misc_feature (26)..(346): NCBI GI: 189206572 Blast Desc: twinfilin-1 [Pyrenophora tritici-repentis Pt-1C-BFP] gi|187975713|gb|EDU42339.1| twinfilin-1 [Pyrenophora tritici-repentis Pt-1C-BFP]
  misc_feature (158)..(346): NCBI GI: 261353979 Blast Desc: conserved [Verticillium albo-atrum VaMs.102]
MQSGIAGKEHQHIDLQQTTDPSLPKASQELISQFNDFVSDDSLFGFIVTITGESLTRVATLPASSSDFKTNLNELAPQLNDDCRFVILKRYPDAPRLVIATYSPDKAPMRSRMIFASTRLSFPRDLGLEHFREQMRVDKASELSAEGFEAHDAHKVADAPLTEEERTLGEVKRAEREAGSGTGGRALHPKASVSMETTQDGLDALQKLANKDTDFVILHITPAEKVELVPDTPNPTSLFEAMASIGTSEPRYTFYRFKPSSGGDQEYLLFFYTHPAGPRSIKDRMMYPLQKRAVIAMAESQFGLSVSKNYEIEDPSEITEESVLDDLTPKQEIAKPRFARPKRPGR

SEQ ID NO: 5708 - DNA, 4890 bp, Muscodor strobelii; identical to SEQ ID NO: 5705
  misc_feature: SGI EST ID NO. CUFF.14490.0
  misc_feature: Variant of the nucleotide sequence at SEQ ID NO 5706

SEQ ID NO: 5709 - DNA, 972 bp, Muscodor strobelii
  misc_feature: SGI cDNA ID NO. 561625
  misc_feature: Encodes the peptide sequence at SEQ ID NO 5710
atggcgactaaagtgggcggcaaagatggcaaggcgccgccatctgcagcgacgaatctgatcgctggtggtggtgccggtatgatggaggcgctcgtatgtcaccctctcgacacgataaaagtccgtatgcagctttcacgtcgcgcgcgccaaccaggcgcaccgaaacgaggattcatccgtaccggaacagagatcgtaaagcgagagacgccgttggggttatacaagggcttaggagccgtattaacgggtatcgtaccaaagatggcgatccgtttcacgtccttcgaagcatacaagcagatgctggcggacaagcaaacggggaccattactggctccgcgacgttccttgctggactcgcagcgggtgtcaccgaagccgtagctgtcgtaacgccaatggaagtcatcaagatccgtctgcaggcgcaacaccacagcatggcagaccctcttgatgtgccgaagtaccgcaatgccgcgcatgcgctgtacaccgtcgttaaggaggaaggtgccggcgcgctgtaccgcggtgtaagtctcacagcgctgagacagggctcgaatcaggcggtcaacttcacggcgtacacatatttcaaagaggcgctacttcgctggcaaccggatcacgctgcgctccccagttatcagacgacggtcatcggtctcgtcagtggtgctatggggcctttgagtaatgcgcccatcgacactatcaagacgaggttacaaaagacgccggctgagccaggcgtcagtgcattccgaaggatcagcatgattgctgcggatatgttcaagcaagagggtttccatgccttctacaagggcatcacaccccgcgtcatgcgtgttgcgccgggtcaggcagttacgtttaccgtgtacgagtacctgaaagacaagctggagcagagtaaaccgtcaggcgcggcgagaaacagattcgaggaatag

SEQ ID NO: 5710 - protein, 323 aa, Muscodor strobelii
  misc_feature: SGI Peptide ID NO. 561625
  misc_feature (114)..(212): Pfam Id: PF00153 Pfam Desc: Mitochondrial carrier protein
  misc_feature (15)..(109): Pfam Id: PF00153 Pfam Desc: Mitochondrial carrier protein
  misc_feature (219)..(312): Pfam Id: PF00153 Pfam Desc: Mitochondrial carrier protein
  misc_feature (1)..(313): NCBI GI: 39972629 Blast Desc: MGG_07616 [Magnaporthe grisea 70-15] gi|145016825|gb|EDK01255.1| MGG_07616 [Magnaporthe grisea 70-15]
  misc_feature (1)..(314): NCBI GI: 256726381 Blast Desc: [Nectria haematococca mpVI 77-13-4]
  misc_feature (2)..(311): NCBI GI: 156048128 Blast Desc: SS1G_08795 [Sclerotinia sclerotiorum 1980] gi|154693192|gb|EDN92930.1| SS1G_08795 [Sclerotinia sclerotiorum 1980]
  misc_feature (1)..(323): NCBI GI: 171685366 Blast Desc: protein product [Podospora anserina] gi|170942644|emb|CAP68296.1| protein product [Podospora anserina]
  misc_feature (1)..(323): NCBI GI: 39979123 Blast Desc: succinate-fumarate transporter [Neurospora crassa]
  misc_feature (1)..(314): NCBI GI: 85109127 Blast Desc: succinate/fumarate mitochondrial transporter [Neurospora crassa OR74A] gi|28924384|gb|EAA33520.1| succinate/fumarate mitochondrial transporter [Neurospora crassa
  misc_feature (1)..(314): NCBI GI: 46124377 Blast Desc: FG06566.1 [Gibberella zeae PH-1]
  misc_feature (1)..(323): NCBI GI: 212530004 Blast Desc: succinate:fumarate antiporter (Acr1), [Penicillium marneffei ATCC 18224] gi|210074557|gb|EEA28644.1| succinate:fumarate antiporter (Acr1), [Penicillium marneffei ATCC
  misc_feature (2)..(312): NCBI GI: 119482267 Blast Desc: succinate:fumarate antiporter (Acr1), [Neosartorya fischeri NRRL 181] gi|119409316|gb|EAW19265.1| succinate:fumarate antiporter (Acr1), [Neosartorya fischeri NRRL 181]
  misc_feature (1)..(314): NCBI GI: 242761617 Blast Desc: succinate:fumarate antiporter (Acr1), [Talaromyces stipitatus ATCC 10500] gi|218723411|gb|EED22828.1| succinate:fumarate antiporter (Acr1), [Talaromyces stipitatus
MATKVGGKDGKAPPSAATNLIAGGGAGMMEALVCHPLDTIKVRMQLSRRARQPGAPKRGFIRTGTEIVKRETPLGLYKGLGAVLTGIVPKMAIRFTSFEAYKQMLADKQTGTITGSATFLAGLAAGVTEAVAVVTPMEVIKIRLQAQHHSMADPLDVPKYRNAAHALYTVVKEEGAGALYRGVSLTALRQGSNQAVNFTAYTYFKEALLRWQPDHAALPSYQTTVIGLVSGAMGPLSNAPIDTIKTRLQKTPAEPGVSAFRRISMIAADMFKQEGFHAFYKGITPRVMRVAPGQAVTFTVYEYLKDKLEQSKPSGAARNRFEE

SEQ ID NO: 5711 - DNA, 4933 bp, Muscodor strobelii
  misc_feature: SGI EST ID NO. CUFF.14491.1
  misc_feature: Variant of the nucleotide sequence at SEQ ID NO 5709
caccgattcccacgcgcctgagccgcgggacgtgaaacctgcctagtagaagtctaccgggcacgcggacgaggatgtgtgactcgcaagctacctatctggtggccgagaccacttggcccttaagctacctaagcttgccttgccctcttatatagacatacttaggcccatgaccccagctttcggcttagaagatgaaggtttgagtggctttttcttcctctctcttgtctcctggctctctttttcctttcccattgcttgttcatggtaataccgaggactgctatctgtttacgtattattgctcccgccgtacctaagcctcgtcccgtatcgagtcagctagccgaaagtataccgccacgttgcttgcgcattccagtcgcgtacgcggggcacgtaagacaggtcacgaggacgagattcgggttcgaaagtttttctaccgttgaggattacttgtagaccgttggtgacgtcgccacccgatttgtgctggaattctgtgtcttgccggcgcattgcgattttctgccattttgaatacttggcttcgttatagtcgcattcttactcgaacttgctattggttgaaaaagttgcgaagaataaaaatacgacggccgtccctgacgggattgggcatactatagagagatagagcgcaaacctacatttgcctcggcaggatggcgactaaagtgggcggcaaagatggcaaggcgccgccatctgcagcgacgaatctgatcgctggtggtggtgccggtatgatggaggcgctcgtatgtcaccctctcgacacgataaaagtccgtatgcagctttcacgtcgcgcgcgccaaccaggcgcaccgaaacgaggattcatccgtaccggaacagagatcgtaaagcgagagacgccgttggggttatacaagggcttaggagccgtattaacgggtatcgtaccaaagatggcgatccgtttcacgtccttcgaagcatacaagcagatgctggcggacaagcaaacggggaccattactggctccgcgacgttccttgctggactcgcagcgggtgtcaccgaagccgtagctgtcgtaacgccaatggaagtcatcaagatccgtctgcaggcgcaacaccacagcatggcagaccctcttgatgtgccgaagtaccgcaatgccgcgcatgcgctgtacaccgtcgttaaggaggaaggtgccggcgcgctgtaccgcggtgtaagtctcacagcgctgagacagggctcgaatcaggcggtcaacttcacggcgtacacatatttcaaagaggcgctacttcgctggcaaccggatcacgctgcgctccccagttatcagacgacggtcatcggtctcgtcagtggtgctatggggcctttgagtaatgcgcccatcgacactatcaagacgaggttacaaaagacgccggctgagccaggcgtcagtgcattccgaaggatcagcatgattgctgcggatatgttcaagcaagagggtttccatgccttctacaagggcatcacaccccgcgtcatgcgtgttgcgccgggtcaggcagttacgtttaccgtgtacgagtacctgaaagacaagctggagcagagtaaaccgtcaggcgcggcgagaaacagattcgaggaatagatggcatgggtctatagtatagatggatttgatatgacaattgtgggtttgtgttaatagttgaggggatggccctgggattacatacatgcatcgtgttcatacatagcatatttgatcaggcggcatttgcatatatgtaggtaggtaggtatccacccattgaacaccgaaagcacaatgaggtttataaaatctaccatgattctcaaatgtgaatcttcagtcgcttgctatacttggtgctaatcaattgcctttgtgagaatacccgtgtctacctgcctggtctcttaggtctagcgaagcgcggcttcgcgatctcttgcttgggggtcagatcatcgagaacagattcctctgtgatctcactgggatcttcaatctcgtagttcttcgacacggaaaggccaaattgactctcggccatggctatgactgctcttttctgcaacggatacatcatgcggtctttgatacttctggggccagcgggatgtgtgtagaagaagaggaggtattcctggtccccgccggaggatggtttgaagcgatagaaggtgtatctgggctccgacgtgccaatggatgccatggcttcgaatagcgatgttggatttggggtgtcggggacaagctcaactttctcggccggtgttatgtgctgttacttgttaacaacccaaagtaaaagacaataaggtgatgggcaaagaatatcaactcacgagtataacaaagtcagtatctttattggccaatttctgcaatgcatccaatccatcttgggtggtctccatactcacactggccttggggtgaagggcacgaccgcccgtcccactacctgcctctctctcagcccgcttgacctcgcccagcgtccgctcctcttctgttaatggtgcatccgcaaccttgtgcgcatcgtgggcctcaaagccctcggcagaaagctctgatgccttatcaacgcgcatctgctcgcggaaatgttccaggcctaagtctcttgggaacgagagccgcgtggaagcgaagatcatcctcgaccgcatgggggctttgtcgggagagtaggtggctatcaccagacgcggcgcatctgggtatcgcttgaggatcacgaaacggcagtcatcgttgagttggggcgcgagctcgttgagattcgtcttgaagtcggatgaggaggccggcagcgtggctacacgggtcaggctctcgccggtgatggtgacgatgaaaccgaagagggagtcgtcggatacgaagtcgttgaactgtgagatcagctcctgcgaagcttttggcaatgatgggtcagttgtttgttgcaggtcgatgtgttggtgctccttacctgctatgccagactgcatcttgcttctagggctgtagcgtggagcgtcttttctcttccgggggagaagtctcaccaacggagtagaagcccaatggaactagaagagtatagagctacaattcgggaagaatgatcttatttattcccgatgtcaagagaaccaccgtggatatggagaactaacggcctggaggatttggcggtactccgtcacgttcaggtcccgtctccctgccccgccaaccgtgtctcatcccacctgcaccgcctagcccaatgctaccgttgcggggttgcgctgagcagcttcaggtaacatctcagttctgttacagactttcaaccttaggtatatcacagctgacttacaccctcagccagtgtcactgtgaaatttgccaactcgtagatacctatatatgcgatttcattgtgtattatagatatgttgcggttgtcctcgctatggacgccggaagtgcggaaatgacctaggcatcattttccaccagcaggcagcactttatatagttatatgtatctttgtggtggttatgttcgagggcaggtacctgcggctggagcatgaatataatcacaatacaccctctagttatatttgctagtattcccatccccaagctgcgtaacctcattgattggtgtatctgcaaccgtgaaaaggatgattaaagaagctctttcacttatcatcgtcgtcgtcatcatcatcgccctcctcgtcctcatcctcgtcctcatactcgtaatgatttggctccagtgcaggtgttccacgaccattgctagtactagatgtgtctgtcagtgaattgatctcatgagcatgctaaatgaatagaaagcactcacgcctttactgtggccaggaactcgtcaaaccgccgggcattcaacagcttctccggaacatctcccagacagacctcaaagttcctgcgcgtcttttgtaactttgccaaagcctccaaaattttctccatcgactcagggtcttcaagcttgcctgactcgatcctgatgatcaaggaacgtagattggctccgtcgccaatcatgctgagaaaccgctcaatgcgcgtgacgaagcgatcaatggttttgtcaaactcaggttcgacattgaccttcagatgcgaagcgtatctcagtatctgtgtgtcagggggaagccgcacatcgactcgttctttatcgtcttcatcgtcatcacccatcactgcaagagcgaatgtcaggatcatcttgcaagatataaagtgaatggattatgtaaggcaatgctgagtgacaggcgcaactcacggttgacaacgaattcggctttttcacaaagcactttgaaggcttcatcgtgcatctgcttgcacgcaaagagcggaagactaagaccggatttgcctacgtggctctgatgatgggatccggtgtaatcataaaggttgtcgtacagatagaagacgccaaacaaattatctgaaagctcttctataagaccatcgaagacccattcatagatcttaatgcgtacttctgctgggagaatctcgagcatgttggggttcggcttgggcttttgcctgatggggagggagaacgaggggcctgctggtggcatttttgcggttgctgtcaaaccaagcagagctccaaacgtcaagcgcactcgtgttgaacggatttcaaaatctcacagggagcaagagaagcttttgtgaagcttatgtagatatgtatgggtatttacaaggtaagtgagatgtcggaagcatgaaggtggacaagtaagcctgattgaaatgtgcacctgatacgtcctggtggagctagagcacatgccgctgccaaacagcagaatatcagtcgcaccttcacaaac

SEQ ID NO: 5712 - DNA, 2097 bp, Muscodor strobelii
  misc_feature: SGI cDNA ID NO. 561626
  misc_feature: Elevated expression when VOC is produced
  misc_feature: Encodes the peptide sequence at SEQ ID NO 5713
atgtacaacccgagcgagccgggctttggcttgtcgagccagaagccggccgctccatcgaatgcacgacaagcgccgccgtcgaacatccccaaacaagtcgaagagtcgaaacccaacatgcaaccatcgcgagacaactgcgataggaggagaccagaagaggaggaggacagctctcgactgttcaacatgtctcagcagttcatgaacaaatccgtcaccccattcctacgagaacatattcccggcctatacgcccccataggcaaaccagatcttccatcgatgaccacccttcgaacgaaagatcccaacagcaaatactgctatcgacaccgtccagattcgaagtgccgtagggcggccgacgaatccaagatgggtcttattcaaagtgaactcgagacattgcctgacggagaccgtcaagccatcactaacgtctggtccttgttctccgccgcgccaacaaagcagcgtgagcttatgctgcgaggcgtcatctctcagtgctgttttcctcagctatccctcgtgtctagagaagtccatgaacagctcaagattgacttcatctccgccctccctgtcgaactatctctgaagattttatgctacctcgactgcaaatcactctgcaagacggctcaagtcagtcggcggtggtctatattatcgggagacgacgtggtttggcatcgcatgtgtgaacaacacatcggccggaagtgtgagaaatgtcagtggggtttaccgaggttggaaaagaagagattgagagagtggaagatacagcacatgccagcaaacccttcacgccctcttgcccttcctccagctccagctacttccgtctccacagccatcaagcgttctgctgaggaatcggatggtgaagtagagcccaagcgtcgttgtacacagggtgctcccgacagagaagcgagccaggagcccgaatacaaaagcaaatacaggccatggaaagacgtgtatcgagaccgcttcaaggtcggatccaactggaagaatggccggtgcacgatcaagacctttagcggtcatgcaaatggagtcacatgtctccagttcgacgacaatatgcttgctactggatcctatgatgcaacaatcaagttatggaatatcgagaagggagaagttgtgcgaactcttgcaggccacaccatgggtatccgagctttgcaattcgacgatcgactacttgtcagcggaagcctagatggcaccgtcaagatctggaactggcggacaggggcttgcattaataccctgagtcatcaagaaggcgttatcactgttcacatggagggcgactacgttgcatctgggtcgatcgaccagtccatcaagatattcaatttcaagaccaaggaatcgttctgcctgcgtggtcacagcgattgggtgaatcaagtccgattagacctcacctcgcgaacactgctctcggcttcggatgattgtacggtcaaactttgggatttagattcccgcacttgcatcaaaacatacgaaggtcatgttggacaggtgcaacaagtgctggctctgcccgaggactttgaattcgaagacacggccccacgagagaccgacatatcatctacagcgagcaatcgcagcacaagcccgaccgattcacctagccaagtatctctacagcaaagagcagatgaagaacgcgccgcttatggcttcatgtttgtcgatcatccggaacgcccacttcctccccgccacatactgactggatcccttgacgggactttgcgagtctgggacactgccactggcaaaagccctcgctgtttctggggtcatgtagaaggagtttggggactcgctgcggacacgctccgttatgtctcgggggctaatgatgccacggtcaaagtttgggagcccaggacagggaaatgcgagcgcactttcacgggccacagcgggccagtgacttgtgttggtctcagcgacagtcgttttgccagtggaggcgaagacggggaggttcgtctgtatagtttcgaaggtgaaccatcagaatgtcaagaacgggggacaccgtcgtga

SEQ ID NO: 5713 - protein, 698 aa, Muscodor strobelii
  misc_feature: SGI Peptide ID NO. 561626
  misc_feature (191)..(238): Pfam Id: PF00646 Pfam Desc: F-box domain
  misc_feature (347)..(383): Pfam Id: PF00400 Pfam Desc: WD domain, G-beta repeat
  misc_feature (387)..(423): Pfam Id: PF00400 Pfam Desc: WD domain, G-beta repeat
  misc_feature (647)..(683): Pfam Id: PF00400 Pfam Desc: WD domain, G-beta repeat
  misc_feature (465)..(503): Pfam Id: PF00400 Pfam Desc: WD domain, G-beta repeat
  misc_feature (507)..(603): Pfam Id: PF00400 Pfam Desc: WD domain, G-beta repeat
  misc_feature (65)..(698): NCBI GI: 256726380 Blast Desc: NECHADRAFT_39192 [Nectria haematococca mpVI 77-13-4]
  misc_feature (65)..(698): NCBI GI: 261353984 Blast Desc: sulfur controller 2 [Verticillium albo-atrum VaMs.102]
  misc_feature (65)..(685): NCBI GI: 116208426 Blast Desc: CHGG_03506 [Chaetomium globosum CBS 148.51] gi|88184103|gb|EAQ91571.1| CHGG_03506 [Chaetomium globosum CBS 148.51]
  misc_feature (62)..(686): NCBI GI: 171685364 Blast Desc: protein product [Podospora anserina] gi|170942643|emb|CAP68295.1| protein product [Podospora anserina]
  misc_feature (43)..(685): NCBI GI: 1041197 Blast Desc: sconB [Emericella nidulans]
  misc_feature (43)..(685): NCBI GI: 67540378 Blast Desc: SCOB_EMENI Sulfur metabolite repression control protein [Aspergillus nidulans FGSC A4] gi|146345510|sp|Q00659.2|SCONB_EMENI RecName: Full=Sulfur control
  misc_feature (53)..(685): NCBI GI: 71002126 Blast Desc: sulfur metabolite repression control protein SconB [Aspergillus fumigatus Af293] gi|66853382|gb|EAL93706.1| sulfur metabolite repression control protein SconB, [Aspergillus Af293]
  misc_feature (68)..(684): NCBI GI: 238497159 Blast Desc: sulfur metabolite repression control protein SconB, [Aspergillus flavus NRRL3357] gi|220694695|gb|EED51039.1| sulfur metabolite repression control protein SconB, [Aspergillus flavus
  misc_feature (68)..(684): NCBI GI: 169774323 Blast Desc: [Aspergillus oryzae RIB40] gi|83769492|dbj|BAE59627.1| protein product [Aspergillus oryzae]
  misc_feature (60)..(685): NCBI GI: 145232338 Blast Desc: An02g04800 [Aspergillus niger] gi|134056533|emb|CAK47657.1| protein product [Aspergillus niger]
  misc_feature: Useful for introducing or modulating the production of volatile compounds
MYNPSEPGFGLSSQKPAAPSNARQAPPSNIPKQVEESKPNMQPSRDNCDRRRPEEEEDSSRLFNMSQQFMNKSVTPFLREHIPGLYAPIGKPDLPSMTTLRTKDPNSKYCYRHRPDSKCRRAADESKMGLIQSELETLPDGDRQAITNVWSLFSAAPTKQRELMLRGVISQCCFPQLSLVSREVHEQLKIDFISALPVELSLKILCYLDCKSLCKTAQVSRRWSILSGDDVVWHRMCEQHIGRKCEKCQWGLPRLEKKRLREWKIQHMPANPSRPLALPPAPATSVSTAIKRSAEESDGEVEPKRRCTQGAPDREASQEPEYKSKYRPWKDVYRDRFKVGSNWKNGRCTIKTFSGHANGVTCLQFDDNMLATGSYDATIKLWNIEKGEVVRTLAGHTMGIRALQFDDRLLVSGSLDGTVKIWNWRTGACINTLSHQEGVITVHMEGDYVASGSIDQSIKIFNFKTKESFCLRGHSDWVNQVRLDLTSRTLLSASDDCTVKLWDLDSRTCIKTYEGHVGQVQQVLALPEDFEFEDTAPRETDISSTASNRSTSPTDSPSQVSLQQRADEERAAYGFMFVDHPERPLPPRHILTGSLDGTLRVWDTATGKSPRCFWGHVEGVWGLAADTLRYVSGANDATVKVWEPRTGKCERTFTGHSGPVTCVGLSDSRFASGGEDGEVRLYSFEGEPSECQERGTPS

SEQ ID NO: 5714 - DNA, 2844 bp, Muscodor strobelii
  misc_feature: SGI EST ID NO. CUFF.14384.0
  misc_feature: Variant of the nucleotide sequence at SEQ ID NO 5712
gtgagattacacctgttctctgcctactccatgcaatcgcattgccgtcctaagtgaattccatcgcactctacgattagcttgcggccagccgtgtattgtagcccgtctgcgcccggcctggccccgttggtacctggatggtcaccgaatcgcacgccatcgccttgtttgactatcacatcgtcgcctcgcccaccgccccttgcgtcgtcctcaaatgctgtaactcatttcgctgagcccagggcctcgtctcttgtccaaccatttgtttcagccgtcatttcattttcgcgatgggtagtgtattagcgcttaaaccggacacgagtgggatgatgttgttaccaggccataatcacggtctttccactatgtacaacccgagcgagccgggctttggcttgtcgagccagaagccggccgctccatcgaatgcacgacaagcgccgccgtcgaacatccccaaacaagtcgaagagtcgaaacccaacatgcaaccatcgcgagacaactgcgataggaggagaccagaagaggaggaggacagctctcgactgttcaacatgtctcagcagttcatgaacaaatccgtcaccccattcctacgagaacatattcccggcctatacgcccccataggcaaaccagatcttccatcgatgaccacccttcgaacgaaagatcccaacagcaaatactgctatcgacaccgtccagattcgaagtgccgtagggcggccgacgaatccaagatgggtcttattcaaagtgaactcgagacattgcctgacggagaccgtcaagccatcactaacgtctggtccttgttctccgccgcgccaacaaagcagcgtgagcttatgctgcgaggcgtcatctctcagtgctgttttcctcagctatccctcgtgtctagagaagtccatgaacagctcaagattgacttcatctccgccctccctgtcgaactatctctgaagattttatgctacctcgactgcaaatcactctgcaagacggctcaagtcagtcggcggtggtctatattatcgggagacgacgtggtttggcatcgcatgtgtgaacaacacatcggccggaagtgtgagaaatgtcagtggggtttaccgaggttggaaaagaagagattgagagagtggaagatacagcacatgccagcaaacccttcacgccctcttgcccttcctccagctccagctacttccgtctccacagccatcaagcgttctgctgaggaatcggatggtgaagtagagcccaagcgtcgttgtacacagggtgctcccgacagagaagcgagccaggagcccgaatacaaaagcaaatacaggccatggaaagacgtgtatcgagaccgcttcaaggtcggatccaactggaagaatggccggtgcacgatcaagacctttagcggtcatgcaaatggagtcacatgtctccagttcgacgacaatatgcttgctactggatcctatgatgcaacaatcaagttatggaatatcgagaagggagaagttgtgcgaactcttgcaggccacaccatgggtatccgagctttgcaattcgacgatcgactacttgtcagcggaagcctagatggcaccgtcaagatctggaactggcggacaggggcttgcattaataccctgagtcatcaagaaggcgttatcactgttcacatggagggcgactacgttgcatctgggtcgatcgaccagtccatcaagatattcaatttcaagaccaaggaatcgttctgcctgcgtggtcacagcgattgggtgaatcaagtccgattagacctcacctcgcgaacactgctctcggcttcggatgattgtacggtcaaactttgggatttagattcccgcacttgcatcaaaacatacgaaggtcatgttggacaggtgcaacaagtgctggctctgcccgaggactttgaattcgaagacacggccccacgagagaccgacatatcatctacagcgagcaatcgcagcacaagcccgaccgattcacctagccaagtatctctacagcaaagagcagatgaagaacgcgccgcttatggcttcatgtttgtcgatcatccggaacgcccacttcctccccgccacatactgactggatcccttgacgggactttgcgagtctgggacactgccactggcaaaagccctcgctgtttctggggtcatgtagaaggagtttggggactcgctgcggacacgctccgttatgtctcgggggctaatgatgccacggtcaaagtttgggagcccaggacagggaaatgcgagcgcactttcacgggccacagcgggccagtgacttgtgttggtctcagcgacagtcgttttgccagtggaggcgaagacggggaggttcgtctgtatagtttcgaaggtgaaccatcagaatgtcaagaacgggggacaccgtcgtgatggtccggtttaacgagcggcatgaataaggggtgaattcatttgttgacattttagctatttcatcggtgttaaagggagggcggatcagcgaattgggtttacgggttcaggagcgtcacatataccctttctttctgggcaacaggcatcttcctcgacaagaagggtccagggcgctttaaaatacaggatttgctggcaagcacgggatgctacgcatagaaagaaatagcatggcagcactctgcctagcttgatatagccagaaaatgagaccttgtgtcttcaacgacaccattggaacgatatatcttgatcagaatcatcattgtgaaatcgccaagagtaaactagacacggttctcta

SEQ ID NO: 5715 - DNA, 1599 bp, Muscodor strobelii
  misc_feature: SGI cDNA ID NO. 561627
  misc_feature: Reduced expression when VOC is produced
  misc_feature: Encodes the peptide sequence at SEQ ID NO 5716
atgacgaaccccgaagttctcgtcgttggaggcgggcctgccggaaccatgatggccctcgagctatcagctcagaatatcgactttcgaattatcgacagagctcccatccggtcatctcgatcccgcgccctaatcgtgcagcctcgcacgtttgaagtgctcggccgtcatggagatgcccataaactgtacaacaagggtcacaaaacaggcggtcccatggtctgggtcgatggcaaagctgtgctcgatttcaacatgattgaaacagccaaaaactgtgactcggaattcagtttgcctgtgttgatctcacaagtcgaaaccgaagctttcatggatgaatgtctgagagagaagtacggggtgcaggttgaacagggcatagaagctgtcaaaatcgaacagaacggagacgacgtctcagtcactctgcgcaatcttacaaacgacacggaagaggttttacgtgtcaagtaccttattggtgctgatggggcgcatagtgtcgttcgaaaggcctcgagtaacatcaagtttgagggagacaagtatcctcaagagtttctcctatgtgacatgagcgtggagaacttcaagctcccacagaacgcgtaccacctcatcctagaaacaggcctgctggcagtgtttccaatggtagggggttgggttcgtatcatggcgtcccgcgacgaaggcaccctaggaaccgaggcaacacccgaggaagtcaaagacgcattgaatagggccattccagatgccggcgcaatcaccaatacaacatggctgaccagcttccgtttacatcatcgcatcgcaagctcgtaccgcgacggccgcgtctttctcgtgggcgatgctgcgcacatccattctcccgtcgggggccagggcctaaatactggtatacaggacagtgtgaatctgggctggaagttagcgcgagtactacgcggcgagaagccgaaaagccttctcgatacgtataatgaggagcgtcgtcctatcggccagaaccttctcgaaaagacagataaggcgttcaagctagtcagcctgacgaacccggtaggagtcaccctgcgaaactgggtacttccatgggttgcacctcttgtgatgcgggaagggaatatgagctcaatttacagcttcatgactcagtttggtatgaactatcgcggaagttcaatcattcggaccggcacacaatatactggtgcaatcaaagcgggtgaccgtgcgctagacggtgaccttgagattgacggaaagacggagagattataccaaatccggcatccgacgtcgtaccatctgttcctcttcgcaggcaacctccgaagcagtgaacgcaccgttttagaagaagccgctgctcgatttcaggctgccaattctgacaatgcacataccactctagtctggggtgaaagaggtatcggagatacttatagtgccactttacacaaacagtacgggatatcagcacctacttatgtctacatccgacctgatgggtatgtcgctatggttgggtcattgagtaagatagatgagctcatcaagtgggttaaaactgaggcttag

SEQ ID NO: 5716 - protein, 532 aa, Muscodor strobelii
  misc_feature: SGI Peptide ID NO. 561627
  misc_feature (5)..(271): Pfam Id: PF01266 Pfam Desc: FAD dependent oxidoreductase
  misc_feature (3)..(347): Pfam Id: PF01494 Pfam Desc: FAD binding domain
  misc_feature (5)..(525): NCBI GI: 39942302 Blast Desc: MGG_03231 [Magnaporthe grisea 70-15] gi|145015778|gb|EDK00268.1| MGG_03231 [Magnaporthe grisea 70-15]
  misc_feature (2)..(529): NCBI GI: 171692455 Blast Desc: protein product [Podospora anserina] gi|170946176|emb|CAP72977.1| protein product [Podospora anserina]
  misc_feature (1)..(527): NCBI GI: 154298299 Blast Desc: BC1G_11994 [Botryotinia fuckeliana B05.10] gi|150858180|gb|EDN33372.1| BC1G_11994 [Botryotinia fuckeliana B05.10]
  misc_feature (1)..(528): NCBI GI: 256806664 Blast Desc: monooxygenase FAD-binding protein [Streptomyces viridochromogenes DSM 40736]
  misc_feature (4)..(516): NCBI GI: 206561324 Blast Desc: oxygenase [Burkholderia cenocepacia J2315] gi|198037366|emb|CAR53300.1| oxygenase [Burkholderia cenocepacia J2315]
  misc_feature (4)..(530): NCBI GI: 221201242 Blast Desc: monooxygenase, FAD-binding [Burkholderia multivorans CGD2M] gi|221206304|ref|ZP_03579317.1| monooxygenase, FAD-binding [Burkholderia multivorans CGD2] gi|221173613|gb|EEE06047.1| CGD2]
  misc_feature (4)..(516): NCBI GI: 134295061 Blast Desc: monooxygenase, FAD-binding [Burkholderia vietnamiensis G4] gi|134138218|gb|ABO53961.1| monooxygenase, FAD-binding [Burkholderia vietnamiensis G4]
  misc_feature (4)..(530): NCBI GI: 161525538 Blast Desc: monooxygenase FAD-binding [Burkholderia multivorans ATCC 17616] gi|189349734|ref|YP_001945362.1| pentachlorophenol monooxygenase [Burkholderia multivorans ATCC 17616] monooxygenase
  misc_feature (5)..(514): NCBI GI: 160872369 Blast Desc: monooxygenase, FAD-binding [Rickettsiella grylli] gi|159121168|gb|EDP46506.1| monooxygenase, FAD-binding [Rickettsiella grylli]
  misc_feature (4)..(530): NCBI GI: 221213585 Blast Desc: monooxygenase, FAD-binding [Burkholderia multivorans CGD1] gi|221166374|gb|EED98846.1| monooxygenase, FAD-binding [Burkholderia multivorans CGD1]
  misc_feature (6)..(423): SWISSPROT Homolog: EC 1.14.13.50 Pentachlorophenol monooxygenase
  misc_feature: Useful for introducing or modulating the production of volatile compounds
MTNPEVLVVGGGPAGTMMALELSAQNIDFRIIDRAPIRSSRSRALIVQPRTFEVLGRHGDAHKLYNKGHKTGGPMVWVDGKAVLDFNMIETAKNCDSEFSLPVLISQVETEAFMDECLREKYGVQVEQGIEAVKIEQNGDDVSVTLRNLTNDTEEVLRVKYLIGADGAHSVVRKASSNIKFEGDKYPQEFLLCDMSVENFKLPQNAYHLILETGLLAVFPMVGGWVRIMASRDEGTLGTEATPEEVKDALNRAIPDAGAITNTTWLTSFRLHHRIASSYRDGRVFLVGDAAHIHSPVGGQGLNTGIQDSVNLGWKLARVLRGEKPKSLLDTYNEERRPIGQNLLEKTDKAFKLVSLTNPVGVTLRNWVLPWVAPLVMREGNMSSIYSFMTQFGMNYRGSSIIRTGTQYTGAIKAGDRALDGDLEIDGKTERLYQIRHPTSYHLFLFAGNLRSSERTVLEEAAARFQAANSDNAHTTLVWGERGIGDTYSATLHKQYGISAPTYVYIRPDGYVAMVGSLSKIDELIKWVKTEA

SEQ ID NO: 5717 - DNA, 3393 bp, Muscodor strobelii
  misc_feature: SGI EST ID NO. CUFF.14362.0
  misc_feature: Variant of the nucleotide sequence at SEQ ID NO 5715
acgaggggctgttgttgggttccctgcctataaacttatcttgtcactcctagaagcagctgcaatggaggatgcaactgtgaaaccaactggtgagttgaagtagtgacgattttcaataagctaaaccagcctaatgtatagcgacagcaaaaatcccatctataagcaccataaccagcccaatttgaaaagtatactcgaccgtgccgcacacttattgtgaagcattgttaatcgtcataggcacgctcgctattacggtgattgacatttccgtcatttataagctatgtatgttgtcgtccgtcggccggtgtgaatgggctaggtggaaacgcgggagaaatgaaaacagaaattggttactcctcctcggtcccgaaactcttgttgttgggtgacatctccatcctggaaccgggacaacggggaccgtggcgaagagtcaatggtaaggtggtggtggacccccttgccgggcgcgaggtcgcgaattagaagaggccatgctcaccagtcttcatacctcctaccggtgctttgtgggttgtttctaccgcgattattacagcggtttcgagatggcattagtaacaatccatgttctctacatgctgaacattagcccaaagtgagagttgcctcagctggacgatagggtcacattttctaactaccgaattgggcccgcataattattcggtgagtttgggtcatgatcaaaacagcatgatcgagaaggattatgtcgcagcagttggcgcggccgctcgcgatgatggcacgggcgaggaagggcttacgaatggccatgttctaagtgcatccggcttgtcctcaaaaaggcgaagaagaaaagtattatataaagcgacataatgaacataatacacaattctaataacatctagaagagttcatcagctaactgaacagaaacttagcccatcttatactcaattgctatcagctattggagtatcgtacagtttaggcgagagaaacgagagaagagtcgaagtaattgcgatcgagagacacaacaatgacgaaccccgaagttctcgtcgttggaggcgggcctgccggaaccatgatggccctcgagctatcagctcagaatatcgactttcgaattatcgacagagctcccatccggtcatctcgatcccgcgccctaatcgtgcagcctcgcacgtttgaagtgctcggccgtcatggagatgcccataaactgtacaacaagggtcacaaaacaggcggtcccatggtctgggtcgatggcaaagctgtgctcgatttcaacatgattgaaacagccaaaaactgtgactcggaattcagtttgcctgtgttgatctcacaagtcgaaaccgaagctttcatggatgaatgtctgagagagaagtacggggtgcaggttgaacagggcatagaagctgtcaaaatcgaacagaacggagacgacgtctcagtcactctgcgcaatcttacaaacgacacggaagaggttttacgtgtcaagtaccttattggtgctgatggggcgcatagtgtcgttcgaaaggcctcgagtaacatcaagtttgagggagacaagtatcctcaagagtttctcctatgtgacatgagcgtggagaacttcaagctcccacagaacgcgtaccacctcatcctagaaacaggcctgctggcagtgtttccaatggtagggggttgggttcgtatcatggcgtcccgcgacgaaggcaccctaggaaccgaggcaacacccgaggaagtcaaagacgcattgaatagggccattccagatgccggcgcaatcaccaatacaacatggctgaccagcttccgtttacatcatcgcatcgcaagctcgtaccgcgacggccgcgtctttctcgtgggcgatgctgcgcacatccattctcccgtcgggggccagggcctaaatactggtatacaggacagtgtgaatctgggctggaagttagcgcgagtactacgcggcgagaagccgaaaagccttctcgatacgtataatgaggagcgtcgtcctatcggccagaaccttctcgaaaagacagataaggcgttcaagctagtcagcctgacgaacccggtaggagtcaccctgcgaaactgggtacttccatgggttgcacctcttgtgatgcgggaagggaatatgagctcaatttacagcttcatgactcagtttggtatgaactatcgcggaagttcaatcattcggaccggcacacaatatactggtgcaatcaaagcgggtgaccgtgcgctagacggtgaccttgagattgacggaaagacggagagattataccaaatccggcatccgacgtcgtaccatctgttcctcttcgcaggcaacctccgaagcagtgaacgcaccgttttagaagaagccgctgctcgatttcaggctgccaattctgacaatgcacataccactctagtctggggtgaaagaggtatcggagatacttatagtgccactttacacaaacagtacgggatatcagcacctacttatgtctacatccgacctgatgggtatgtcgctatggttgggtcattgagtaagatagatgagctcatcaagtgggttaaaactgaggcttaggtgaacatctctcgttgcgattgcgctctacgagattgattaccttcttttacgccactccactctttctatatattgtctaaaggagatgcaaactattcatagtcatagtttatatgcttatgaattttcaaataatgaagcacgatatctcaactgaatattgctcttcacatactatgtaaatggcagagtgtcgataatcataggaactgtcgtaaatagctattgacacgggatctcatatcgagcataatacgttaatcatgaaacgctgataatcttcgagattggcattatgcgacaatgatagaagtacctaaattacaacggcttcaactttccggcagcccctatgggcacctatgcaaactgcagcattcgtcacggacaccttatacgttgcatgcatattatagttgacccattcgacccccttcagtttcgcagttattcagcagaagatgaccgactggaccaaagattcacgtacagctccagcagaattatttaactaggcaagggaagtaagcgaaatgtaagggggtgtatattgtcatcgcacgcgatttgaatcgacagccgggaggtgaatggtgacagacatagacccctggaattgcgaaatggaacaaagtatttgggtactcgcctcgccggccgagttattcttagtcaaaatgacggaattgaaggtcacgtgcccagaggtcctagccttggttctggacaaatatgtgctatca

SEQ ID NO: 5718 - DNA, 1218 bp, Muscodor strobelii
  misc_feature: SGI cDNA ID NO. 561628
  misc_feature: Encodes the peptide sequence at SEQ ID NO 5719
atggataactttgtctttcctcaaagtcctagccagagaacggcgacggggaatccatttcgtcgtccggtgacttcttcgacactaagtggaaactcgcagtcagactcacagcttgacctatcatctccgaaccggcgcaaaagcggcattcggccgcgcacaccttcaacctcgagccagtctgggacccaacacgaatgggatcctaccagcaatagtcacaatgctagagacacgattatcagcactgatgaagatcaagaagatgttgtgccagtaaacttctggccacgctccgattctgaagacgaaacaggagacgaaacaccaggtgcatcctcgtccctgaaacgatctactacgaccaaatctaccagtactactcgcatgtttcgcgcgataatgcaaagatttggcagatcatataacagacgctatgattttctacccaatgatgcacaagaaaaagataggaacacgcttcaacataacattgctctagaagtacttgatggacgcttgcatttagctcctgttaccaatccgcggagagtactagatctaggctgcggtccaggagactggccgctagaacttgcgagaagaaacccaaaaaccgccgtattcggcatggatgtcgaacctgtaaagccacgaatccgtttagcaaactgccggtttcacctcggcgatttcacagagaaatggccctatgatggcaaatttgatttcattcatctgtgggttgaattttgcgagtggatcgtagccatacaatcgcctcataactccctcaccgagacctggttctacaaatgggctcagcattgggagtcagggcttcaaaaaattggcacttcggcattttaccccgaggggtataaacgattgcttcttgaagctggctttcagaatgtgactgaaagaaaatacggtgttcccatcaatccatggcctccaggcaaatcgcttcaaaaaatcgggtccatgatggtgcaaaacgcagatgcttccatcgagcccatgtcgcatgctatactaggaaatgtcttggggtggtcaaccgatgcaatcgatggcatcctgagcgaagttcgcaaggaactcaacgatactagagtctgcaattttatgacactgttccttgtgtacgcccagaagccccgagacttctcatcttcgtcgacctcgttgatatcgggaaagtcgagataa

SEQ ID NO: 5719 - protein, 405 aa, Muscodor strobelii
  misc_feature: SGI Peptide ID NO. 561628
  misc_feature (185)..(234): Pfam Id: PF01728 Pfam Desc: FtsJ-like methyltransferase
  misc_feature (187)..(246): Pfam Id: PF08241 Pfam Desc: Methyltransferase domain
  misc_feature (186)..(216): Pfam Id: PF02390 Pfam Desc: methyltransferase
  misc_feature (53)..(381): NCBI GI: 46114998 Blast Desc: FG03341.1 [Gibberella zeae PH-1]
  misc_feature (159)..(389): NCBI GI: 256735637 Blast Desc: NECHADRAFT_75695 [Nectria haematococca mpVI 77-13-4]
  misc_feature (140)..(390): NCBI GI: 46114284 Blast Desc: FG02984.1 [Gibberella zeae PH-1]
  misc_feature (101)..(390): NCBI GI: 119182181 Blast Desc: CIMG_06135 [Coccidioides immitis RS]
  misc_feature (98)..(389): NCBI GI: 67901892 Blast Desc: AN7933.2 [Aspergillus nidulans FGSC A4] gi|40740397|gb|EAA59587.1| AN7933.2 [Aspergillus nidulans FGSC A4] gi|259480682|tpe|CBF73551.1| TPA: conserved [Aspergillus FGSC
  misc_feature (137)..(390): NCBI GI: 256723471 Blast Desc: NECHADRAFT_81086 [Nectria haematococca mpVI 77-13-4]
  misc_feature (120)..(391): NCBI GI: 212544756 Blast Desc: conserved [Penicillium marneffei ATCC 18224] gi|210065501|gb|EEA19595.1| conserved [Penicillium marneffei ATCC 18224]
  misc_feature (120)..(391): NCBI GI: 212544758 Blast Desc: conserved [Penicillium marneffei ATCC 18224] gi|210065502|gb|EEA19596.1| conserved [Penicillium marneffei ATCC 18224]
  misc_feature (125)..(390): NCBI GI: 119483858 Blast Desc: methyltransferase, [Neosartorya fischeri NRRL 181] gi|119409988|gb|EAW19935.1| methyltransferase, [Neosartorya fischeri NRRL 181]
  misc_feature (120)..(391): NCBI GI: 119191406 Blast Desc: CIMG_00080 [Coccidioides immitis RS]
MDNFVFPQSPSQRTATGNPFRRPVTSSTLSGNSQSDSQLDLSSPNRRKSGIRPRTPSTSSQSGTQHEWDPTSNSHNARDTIISTDEDQEDVVPVNFWPRSDSEDETGDETPGASSSLKRSTTTKSTSTTRMFRAIMQRFGRSYNRRYDFLPNDAQEKDRNTLQHNIALEVLDGRLHLAPVTNPRRVLDLGCGPGDWPLELARRNPKTAVFGMDVEPVKPRIRLANCRFHLGDFTEKWPYDGKFDFIHLWVEFCEWIVAIQSPHNSLTETWFYKWAQHWESGLQKIGTSAFYPEGYKRLLLEAGFQNVTERKYGVPINPWPPGKSLQKIGSMMVQNADASIEPMSHAILGNVLGWSTDAIDGILSEVRKELNDTRVCNFMTLFLVYAQKPRDFSSSSTSLISGKSR

SEQ ID NO: 5720 - DNA, 1320 bp, Muscodor strobelii
  misc_feature: SGI EST ID NO. CUFF.14422.1
  misc_feature: Variant of the nucleotide sequence at SEQ ID NO 5718
atttccgcacctcgggtttccagtccattgtgacaaacttgaatgcatttaagcgcacacttcaactacgacgaaaaagcaaggtgaccaaataagatatccattaaatacatgcaaaatacgaacgagacgtacccagagatagtcgaataggcccaccataagaatagggggttcaagaaggagaagaggcacttcacgaacaagcagaagattctgacggccagcgtatcccactaaaaccgggcgaggagagctgacgagggtatgtcaccaaggtagcgttgcagcccgacccatcacccgccctgcgtgctgctgcctcatacaacgtcccgcagccaattgctgcagcacttttctcccacaactctggatcgcatgtcccttgcgtcggaaaatttggcgttttaaccggtacatctgctctacaaggactcgtgttacctagtgaagcaagcataccaagcaatcccccaagaaccaacggcgaaatcagagccgtctcagccgccagttggcgttagatcggcgggtgccacctaacgggagcgggccgcaccttatgtgaattcgatgccaaatggataactttgtctttcctcaaagtcctagccagagaacggcgacggggaatccatttcgtcgtccggtgacttcttcgacactaagtggaaactcgcagtcagactcacagcttgacctatcatctccgaaccggcgcaaaagcggcattcggccgcgcacaccttcaacctcgagccagtctgggacccaacacgaatgggatcctaccagcaatagtcacaatgctagagacacgattatcagcactgatgaagatcaagaagatgttgtgccagtaaacttctggccacgctccgattctgaagacgaaacaggagacgaaacaccaggtgcatcctcgtccctgaaacgatctactacgaccaaatctaccagtactactcgcatgtttcgcgcgataatgcaaagatttggcagatcatataacagacgctatgattttctacccaatgatgcacaagaaaaagataggaacacgcttcaacataacattgctctagaagtacttgatggacgcttgcatttagctcctgttaccaatccgcggagagtactagatctaggctgcggtccaggagactggccgctagaacttgcgagaagaaacccaaaaaccgccgtattcggcatggatgtcgaacctgtaaagccacgaatccgtttagcaaactgccggtttcacctcggcgatttcacagagaaatggccctatgatggcaaatttgatttcat

SEQ ID NO: 5721 - DNA, 1260 bp, Muscodor strobelii
  misc_feature: SGI cDNA ID NO. 561629
  misc_feature: Encodes the peptide sequence at SEQ ID NO 5722
atggataactttgtctttcctcaaagtcctagccagagaacggcgacggggaatccatttcgtcgtccggtgacttcttcgacactaagtggaaactcgcagtcagactcacagcttgacctatcatctccgaaccggcgcaaaagcggcattcggccgcgcacaccttcaacctcgagccagtctgggacccaacacgaatgggatcctaccagcaatagtcacaatgctagagacacgattatcagcactgatgaagatcaagaagatgttgtgccagtaaacttctggccacgctccgattctgaagacgaaacaggagacgaaacaccaggtgcatcctcgtccctgaaacgatctactacgaccaaatctaccagtactactcgcatgtttcgcgcgataatgcaaagatttggcagatcatataacagacgctatgattttctacccaatgatgcacaagaaaaagataggaacacgcttcaacataacattgctctagaagtacttgatggacgcttgcatttagctcctgttaccaatccgcggagagtactagatctaggctgcggtccaggagactggccgctagaacttgcgagaagaaacccaaaaaccgccgtattcggcatggatgtcgaacctgtaaagccacgaatccgtttagcaaactgccggtttcacctcggcgatttcacagagaaatggccctatgatggcaaatttgatttcattcatctggatgttatagccaccatgtatgacagcctagaacctggtgggtgggttgaattttgcgagtggatcgtagccatacaatcgcctcataactccctcaccgagacctggttctacaaatgggctcagcattgggagtcagggcttcaaaaaattggcacttcggcattttaccccgaggggtataaacgattgcttcttgaagctggctttcagaatgtgactgaaagaaaatacggtgttcccatcaatccatggcctccaggcaaatcgcttcaaaaaatcgggtccatgatggtgcaaaacgcagatgcttccatcgagcccatgtcgcatgctatactaggaaatgtcttggggtggtcaaccgatgcaatcgatggcatcctgagcgaagttcgcaaggaactcaacgatactagagtctgcaattttatgacactgttccttgtgtacgcccagaagccccgagacttctcatcttcgtcgacctcgttgatatcgggaaagtcgagataa

SEQ ID NO: 5722 - protein, 419 aa, Muscodor strobelii
  misc_feature: SGI Peptide ID NO. 561629
  misc_feature (187)..(266): Pfam Id: PF08241 Pfam Desc: Methyltransferase domain
  misc_feature (185)..(234): Pfam Id: PF01728 Pfam Desc: FtsJ-like methyltransferase
  misc_feature (187)..(246): Pfam Id: PF08241 Pfam Desc: Methyltransferase domain
  misc_feature (186)..(216): Pfam Id: PF02390 Pfam Desc: methyltransferase
  misc_feature (53)..(395): NCBI GI: 46114998 Blast Desc: FG03341.1 [Gibberella zeae PH-1]
  misc_feature (159)..(403): NCBI GI: 256735637 Blast Desc: NECHADRAFT_75695 [Nectria haematococca mpVI 77-13-4]
  misc_feature (104)..(404): NCBI GI: 259486612 Blast Desc: TPA: methyltransferase LaeA-like, (AFU_orthologue; AFUA_8G01930) [Aspergillus nidulans FGSC A4]
  misc_feature (114)..(403): NCBI GI: 255942519 Blast Desc: Pc18g01840 [Penicillium chrysogenum Wisconsin 54-1255] gi|211586761|emb|CAP94408.1| Pc18g01840 [Penicillium chrysogenum Wisconsin 54-1255]
  misc_feature (140)..(403): NCBI GI: 46114284 Blast Desc: FG02984.1 [Gibberella zeae PH-1]
  misc_feature (120)..(405): NCBI GI: 212544758 Blast Desc: conserved [Penicillium marneffei ATCC 18224] gi|210065502|gb|EEA19596.1| conserved [Penicillium marneffei ATCC 18224]
  misc_feature (120)..(405): NCBI GI: 212544756 Blast Desc: conserved [Penicillium marneffei ATCC 18224] gi|210065501|gb|EEA19595.1| conserved [Penicillium marneffei ATCC 18224]
  misc_feature (98)..(403): NCBI GI: 67901892 Blast Desc: AN7933.2 [Aspergillus nidulans FGSC A4] gi|40740397|gb|EAA59587.1| AN7933.2 [Aspergillus nidulans FGSC A4] gi|259480682|tpe|CBF73551.1| TPA: conserved [Aspergillus FGSC
  misc_feature (101)..(404): NCBI GI: 119182181 Blast Desc: CIMG_06135 [Coccidioides immitis RS]
  misc_feature (125)..(404): NCBI GI: 119483858 Blast Desc: methyltransferase, [Neosartorya fischeri NRRL 181] gi|119409988|gb|EAW19935.1| methyltransferase, [Neosartorya fischeri NRRL 181]
MDNFVFPQSPSQRTATGNPFRRPVTSSTLSGNSQSDSQLDLSSPNRRKSGIRPRTPSTSSQSGTQHEWDPTSNSHNARDTIISTDEDQEDVVPVNFWPRSDSEDETGDETPGASSSLKRSTTTKSTSTTRMFRAIMQRFGRSYNRRYDFLPNDAQEKDRNTLQHNIALEVLDGRLHLAPVTNPRRVLDLGCGPGDWPLELARRNPKTAVFGMDVEPVKPRIRLANCRFHLGDFTEKWPYDGKFDFIHLDVIATMYDSLEPGGWVEFCEWIVAIQSPHNSLTETWFYKWAQHWESGLQKIGTSAFYPEGYKRLLLEAGFQNVTERKYGVPINPWPPGKSLQKIGSMMVQNADASIEPMSHAILGNVLGWSTDAIDGILSEVRKELNDTRVCNFMTLFLVYAQKPRDFSSSSTSLISGKSR

SEQ ID NO: 5723 - DNA, 1320 bp, Muscodor strobelii; identical to SEQ ID NO: 5720
  misc_feature: SGI EST ID NO. CUFF.14422.1
  misc_feature: Variant of the nucleotide sequence at SEQ ID NO 5721

SEQ ID NO: 5724 - DNA, 861 bp, Muscodor strobelii
  misc_feature: SGI cDNA ID NO. 561630
  misc_feature: Encodes the peptide sequence at SEQ ID NO 5725
atgggggcgtcggagaaatatgttctcataactggttgcagtcctcccggcattggttacgcattagccaaggcgtttcaaaacaagaattatcatgtcttcgcaactttaagagatcctaccaaacttccccgggacttctcttccgcctctaatgtgaccatattgacattggatgtgctatcccccgactcgatcaccgccgcagttgatgcggtcacaaagcaaacaggtgggaagctcgacattctcgtcaataacagcggggcagtaagcaaaagacccggcctggacttttctcttgacgaagccaagaagatgtttgatctcaacttctttgcaccgatggcgatgttgcaggctttcgctccgatgatcgtgaacgctaagggatgcgtcgtcaacaacgcttccgtaagcgcaatcatacccctgacattgacaagcgtttataatgcatctaaagctgcgttaatgagcgccagcgagacttggcgtcttgagctccaaccactcggagttcgtgttgtgacgataatgaccggcggagtcaagacggggatcttgaataaactgccgcctgtggagcttcccccaacttcatactatcacgggatacaagattacatcaacggcaaaaacggcggcgggccccctagcactgaagatccaagcacttatgcagctcacgtcgtgcacacggtcgagaatggagccaatggactaatttgggcaggggcaggggcaggaagtgtccggttagtgaagttcctgccacaagggctggtcgattcgttattagagaatcgttccccactttcgcgagaaatggcaaaagttgcagaaaagaggcgtaattaa

SEQ ID NO: 5725 - protein, 286 aa, Muscodor strobelii
  misc_feature: SGI Peptide ID NO. 561630
  misc_feature (6)..(170): Pfam Id: PF00106 Pfam Desc: short chain dehydrogenase
  misc_feature (53)..(170): Pfam Id: PF00106 Pfam Desc: short chain dehydrogenase
  misc_feature (1)..(267): NCBI GI: 145240005 Blast Desc: An08g05320 [Aspergillus niger] gi|134077163|emb|CAK45504.1| protein product [Aspergillus niger]
  misc_feature (4)..(279): NCBI GI: 242774205 Blast Desc: short-chain dehydrogenase/reductase, [Talaromyces stipitatus ATCC 10500] gi|218722013|gb|EED21431.1| short-chain dehydrogenase/reductase, [Talaromyces stipitatus ATCC 10500]
  misc_feature (5)..(246): NCBI GI: 212531875 Blast Desc: short-chain dehydrogenase/reductase, [Penicillium marneffei ATCC 18224] gi|210071458|gb|EEA25547.1| short-chain dehydrogenase/reductase, [Penicillium marneffei ATCC 18224]
  misc_feature (3)..(284): NCBI GI: 259485671 Blast Desc: TPA: short-chain dehydrogenase/reductase, (AFU_orthologue; AFUA_6G03370) [Aspergillus nidulans FGSC A4]
  misc_feature (3)..(284): NCBI GI: 67525785 Blast Desc: AN3350.2 [Aspergillus nidulans FGSC A4] gi|40744138|gb|EAA63318.1| AN3350.2 [Aspergillus nidulans FGSC A4]
  misc_feature (5)..(258): NCBI GI: 121700480 Blast Desc: short-chain dehydrogenase/reductase, [Aspergillus clavatus NRRL 1] gi|119396647|gb|EAW07079.1| short-chain dehydrogenase/reductase, [Aspergillus clavatus NRRL 1]
  misc_feature (3)..(269): NCBI GI: 116204291 Blast Desc: CHGG_10029 [Chaetomium globosum CBS 148.51] gi|88176157|gb|EAQ83625.1| CHGG_10029 [Chaetomium globosum CBS 148.51]
  misc_feature (8)..(277): NCBI GI: 169768462 Blast Desc: [Aspergillus oryzae RIB40] gi|238497766|ref|XP_002380118.1| estradiol 17 beta-dehydrogenase, [Aspergillus flavus NRRL3357] gi|83766559|dbj|BAE56699.1| protein
  misc_feature (8)..(275): NCBI GI: 145236096 Blast Desc: protein product [Aspergillus niger] gi|134075146|emb|CAK39156.1| protein product [Aspergillus niger]
  misc_feature (6)..(267): NCBI GI: 145241480 Blast Desc: An09g00620 [Aspergillus niger] gi|134077924|emb|CAL00322.1| protein product [Aspergillus niger]
  misc_feature (5)..(286): SWISSPROT Homolog: EC 1.1.1.101 Acylglycerone-phosphate reductase
MGASEKYVLITGCSPPGIGYALAKAFQNKNYHVFATLRDPTKLPRDFSSASNVTILTLDVLSPDSITAAVDAVTKQTGGKLDILVNNSGAVSKRPGLDFSLDEAKKMFDLNFFAPMAMLQAFAPMIVNAKGCVVNNASVSAIIPLTLTSVYNASKAALMSASETWRLELQPLGVRVVTIMTGGVKTGILNKLPPVELPPTSYYHGIQDYINGKNGGGPPSTEDPSTYAAHVVHTVENGANGLIWAGAGAGSVRLVKFLPQGLVDSLLENRSPLSREMAKVAEKRRN

SEQ ID NO: 5726 - DNA, 2127 bp, Muscodor strobelii
  misc_feature: SGI cDNA ID NO. 561631
  misc_feature: Encodes the peptide sequence at SEQ ID NO 5727
atgtctgccgttataaacacaactgctaatctggccaatggctttcctgtttaccttggcctatggataaactggtcccaaggccgcgttctcggtgccaccttcactacaacccgagaaaatgctactttaatcattgcattcacaagtaccttcatcgccttcgttgctactcgtgtatggagaccgttctgctttatactccaccgactgtactctacgcaagaaccccaaggtgccggttatcatcagatgcaggcaattttacggaatgcttcgtctatggaagacggattgcgactctctgtcggtctgtttgcgtcacaactcaaacggacgagatttcgtcaacgagttatcttggttgttattatcgcaactaccttgtttgtatcttttactgcgcttggaggcttttcgtctcgcattgccactaccagcaatgaggtgcttattcagagtgagagctgcggttacctgaatcccgcgcttattgtcgacgacgcgacaactttatttgcttattcttataatgcggagactatcgcaaacgctgcaaattatggccagcaatgctacgctggtgactcaagtcagtttgattgtgacatctatgccgtcaaaaagatcactggtcgagtggatatgaacgcttcctgtcctttcgacagcacaatttgcgttaccaacgataccaatatccgccttgatggatatatcaatagccacttacatcttggcatgaatgcacctcctgaaaaacaaataatatggagaactaccgttgaatgtgcaccactagttacagaaggtttcaccagccaggacaatcagtcctcgacaaatgacactctctatcactacggctcttacgctggctccacggggacttacgattatttgttccgagccccaggtctagaatctcagtatcgtacttggcaagagggtggaatcaactacgagaataattatctcattggagctttcaatttcatttacgcgaacggcagtgtggctaatggaggcaatgcggactatttccccgttgatgagctgcatagaacagacgcagatcttagaatattcgcgagaattgggaatggggtcatcttcacggagccagcagacgatatatggtataatgtttcgaaaacccctttgaatcaatcagccgttgactccacatatccattatcgtactatctaccaggagtaccagcctcaccgcttgcctgcattcagcaatatcaattttgtaacactaaaaattctcgaacctgtgggccattggcgagctttcgagacgcggtagccggcgctgcgcctctgttcaacacctcctattttgagctaaagaataattcggtcggtacagaagaaggtgcccagttcgcttatttgatattcggtcttcgaaccgcgggtgcttttggcgaatcaatggcggtgttagggccggcagcactttcgtctcagaaaactcttgctactggaattcaggtgagcatagcaccagatcagtggcaactggatgtgacaaacctgtggaatatgacgatggcgtatgtgcaagagatttttctcgacagcgcttatggtttgaactaccccgaattactatccgttcgtcaaaacttcacagcctcaaatttcgatcacgtctgccgcaaccagaaaatgaaaacgactgccttcacatcgctcaacgttttcggcctcgtttttacttatgccgtaggttttctgttgaccgtggtctcttactgcctcaaccccttattcgcatggctacacaagcgaagaggatacgagagttatagacacctggaatggacatccaatgcaacgatgcagcttcagcggcttgctcacgaagggatcggtcaaggaacttggtccaatagcacaaagacagtccctacaactaaaaatgacgagcttcttgcgctattagacatttcagatcctcagcaccctgttcttcggccacttgaagagattgaggctgccagccatcctcaaacctctggcaataatagcgagtcgccagcttgcaatatcaagccagacgagcccagaatttctacaagttacgagaccaaaactacagttcaagctacctga

SEQ ID NO: 5727 - protein, 708 aa, Muscodor strobelii
  misc_feature: SGI Peptide ID NO. 561631
  misc_feature (17)..(672): NCBI GI: 189194015 Blast Desc: conserved [Pyrenophora tritici-repentis Pt-1C-BFP] gi|187978910|gb|EDU45536.1| conserved [Pyrenophora tritici-repentis Pt-1C-BFP]
  misc_feature (5)..(675): NCBI GI: 169615058 Blast Desc: SNOG_10683 [Phaeosphaeria nodorum SN15] gi|111060957|gb|EAT82077.1| SNOG_10683 [Phaeosphaeria nodorum SN15]
  misc_feature (17)..(657): NCBI GI: 70986226 Blast Desc: conserved [Aspergillus fumigatus Af293] gi|66846236|gb|EAL86569.1| conserved [Aspergillus fumigatus Af293]
  misc_feature (17)..(657): NCBI GI: 159128250 Blast Desc: conserved [Aspergillus fumigatus A1163]
  misc_feature (17)..(657): NCBI GI: 119474227 Blast Desc: NFIA_004500 [Neosartorya fischeri NRRL 181] gi|119407142|gb|EAW17092.1| conserved [Neosartorya fischeri NRRL 181]
  misc_feature (17)..(669): NCBI GI: 115399382 Blast Desc: [Aspergillus terreus NIH2624] gi|114192163|gb|EAU33863.1| [Aspergillus terreus NIH2624]
  misc_feature (17)..(641): NCBI GI: 256723662 Blast Desc: NECHADRAFT_86728 [Nectria haematococca mpVI 77-13-4]
  misc_feature (11)..(629): NCBI GI: 121699395 Blast Desc: ACLA_082720 [Aspergillus clavatus NRRL 1] gi|119396149|gb|EAW06581.1| ACLA_082720 [Aspergillus clavatus NRRL 1]
  misc_feature (11)..(629): NCBI GI: 169618215 Blast Desc: SNOG_12297 [Phaeosphaeria nodorum SN15] gi|160703576|gb|EAT80110.2| SNOG_12297 [Phaeosphaeria nodorum SN15]
  misc_feature (17)..(632): NCBI GI: 169772941 Blast Desc: [Aspergillus oryzae RIB40] gi|83768800|dbj|BAE58937.1| protein product [Aspergillus oryzae]
MSAVINTTANLANGFPVYLGLWINWSQGRVLGATFTTTRENATLIIAFTSTFIAFVATRVWRPFCFILHRLYSTQEPQGAGYHQMQAILRNASSMEDGLRLSVGLFASQLKRTRFRQRVILVVIIATTLFVSFTALGGFSSRIATTSNEVLIQSESCGYLNPALIVDDATTLFAYSYNAETIANAANYGQQCYAGDSSQFDCDIYAVKKITGRVDMNASCPFDSTICVTNDTNIRLDGYINSHLHLGMNAPPEKQIIWRTTVECAPLVTEGFTSQDNQSSTNDTLYHYGSYAGSTGTYDYLFRAPGLESQYRTWQEGGINYENNYLIGAFNFIYANGSVANGGNADYFPVDELHRTDADLRIFARIGNGVIFTEPADDIWYNVSKTPLNQSAVDSTYPLSYYLPGVPASPLACIQQYQFCNTKNSRTCGPLASFRDAVAGAAPLFNTSYFELKNNSVGTEEGAQFAYLIFGLRTAGAFGESMAVLGPAALSSQKTLATGIQVSIAPDQWQLDVTNLWNMTMAYVQEIFLDSAYGLNYPELLSVRQNFTASNFDHVCRNQKMKTTAFTSLNVFGLVFTYAVGFLLTVVSYCLNPLFAWLHKRRGYESYRHLEWTSNATMQLQRLAHEGIGQGTWSNSTKTVPTTKNDELLALLDISDPQHPVLRPLEEIEAASHPQTSGNNSESPACNIKPDEPRISTSYETKTTVQAT

SEQ ID NO: 5728 - DNA, 1170 bp, Muscodor strobelii
  misc_feature: SGI EST ID NO. CUFF.14402.0
  misc_feature: Variant of the nucleotide sequence at SEQ ID NO 5726
gtgttagggccggcagcactttcgtctcagaaaactcttgctactggaattcaggtgagcatagcaccagatcagtggcaactggatgtgacaaacctgtggaatatgacgatggcgtatgtgcaagagatttttctcgacagcgcttatggtttgaactaccccgaattactatccgttcgtcaaaacttcacagcctcaaatttcgatcacgtctgccgcaaccagaaaatgaaaacgactgccttcacatcgctcaacgttttcggcctcgtttttacttatgccgtaggttttctgttgaccgtggtctcttactgcctcaaccccttattcgcatggctacacaagcgaagaggatacgagagttatagacacctggaatggacatccaatgcaacgatgcagcttcagcggcttgctcacgaagggatcggtcaaggaacttggtccaatagcacaaagacagtccctacaactaaaaatgacgagcttcttgcgctattagacatttcagatcctcagcaccctgttcttcggccacttgaagagattgaggctgccagccatcctcaaacctctggcaataatagcgagtcgccagcttgcaatatcaagccagacgagcccagaatttctacaagttacgagaccaaaactacagttcaagctacctgacttcctgacaactcaatgacagtcaatgggaagagcagtcctgcttaatcagttacatatgtcaactatggagccaatctgccagctaaccccaactcttaagttggatgggaatggcggaccatagagcgagcgagagagtatggcgaatgggccttgtaacgatgatgaaagaactctgtaaaaatttggggttatttccgtgtgcgatgcaatctgttatatgagcatgatacggtggctttgcagtgaggcatgccatgatttttgacgtccaagctttccatcatctattaacgacacgtcacagcggacttgccgcggataagggttgacgcgtgaataacaaagtagccttgatagcgcagtctgagtgttatcactggcagatctcacggcttctaggacgaagacataggtaatcgctgccaaacccaagtattttcaagtattgtatggagttttatgtatggatttcgcttaacagtacat

SEQ ID NO: 5729 - DNA, 798 bp, Muscodor strobelii
  misc_feature: SGI cDNA ID NO. 561632
  misc_feature: Encodes the peptide sequence at SEQ ID NO 5730
atggcgccgacaaggaggagccggagtgggagagaaaatgctgtcttaagcggcgccgatgatagggatacggtcccgccggatatgaaagtgaactcagaagatagctaccaatactggaagggcatcgacgccaacgataatggtatgctgggaggatggccccaggtgtcgagagttgacctccgtggctctcggagctttctcgctaagctggggctgggccgtaagaacggcgtcaagtccatacgaagagccctggagactggtgctggcattggccgcatcacgcggggtctcttggtggaagtcgccgatatagtcgacgtagtcgagcccattccgaaattctcggacaagctaaagaaatgcgaaggcgtgggccgtatcttcaacgtcggccttgcggactggaacccttcgctcctcgcggacgaggctcagcacgcccgctacgatgtcatctggaaccagtggtgcttgggatatctcagcgacgcacagcttgagacgtatctcacgtactgcagtaccatgctgagtcaggacgatgggaatggtgaagtcacgggcgtcattgtcgtcaaggagaacattgccagggccggcaaggacacattcgacagggaagatagtagtgtgatgagaacagaacaaaccttcaggcgtgtttttagcaatgctggattgcgaattgtcaggacagaactgcaacatggtttaccaaacgagttatatcccgtacgaatgttcgcgcttaagcctatcgccaccgcgacccaggacaaggaagggtga

SEQ ID NO: 5730 - protein, 265 aa, Muscodor strobelii
  misc_feature: SGI Peptide ID NO. 561632
  misc_feature (28)..(254): Pfam Id: PF05891 Pfam Desc: Eukaryotic protein of function (DUF858)
  misc_feature (19)..(255): NCBI GI: 256726282 Blast Desc: NECHADRAFT_94674 [Nectria haematococca mpVI 77-13-4]
  misc_feature (24)..(255): NCBI GI: 156065265 Blast Desc: SS1G_00643 [Sclerotinia sclerotiorum 1980] gi|154691502|gb|EDN91240.1| SS1G_00643 [Sclerotinia sclerotiorum 1980]
  misc_feature (27)..(254): NCBI GI: 39940452 Blast Desc: MGG_05014 [Magnaporthe grisea 70-15] gi|145010742|gb|EDJ95398.1| MGG_05014 [Magnaporthe grisea 70-15]
  misc_feature (24)..(255): NCBI GI: 46111079 Blast Desc: FG02421.1 [Gibberella zeae PH-1]
  misc_feature (24)..(255): NCBI GI: 85100768 Blast Desc: NCU01114 [Neurospora crassa OR74A] gi|7635887|emb|CAB88603.1| conserved [Neurospora crassa] gi|28922558|gb|EAA31785.1| conserved [Neurospora crassa OR74A]
  misc_feature (19)..(258): NCBI GI: 116199067 Blast Desc: CHGG_07689 [Chaetomium globosum CBS 148.51] gi|88178968|gb|EAQ86436.1| CHGG_07689 [Chaetomium globosum CBS 148.51]
  misc_feature (27)..(255): NCBI GI: 169594718 Blast Desc: SNOG_00087 [Phaeosphaeria nodorum SN15] gi|111070462|gb|EAT91582.1| SNOG_00087 [Phaeosphaeria nodorum SN15]
  misc_feature (19)..(255): NCBI GI: 119180481 Blast Desc: CIMG_08869 [Coccidioides immitis RS]
  misc_feature (19)..(255): NCBI GI: 240110351 Blast Desc: CPC735_063830 [Coccidioides posadasii C735 delta SOWgp]
  misc_feature (13)..(255): NCBI GI: 70985466 Blast Desc: DUF858 domain protein [Aspergillus fumigatus Af293] gi|66845867|gb|EAL86201.1| DUF858 domain protein [Aspergillus fumigatus Af293]
MAPTRRSRSGRENAVLSGADDRDTVPPDMKVNSEDSYQYWKGIDANDNGMLGGWPQVSRVDLRGSRSFLAKLGLGRKNGVKSIRRALETGAGIGRITRGLLVEVADIVDVVEPIPKFSDKLKKCEGVGRIFNVGLADWNPSLLADEAQHARYDVIWNQWCLGYLSDAQLETYLTYCSTMLSQDDGNGEVTGVIVVKENIARAGKDTFDREDSSVMRTEQTFRRVFSNAGLRIVRTELQHGLPNELYPVRMFALKPIATATQDKEG

SEQ ID NO: 5731 - DNA, 1490 bp, Muscodor strobelii
  misc_feature: SGI EST ID NO. CUFF.14425.0
  misc_feature: Variant of the nucleotide sequence at SEQ ID NO 5729
gctgattacggtgtcgctttgagtgataacgcaacaaataagacgtttcgttaatatgagatttctggaatactgcaccatggttctgttttagataccaaccgtgtgaacattattgctagctatgacgtactcaactctgcgctacggctgcatgagcagtgagccgctcatcactaatgtcataaacacgtcaaccagtactagtctgtttcaaatccgcgtccatgatgccgaagccgatcataggacctttagctccaaagtgggtcgtggttggaggcgcaaaatcttgcaaaatgtcacttcggccctgcacaaagtgccgtgccgagcacatattggagatcagcaaataagaagtatataagaatgaggtgtatataattctcttcaaatttcgcagcgtattaggtctctttgcggaccctgccttttgcttctcggaattatatggcgccgacaaggaggagccggagtgggagagaaaatgctgtcttaagcggcgccgatgatagggatacggtcccgccggatatgaaagtgaactcagaagatagctaccaatactggaagggcatcgacgccaacgataatggtatgctgggaggatggccccaggtgtcgagagttgacctccgtggctctcggagctttctcgctaagctggggctgggccgtaagaacggcgtcaagtccatacgaagagccctggagactggtgctggcattggccgcatcacgcggggtctcttggtggaagtcgccgatatagtcgacgtagtcgagcccattccgaaattctcggacaagctaaagaaatgcgaaggcgtgggccgtatcttcaacgtcggccttgcggactggaacccttcgctcctcgcggacgaggctcagcacgcccgctacgatgtcatctggaaccagtggtgcttgggatatctcagcgacgcacagcttgagacgtatctcacgtactgcagtaccatgctgagtcaggacgatgggaatggtgaagtcacgggcgtcattgtcgtcaaggagaacattgccagggccggcaaggacacattcgacagggaagatagtagtgtgatgagaacagaacaaaccttcaggcgtgtttttagcaatgctggattgcgaattgtcaggacagaactgcaacatggtttaccaaacgagttatatcccgtacgaatgttcgcgcttaagcctatcgccaccgcgacccaggacaaggaagggtgaaaaggagccgagagggtagacaagcaggtaatctaatatatagatttttaggactgattgcgatggaaatgtacacgattctaagtaatcatgtcgctacttttgaatacagattttcgttaggatgtagttggtgctgatcatgtgttgctcgtctcatgcagttggtgcgcacacgataaaacaaccatgcaaattaccccttgcaatttcagcatgcggtactaccaagaccgtct

SEQ ID NO: 5732 - DNA, 2733 bp, Muscodor strobelii
  misc_feature: SGI cDNA ID NO. 561633
  misc_feature: Elevated expression when VOC is produced
  misc_feature: Encodes the peptide sequence at SEQ ID NO 5733
atggatccactaacggcgctcggcgtcgccgccaacatctgggcatttgtcgaggtcggcatcaaaattacggtacaagcgcgacagctctacaagagcgggcaggagacgacaaaggagatcgccgcactcgatacttcgacgcagagtcttgatgcctgtgtcaagcagttgcaaggctcatcaaattgtccggagcagttcaaaaagttgctggcacaaacccagtcattatccaatgagcttttcgctatcctcgacgaggtcaagattaaggatcccaagtcatggagggagcgcgtcaaagtctcattcaagttacagttcaaagggtccgacatcgtgtcgctcgaggaccgtctcagcaatctacgctctcaggttatgctaagtcaattggctttgatgagaaatgagaactcagatctaagcaagaaactcgatcacatacagaatagcgtaaaagacctttcttcagaaaggtggattgagcttaaagaacatcgtgatagggtggtcaggctcctcgacagccattatacgcagcatctagtgcgcaacgtacgtgaactagagcaagcggcaaggctagcggagacccagtcaaagtttctcgatcggttgagatacgaattcttgaagcgccgtaaagacttaatttggaacgcgaattacggaacgtttgcctggatgctcaaccggcgatcacaccgcagagaagaaagcacgcagatgagacaaacaagagaagctttcgtcacgtggctcgagagtggagaaggcatattccatgtttcgggaaaggctggcgcaggaaagtcagttttgatgaagctccttgcctttcacccggagaccagacggcatctggatatctgggcagatggatccaatctctgcactgcgtcctttttcttttacagcgacggcaatatagaggaaaagtctctggagggaatgtaccgctccattctttgtactatactaaacgaacacccgttactgatacctgtcgtttttcctgactggtttggaccagatcgaatggttcgggatgttcacctctctgagctcatcaggccacatcggcttaagatcgcatttgagcgattcatcgatattgtaaagaaaggcgagtacaaaatatgcctcttcatcgatggacttgatgagtttgagggagacgcgaccgatcatcgagagttcgccgagcagctgatatcctggtcggctgatgatagtcgtggccgtgtcaaattctgtgtgagctctcgaccacatgtagaattcactcagacatttgccccttccgagggttcagtcggcccccaaatccatttgcatgaactaacccgtcatgatattgagcgctattgcacggcgacctttcaggccgctaaagatttggagaagttgacagtactaaaatctgagtgtagctacattgttaacatcattgttcatcgtgcggagggtgtctttctatgggcacattttgttgtacgcatcatcctagctgaagccaggcggaaaggcacccgccaagacttattgaggacactggacgagataccaggaaaggtagacgaactctacagaaaaatactaaggtcgatcagaccagccgaccgggaattcaccaaacggattcttttcactgtcttgacgaatcccttcaaagaatcgctgaatatcgtatgcctcaactggcttagagataacgagacctgggacggagcattgagaagtcggacttatactgatcttgaggcgagtgaggctatagaacgagcaatatgtcaccttcatgagtggaccggcggcatagtagagttagaaacgcgaaatcgcgatgtccgtggcaatgtccgtgctaactttgacgacgaactggacatattcttcactagtcgagtcaggttcttccatcagaccgtgatagattacctcaagtctgggaccgctatgtgtgaactgaaacaagctatgtcctccgttaatatggcgaaatttcatgcaggactcagactctcagagctgagatgcgggagcgagccgggttatcgaagtacaacatctgtccatgtcaattacggatacaacttattaggcactgcgtttaatgaacagcttataccagagccagagattgggtggcctttctatgaggcactacttgaatatcagccgacagaatacgagttttttccttttggtggcataccaagtgcagatccgatcagcaaagtgctagacgtcggcaacgatgacccgagaggcacaagtgagatgccagccaaagcctacttcgccgcattccttggaatcgtgtcccttccactgtgtatggacgagctagagatctgtgtacgggacaaaacacagcggccagagccagagcctaagagacgtaatatgctactgtccgcctgtctcggtttcattttgttgagcgatattgccattcaccaaaagagaatcattcgcgaagatgcaattgcatatatggtccggaagggcttgtcggcgcgcgacttggtgccacttgtggacgatcaccttcacgagtacgagccaaaatatgccacgatctggtctatcatggtgtcagctcttacaagtgtgggttggtccaacctcgtgactgatattaacgatgacacttcgttattgactacttataagaaagtcttgcacgtgctcagcaagctgctcaagctgcgacgagcttga

SEQ ID NO: 5733 - protein, 910 aa, Muscodor strobelii
  misc_feature: SGI Peptide ID NO. 561633
  misc_feature (237)..(687): NCBI GI: 212540446 Blast Desc: conserved [Penicillium marneffei ATCC 18224] gi|210067677|gb|EEA21769.1| conserved [Penicillium marneffei ATCC 18224]
  misc_feature (1)..(704): NCBI GI: 171692629 Blast Desc: protein product [Podospora anserina] gi|170946263|emb|CAP73064.1| protein product [Podospora anserina]
  misc_feature (1)..(683): NCBI GI: 46111055 Blast Desc: FG02409.1 [Gibberella zeae PH-1]
  misc_feature (7)..(651): NCBI GI: 256730066 Blast Desc: NECHADRAFT_82694 [Nectria haematococca mpVI 77-13-4]
  misc_feature (1)..(698): NCBI GI: 226293863 Blast Desc: conserved [Paracoccidioides brasiliensis Pb18]
  misc_feature (1)..(698): NCBI GI: 225684243 Blast Desc: conserved [Paracoccidioides brasiliensis Pb03]
  misc_feature (1)..(698): NCBI GI: 261190024 Blast Desc: conserved [Ajellomyces dermatitidis SLH14081] gi|239591250|gb|EEQ73831.1| conserved [Ajellomyces dermatitidis SLH14081]
  misc_feature (2)..(653): NCBI GI: 255956529 Blast Desc: Pc21g20270 [Penicillium chrysogenum Wisconsin 54-1255] gi|211590728|emb|CAP96924.1| Pc21g20270 [Penicillium chrysogenum Wisconsin 54-1255]
  misc_feature (1)..(541): NCBI GI: 256725921 Blast Desc: NECHADRAFT_82115 [Nectria haematococca mpVI 77-13-4]
  misc_feature (1)..(651): NCBI GI: 154293653 Blast Desc: BC1G_14084 [Botryotinia fuckeliana B05.10] gi|150845240|gb|EDN20433.1| BC1G_14084 [Botryotinia fuckeliana B05.10]
  misc_feature: Useful for introducing or modulating the production of volatile compounds
MDPLTALGVAANIWAFVEVGIKITVQARQLYKSGQETTKEIAALDTSTQSLDACVKQLQGSSNCPEQFKKLLAQTQSLSNELFAILDEVKIKDPKSWRERVKVSFKLQFKGSDIVSLEDRLSNLRSQVMLSQLALMRNENSDLSKKLDHIQNSVKDLSSERWIELKEHRDRVVRLLDSHYTQHLVRNVRELEQAARLAETQSKFLDRLRYEFLKRRKDLIWNANYGTFAWMLNRRSHRREESTQMRQTREAFVTWLESGEGIFHVSGKAGAGKSVLMKLLAFHPETRRHLDIWADGSNLCTASFFFYSDGNIEEKSLEGMYRSILCTILNEHPLLIPVVFPDWFGPDRMVRDVHLSELIRPHRLKIAFERFIDIVKKGEYKICLFIDGLDEFEGDATDHREFAEQLISWSADDSRGRVKFCVSSRPHVEFTQTFAPSEGSVGPQIHLHELTRHDIERYCTATFQAAKDLEKLTVLKSECSYIVNIIVHRAEGVFLWAHFVVRIILAEARRKGTRQDLLRTLDEIPGKVDELYRKILRSIRPADREFTKRILFTVLTNPFKESLNIVCLNWLRDNETWDGALRSRTYTDLEASEAIERAICHLHEWTGGIVELETRNRDVRGNVRANFDDELDIFFTSRVRFFHQTVIDYLKSGTAMCELKQAMSSVNMAKFHAGLRLSELRCGSEPGYRSTTSVHVNYGYNLLGTAFNEQLIPEPEIGWPFYEALLEYQPTEYEFFPFGGIPSADPISKVLDVGNDDPRGTSEMPAKAYFAAFLGIVSLPLCMDELEICVRDKTQRPEPEPKRRNMLLSACLGFILLSDIAIHQKRIIREDAIAYMVRKGLSARDLVPLVDDHLHEYEPKYATIWSIMVSALTSVGWSNLVTDINDDTSLLTTYKKVLHVLSKLLKLRRA

SEQ ID NO: 5734 - DNA, 3793 bp, Muscodor strobelii
  misc_feature: SGI EST ID NO. CUFF.14428.0
  misc_feature: Variant of the nucleotide sequence at SEQ ID NO 5732
ctctagacttcgaagggacttttctagttcatataaatttgaactctataggaacagcagacttctttctctccattttgttccagaattgaggtacttccgttcaatctccgtcgggccaaccctctaacgccattttttctttcttcctccacaagtcgttgaaaggcccggatggatccactaacggcgctcggcgtcgccgccaacatctgggcatttgtcgaggtcggcatcaaaattacggtacaagcgcgacagctctacaagagcgggcaggagacgacaaaggagatcgccgcactcgatacttcgacgcagagtcttgatgcctgtgtcaagcagttgcaaggctcatcaaattgtccggagcagttcaaaaagttgctggcacaaacccagtcattatccaatgagcttttcgctatcctcgacgaggtcaagattaaggatcccaagtcatggagggagcgcgtcaaagtctcattcaagttacagttcaaagggtccgacatcgtgtcgctcgaggaccgtctcagcaatctacgctctcaggttatgctaagtcaattggctttgatgagaaatgagaactcagatctaagcaagaaactcgatcacatacagaatagcgtaaaagacctttcttcagaaaggtggattgagcttaaagaacatcgtgatagggtggtcaggctcctcgacagccattatacgcagcatctagtgcgcaacgtacgtgaactagagcaagcggcaaggctagcggagacccagtcaaagtttctcgatcggttgagatacgaattcttgaagcgccgtaaagacttaatttggaacgcgaattacggaacgtttgcctggatgctcaaccggcgatcacaccgcagagaagaaagcacgcagatgagacaaacaagagaagctttcgtcacgtggctcgagagtggagaaggcatattccatgtttcgggaaaggctggcgcaggaaagtcagttttgatgaagctccttgcctttcacccggagaccagacggcatctggatatctgggcagatggatccaatctctgcactgcgtcctttttcttttacagcgacggcaatatagaggaaaagtctctggagggaatgtaccgctccattctttgtactatactaaacgaacacccgttactgatacctgtcgtttttcctgactggtttggaccagatcgaatggttcgggatgttcacctctctgagctcatcaggccacatcggcttaagatcgcatttgagcgattcatcgatattgtaaagaaaggcgagtacaaaatatgcctcttcatcgatggacttgatgagtttgagggagacgcgaccgatcatcgagagttcgccgagcagctgatatcctggtcggctgatgatagtcgtggccgtgtcaaattctgtgtgagctctcgaccacatgtagaattcactcagacatttgccccttccgagggttcagtcggcccccaaatccatttgcatgaactaacccgtcatgatattgagcgctattgcacggcgacctttcaggccgctaaagatttggagaagttgacagtactaaaatctgagtgtagctacattgttaacatcattgttcatcgtgcggagggtgtctttctatgggcacattttgtaagtcgctgctactcaactctttacccaatccattaaagaccactacgtaatgcttcttccgggcctccatgtgattattttgaatgagatgggcgactaagatccacttttccaggttgtacgcatcatcctagctgaagccaggcggaaaggcacccgccaagacttattgaggacactggacgagataccaggaaaggtagacgaactctacagaaaaatactaaggtcgatcagaccagccgaccgggaattcaccaaacggattcttttcactgtcttgacgaatcccttcaaagaatcgctgaatatcgtatgcctcaactggcttagagataacgagacctgggacggagcattgagaagtcggacttatactgatcttgaggcgagtgaggctatagaacgagcaatatgtcaccttcatgagtggaccggcggcatagtagagttagaaacgcgaaatcgcgatgtccgtggcaatgtccgtgctaactttgacgacgaactggacatattcttcactagtcgagtcaggttcttccatcagaccgtgatagattacctcaagtctgggaccgctatgtgtgaactgaaacaagctatgtcctccgttaatatggcgaaatttcatgcaggactcagactctcagagctgagatgcgggagcgagccgggttatcgaagtacaacatctgtccatgtcaattacggatacaacttattaggcactgcgtttaatgaacagcttataccagagccagagattgggtggcctttctatgaggcactacttgaatatcagccgacagaatacgagttttttccttttggtggcataccaagtgcagatccgatcagcaaagtgctagacgtcggcaacgatgacccgagaggcacaagtgagatgccagccaaagcctacttcgccgcattccttggaatcgtgtcccttccactgtgtatggacgagctagagatctgtgtacgggacaaaacacagcggccagagccagagcctaagagacgtaatatgctactgtccgcctgtctcggtttcattttgttgagcgatattgccattcaccaaaagagaatcattcgcgaagatgcaattgcatatatggtccggaagggcttgtcggcgcgcgacttggtgccacttgtggacgatcaccttcacgagtacgagccaaaatatgccacgatctggtctatcatggtgtcagctcttacaagtgtgggttggtccaacctcgtgactgatattaacgatgacacttcgttattgactacttataagaaagtcttgcacgtgctcagcaagctgctcaagctgcgacgagcttgatgtctgccttgccagtgtccctctggttagtgtggctgtgttgagagtcgcctagttgcggggtaaagtggtaggattgggtgtccactcataatgcaagtcatccggaaagccatcaacgcattcgacttacacttgaagtactcatgtgcaatgcgagacaggagtctgttcggttcattgtagatcaagctaaatgcgattactgaatacaaaaacactttgtctagagacctacgtgggatgcaacgctcctccgtacgccatcttatcccacacgtgggaatataacgaaattttgtttcacgatatccattctcgggatgaatctcagacatggaaagacatgccagggtcggcaaaagtgctaaaatctgcagaaatggctgcggccaatggacttggacatgtctggattgactcatgctgcatcgacaagaatagtagttccgagctatcagaggctattaactcaatgtttatgtggtatgagaagtcggctgtctgttatgcgtatttatcagatatctcaacctccgctttgacggataaaggccacatttttggcactgaacacgaatgtacttggcatcaggccctggaagagagccgatggtttacacggggatggactggtaagtagattcgtatctttgcagagcccatacgtttctcgtccaaggctactttgaaacatcccattttcactttcagcatcattcaataactgtcgccgaagatcctacgctaacgtcgtggtacagtatg

SEQ ID NO: 5735 - DNA, 1071 bp, Muscodor strobelii
  misc_feature: SGI cDNA ID NO. 561634
  misc_feature: Elevated expression when VOC is produced
  misc_feature: Encodes the peptide sequence at SEQ ID NO 5736
atggctgcggccaatggacttggacatgtctggattgactcatgctgcatcgacaagaatagtagttccgagctatcagaggctattaactcaatgtttatgtggtatgagaagtcggctgtctgttatgcgtatttatcagatatctcaacctccgctttgacggataaaggccacatttttggcactgaacacgaatgtacttggcatcaggccctggaagagagccgatggtttacacggggatggactgcatcattcaataactgtcgccgaagatcctacgctaacgtcgtgctccaagagttaattgcgcctcgcgaggtctacttcttcgactcgtattggcagtttataggcactcgcacctctctggccaaacgcataagtgctaagactctcattgatattgggattctgcttcctagtttcgtgactcctctgccgcccctaaatgaaaaaagatatcgcctagaggaatgctcagttcatactaagatggggtgggcccgaaataggaccacaacccggtcggaggatagagcgtacagcctgatgggtctttttgatgtcaatatgcccttgttgtatggagagggaagtgttgaagcatttcggcgactgcaggaagagatcatcaaacgaactaatgatcaatcaatacttctacatcgtccctcgaattggaatgaagcgaatagcgtgtttgcggagtctcctgacgatttcaagaccgaagatcggttcttctcgagtcatagacaggaacatttcatgatgcaaataacgaagcacggccttgaagttgacgttcttttgtgtccagcgccctacactctcctggggcctcggttggatgccttctctgggagcccatatctatgcattctcgagagcacattcggagacgatctcttagcgttgcataggcccgcaatcctggtagaggaactggagactaatcacgtgtactatcggattacgagggacatttatcgcatccagcatgatgatcgcgggcgagcactattgactagtcctgcaggcggtcagcatcccagcgtgacctaa

SEQ ID NO: 5736 - protein, 356 aa, Muscodor strobelii
  misc_feature: SGI Peptide ID NO. 561634
  misc_feature (10)..(47): Pfam Id: PF06985 Pfam Desc: Heterokaryon incompatibility protein (HET)
  misc_feature (2)..(352): NCBI GI: 46128083 Blast Desc: FG08419.1 [Gibberella zeae PH-1]
  misc_feature (2)..(243): NCBI GI: 256733325 Blast Desc: NECHADRAFT_77285 [Nectria haematococca mpVI 77-13-4]
  misc_feature (1)..(285): NCBI GI: 164425178 Blast Desc: NCU06304 [Neurospora crassa OR74A] gi|157070820|gb|EAA33330.2| conserved [Neurospora crassa OR74A]
  misc_feature (2)..(326): NCBI GI: 189190380 Blast Desc: HET domain containing protein [Pyrenophora tritici-repentis Pt-1C-BFP] gi|187973135|gb|EDU40634.1| HET domain containing protein [Pyrenophora tritici-repentis
  misc_feature (2)..(327): NCBI GI: 46110399 Blast Desc: FG02081.1 [Gibberella zeae PH-1]
  misc_feature (2)..(282): NCBI GI: 171688186 Blast Desc: protein product [Podospora anserina] gi|170944055|emb|CAP70165.1| protein product [Podospora anserina]
  misc_feature (2)..(331): NCBI GI: 256728599 Blast Desc: NECHADRAFT_51098 [Nectria haematococca mpVI 77-13-4]
  misc_feature (2)..(308): NCBI GI: 261358772 Blast Desc: HET domain-containing protein [Verticillium albo-atrum VaMs.102]
  misc_feature (2)..(327): NCBI GI: 121715886 Blast Desc: HET domain protein [Aspergillus clavatus NRRL 1] gi|119403709|gb|EAW14126.1| HET domain protein [Aspergillus clavatus NRRL 1]
  misc_feature (2)..(222): NCBI GI: 116182922 Blast Desc: CHGG_02089 [Chaetomium globosum CBS 148.51] gi|88186386|gb|EAQ93854.1| CHGG_02089 [Chaetomium globosum CBS 148.51]
  misc_feature: Useful for introducing or modulating the production of volatile compounds
  misc_feature: Useful for modulating sporulation activity
MAAANGLGHVWIDSCCIDKNSSSELSEAINSMFMWYEKSAVCYAYLSDISTSALTDKGHIFGTEHECTWHQALEESRWFTRGWTASFNNCRRRSYANVVLQELIAPREVYFFDSYWQFIGTRTSLAKRISAKTLIDIGILLPSFVTPLPPLNEKRYRLEECSVHTKMGWARNRTTTRSEDRAYSLMGLFDVNMPLLYGEGSVEAFRRLQEEIIKRTNDQSILLHRPSNWNEANSVFAESPDDFKTEDRFFSSHRQEHFMMQITKHGLEVDVLLCPAPYTLLGPRLDAFSGSPYLCILESTFGDDLLALHRPAILVEELETNHVYYRITRDIYRIQHDDRGRALLTSPAGGQHPSVT

SEQ ID NO: 5737 - DNA, 2556 bp, Muscodor strobelii
  misc_feature: SGI EST ID NO. CUFF.14432.0
  misc_feature: Variant of the nucleotide sequence at SEQ ID NO 5735
caagagttaattgcgcctcgcgaggtctacttcttcgactcgtattggcagtttataggcactcgcacctctctggccaaacgcataagtgctaagactctcattgatattgggattctgcttcctagtttcgtgactcctctgccgcccctaaatgaaaaaagatatcgcctagaggaatgctcagttcatactaagatggggtgggcccgaaataggaccacaacccggtcggaggatagagcgtacagcctgatgggtctttttgatgtcaatatgcccttgttgtatggagagggaagtgttgaagcatttcggcgactgcaggaagagatcatcaaacgaactaatgatcaatcaatacttctacatcgtccctcgaattggaatgaagcgaatagcgtgtttgcggagtctcctgacgatttcaagaccgaagatcggttcttctcgagtcatagacaggaacatttcatgatgcaaataacgaagcacggccttgaagttgacgttcttttgtgtccagcgccctacactctcctggggcctcggttggatgccttctctgggagcccatatctatgcattctcgagagcacattcggagacgatctcttagcgttgcataggcccgcaatcctggtagaggaactggagactaatcacgtgtactatcggattacgagggacatttatcgcatccagcatgatgatcgcgggcgagcactattgactagtcctgcaggcgatcgaaatcgacacatcgaggaggtcttcgacttgactaagatgaagcgtaggaagattagattgacggaaaagtttgaaaaacgcatgcgatattcatctctgaattcgaaaatcttcctgcagcctatcaacaaacacacacatgcacctagttataaatacggaagttgcctgccagagatgacaaatggtgctattaaccgcacattatatgcgcaccatacaaaatcatcgctaagactctgcttggtagccttcatccggcttcatttagtcaactcaggggatgactctattgggatcttcattttctcatacgacaataagtttgagctgagtgcccagaagaagggctcgataccgatgtttgcccacatcgttgaggacagacggtggatgactacaagggatttcgacgaatcaaggacaagaacgaacacttcgtttttgaaaatagaagatattgataaggagctatggagacttcctctagaccgaacttcgcatggcatattcattcacgaagtcccatcttgggaacaatgggaaaagacatggagacgtaatcatgtgctctataacattctacaaacaagagagcttcatcgagacgctggagcgtctatcacgacaacagacggcagtacaatgacagctcaaataagcgaagaaatgttcttagaggagcctgtttatcatcttcatgttaacgtcggtcacaatagaagccctcgagccttggatgcagccaggagagtcatgactttcttacacccgcgtacttgcaagaaaacatgacttatccggcgtattattgtaaaaattatgaagaaagaattaaacaaattttcatccagctgtgaggacccttataagctcaagtgactacccaattggtagctggcgtcccaacattgacataatcgacaccagcatctaccttctgatcatcgctcggcttcctaaccctcacgatagccgagcacaaagactgcacccagtacctcttaccgggtcctacggacttccgcccaaccatagcaagaaattcctgcggatttttgtcggatcccaagggtctctgagtgattagtacgtaatcccgatcatacgcccaatctacgtcgttatcagccacaaaaacaacgtacttgtacgatacctctggtgtcggcgcaggagatggtggagatgcgacctgtgtctcttccgggactttgactggtgatggcggcgttgccttcccgaaaccaagcttgggtaccttgccgaatgatggtgttttgggcatggtcggcattggcactgcaggcggcctcatcgacaagatactagtagtgaccggtggagaccatgatacagcgaatcttcgctctgccatgttgattgtcaacctttatagcaggatcatgttagtaagtgtgcgatagatacatctcatatcaatttcttactacagtacgttagcatatctccaagtgtcagtccaggaacaagtgacataaggtattgctgtactgaccccgtgcgtcttcgacgaaaattcaatgacatagcccggatagtcaacaggcaggcccgtggtcggaagcaagattgtcttgtcattgattatcgtagatagatactcgcggtctatcccgagttttcgtggaatatacttatttacattcactttgatattcagagcgctcacctcgacgtgaatgtcattgaggttcaggtggctatagtcttcgatggaggaatccttggtgtcttcgaggtcaccgagacccgaagatcgatgaccaaggagagataccg

SEQ ID NO: 5738 - DNA, 342 bp, Muscodor strobelii
  misc_feature: SGI cDNA ID NO. 561635
  misc_feature: Encodes the peptide sequence at SEQ ID NO 5739
atgcccaaaacaccatcattcggcaaggtacccaagcttggtttcgggaaggcaacgccgccatcaccagtcaaagtcccggaagagacacaggtcgcatctccaccatctcctgcgccgacaccagaggtatcgtacaaacccttgggatccgacaaaaatccgcaggaatttcttgctatggttgggcggaagtccgtaggacccggtaagaggtactgggtgcagtctttgtgctcggctatcgtgagggttaggaagccgagcgatgatcagaaggtagatgctggtgtcgattatgtcaatgttgggacgccagctaccaattgggtagtcacttga

SEQ ID NO: 5739 - protein, 113 aa, Muscodor strobelii
  misc_feature: SGI Peptide ID NO. 561635
MPKTPSFGKVPKLGFGKATPPSPVKVPEETQVASPPSPAPTPEVSYKPLGSDKNPQEFLAMVGRKSVGPGKRYWVQSLCSAIVRVRKPSDDQKVDAGVDYVNVGTPATNWVVT

SEQ ID NO: 5740 - DNA, 1224 bp, Muscodor strobelii
  misc_feature: SGI cDNA ID NO. 561636
  misc_feature: Encodes the peptide sequence at SEQ ID NO 5741
atggctcctgttctctggcatcgcgaccaccttgattttggcccaacctccgacgcatttcgcgacacatggtcgagtccaagtaattatgcatttactatcttgctactagtcggcggtgacgttgtcgcaagagcacttgcgcagctgtcaggcagtaggattacgcctgtggccttctctttcggctgggtctcgtatgcgacgtctgccattaattcggcagttggcgaaaacaagttgatgcccccatcagacaccgcctgtacggtcatcaatgctggtactcaaacgtctcgggggaatggatcctgggtcctcggccgcactattcgcgacttcgaatactggatgtgcgatcccgtgagaagtaaagtcgcagaggtcaagaaggccaagtacgcatatgatagagaacaagccgagaaacgcggaaagagtcccgacggagttgagtatccggctcatgcaggtcttgtgataagcttctggaagttcgatgcagagaagaaatcccagctacggaagccaggccgtgatatcttattctggtccggcattatcacaacaattgctcagttaggtatctctgcgatccctttcggtgtctatgggaactggggggtgttcctagtcacaggcgctgccatcatcttgtgtttcacgacgggatgctggaatcaatggaaccgcgagaaatgggcttgtagggaaatactgcctggaaataaaaggacttacattctgactagaggtaatggtgcacagcacgccatcgtcattgaagccgacggttttggtctcaatttagaggatctctgcaccgggtttgacaatttggatgagccggctatcccacgatccacgcgctttgctactgttattctcggagtgctatgggtagcccttctcatctccagcacagcgctcggagaccaatcttggtatctcattggcgtcggtctcataggcatgttacagaacatattcgttgccgcctggagccggaggccggaggcactcggcatgccactcaaattccaaggggttgtcggtagtcctaaagtatttggggcaatcatcgaggccgagaatgctcacccgaagagcggtcgcgcgttagtagggacattcttccctggcggcttatttgccaaggaggaaaatgagctcgccgcaattgaggcgaaggcgaaagcagagaggatcgaaaaagcgccctag

SEQ ID NO: 5741 - protein, 407 aa, Muscodor strobelii
  misc_feature: SGI Peptide ID NO. 561636
  misc_feature (1)..(402): NCBI GI: 146323167 Blast Desc: conserved [Aspergillus fumigatus Af293] gi|129556498|gb|EBA27273.1| conserved [Aspergillus fumigatus Af293] gi|159128362|gb|EDP53477.1| conserved [Aspergillus A1163]
  misc_feature (1)..(402): NCBI GI: 119473925 Blast Desc: NFIA_002940 [Neosartorya fischeri NRRL 181] gi|119406991|gb|EAW16941.1| conserved [Neosartorya fischeri NRRL 181]
  misc_feature (1)..(406): NCBI GI: 121717025 Blast Desc: conserved [Aspergillus clavatus NRRL 1] gi|119404139|gb|EAW14556.1| conserved [Aspergillus clavatus NRRL 1]
  misc_feature (11)..(406): NCBI GI: 67903874 Blast Desc: AN8924.2 [Aspergillus nidulans FGSC A4] gi|40744902|gb|EAA64058.1| AN8924.2 [Aspergillus nidulans FGSC A4]
  misc_feature (11)..(406): NCBI GI: 259486636 Blast Desc: TPA: conserved [Aspergillus nidulans FGSC A4]
  misc_feature (1)..(404): NCBI GI: 242803719 Blast Desc: conserved [Talaromyces stipitatus ATCC 10500] gi|218717576|gb|EED16997.1| conserved [Talaromyces stipitatus ATCC 10500]
  misc_feature (1)..(404): NCBI GI: 212539764 Blast Desc: conserved [Penicillium marneffei ATCC 18224] gi|210067336|gb|EEA21428.1| conserved [Penicillium marneffei ATCC 18224]
  misc_feature (3)..(406): NCBI GI: 189206021 Blast Desc: conserved [Pyrenophora tritici-repentis Pt-1C-BFP] gi|187975438|gb|EDU42064.1| conserved [Pyrenophora tritici-repentis Pt-1C-BFP]
  misc_feature (1)..(402): NCBI GI: 115400573 Blast Desc: [Aspergillus terreus NIH2624] gi|114191541|gb|EAU33241.1| [Aspergillus terreus NIH2624]
  misc_feature (3)..(401): NCBI GI: 261357089 Blast Desc: conserved [Verticillium albo-atrum VaMs.102]
MAPVLWHRDHLDFGPTSDAFRDTWSSPSNYAFTILLLVGGDVVARALAQLSGSRITPVAFSFGWVSYATSAINSAVGENKLMPPSDTACTVINAGTQTSRGNGSWVLGRTIRDFEYWMCDPVRSKVAEVKKAKYAYDREQAEKRGKSPDGVEYPAHAGLVISFWKFDAEKKSQLRKPGRDILFWSGIITTIAQLGISAIPFGVYGNWGVFLVTGAAIILCFTTGCWNQWNREKWACREILPGNKRTYILTRGNGAQHAIVIEADGFGLNLEDLCTGFDNLDEPAIPRSTRFATVILGVLWVALLISSTALGDQSWYLIGVGLIGMLQNIFVAAWSRRPEALGMPLKFQGVVGSPKVFGAIIEAENAHPKSGRALVGTFFPGGLFAKEENELAAIEAKAKAERIEKAP

SEQ ID NO: 5742 - DNA, 807 bp, Muscodor strobelii
  misc_feature: SGI EST ID NO. CUFF.14450.0
  misc_feature: Variant of the nucleotide sequence at SEQ ID NO 5740
gaggatctctgcaccgggtttgacaatttggatgagccgggtaggtagccaaatgcaaggggatatctaagtacttacatcgctacagctatcccacgatccacgcgctttgctactgttattctcggagtgctatgggtagcccttctcatctccagcacagcgctcggagaccaatcttggtatctcattggcgtcggtctcataggcatgttacagaacatattcgttgccgcctggagccggaggccggaggcactcggcatgccactcaaattccaaggggttgtcggtagtcctaaagtatttggggcaatcatcgaggccgagaatgctcacccgaagagcggtcgcgcgttagtagggacattcttccctggcggcttatttgccaaggaggaaaatgagctcgccgcaattgaggcgaaggcgaaagcagagaggatcgaaaaagcgccctagaggatgtctaactctagtccccgcactatcataacgagtcagcataagctcgcactgtgtgtttatttttacaatgagcagggtgcaggaaataccttataatgaatagttcacagtcattagcagctttatgtaatcagatgtttaatctacaaaggcgggagtctcagaaggatggtgatactcaaagattccttcgtgttagatttggggctacttggtctaagatcatttgaagtacctatatgcaactgaaagtactctatgggccctacaagtttaggcttcagtgtcagtatagtggcggagaacttccaggttacggctgcgcccgctaccttaggc

SEQ ID NO: 5743 - DNA, 627 bp, Muscodor strobelii
  misc_feature: SGI cDNA ID NO. 561637
  misc_feature: Encodes the peptide sequence at SEQ ID NO 5744
atgagcttcttcgacgctcttcttgacgggcaggaggtcctattaccgagcttcgacaagagtcaattcgatggcgaaggcgaccgtgtaccccaagacgagtgggaacgcgtatcagcgcaccctccaatcgatattatcatctttgagggatggtgtgttgggtttcagtcactacctgacactgagctacacaagaggtggtcggccgcacgtgaccaggcaatgagcaggaatgaacgcgagattcgtggaactgcaagcagccttggaaacatttcatacgataatgtgcagttgctcaatgtcaatctgaaacgttataacgagacagtcatgggctctcacaattttgacttcctcgtccaccttgatgcggaccggctggataatgtctatcggtggcgtatacagcaagaaatggcattacgagcgtctcggggaacaggacaaactgatgaacaagtcatcgcatttgtagatggatatatgccagcttatgagttatacttggatagattgcaacgggaagcattcgtcccgaagaaaagcaagacttgtgctgggacacaatgtcgggtactactggatgatcaacggaatgtcgtcacagtgatgtcgctatag

SEQ ID NO: 5744 - protein, 208 aa, Muscodor strobelii
  misc_feature: SGI Peptide ID NO. 561637
  misc_feature (2)..(205): NCBI GI: 255950556 Blast Desc: Pc22g21490 [Penicillium chrysogenum Wisconsin 54-1255] gi|211593062|emb|CAP99437.1| Pc22g21490 [Penicillium chrysogenum Wisconsin 54-1255]
  misc_feature (3)..(188): NCBI GI: 154302824 Blast Desc: BC1G_09527 [Botryotinia fuckeliana B05.10] gi|150855274|gb|EDN30466.1| BC1G_09527 [Botryotinia fuckeliana B05.10]
  misc_feature (3)..(208): NCBI GI: 169603684 Blast Desc: SNOG_04850 [Phaeosphaeria nodorum SN15] gi|111066121|gb|EAT87241.1| SNOG_04850 [Phaeosphaeria nodorum SN15]
  misc_feature (3)..(197): NCBI GI: 189195804 Blast Desc: conserved [Pyrenophora tritici-repentis Pt-1C-BFP] gi|187980119|gb|EDU46745.1| conserved [Pyrenophora tritici-repentis Pt-1C-BFP]
  misc_feature (4)..(208): NCBI GI: 119487122 Blast Desc: uridine/cytidine kinase, [Neosartorya fischeri NRRL 181] gi|119410573|gb|EAW20519.1| uridine/cytidine kinase, [Neosartorya fischeri NRRL 181]
  misc_feature (3)..(205): NCBI GI: 256734873 Blast Desc: NECHADRAFT_75579 [Nectria haematococca mpVI 77-13-4]
  misc_feature (4)..(208): NCBI GI: 121714447 Blast Desc: Uridine/cytidine kinase, [Aspergillus clavatus NRRL 1] gi|119402988|gb|EAW13408.1| Uridine/cytidine kinase, [Aspergillus clavatus NRRL 1]
  misc_feature (2)..(208): NCBI GI: 259483569 Blast Desc: TPA: conserved [Aspergillus nidulans FGSC A4]
  misc_feature (4)..(208): NCBI GI: 261192440 Blast Desc: conserved [Ajellomyces dermatitidis SLH14081] gi|239589502|gb|EEQ72145.1| conserved [Ajellomyces dermatitidis SLH14081]
  misc_feature (4)..(208): NCBI GI: 242795823 Blast Desc: conserved [Talaromyces stipitatus ATCC 10500] gi|218719259|gb|EED18679.1| conserved [Talaromyces stipitatus ATCC 10500]
  misc_feature (9)..(178): SWISSPROT Homolog: EC 2.7.1.31 Glycerate kinase
MSFFDALLDGQEVLLPSFDKSQFDGEGDRVPQDEWERVSAHPPIDIIIFEGWCVGFQSLPDTELHKRWSAARDQAMSRNEREIRGTASSLGNISYDNVQLLNVNLKRYNETVMGSHNFDFLVHLDADRLDNVYRWRIQQEMALRASRGTGQTDEQVIAFVDGYMPAYELYLDRLQREAFVPKKSKTCAGTQCRVLLDDQRNVVTVMSL

SEQ ID NO: 5745 - DNA, 593 bp, Muscodor strobelii
  misc_feature: SGI EST ID NO. CUFF.14460.0
  misc_feature: Variant of the nucleotide sequence at SEQ ID NO 5743
cttcgacaagagtcaattcgatggcgaaggcgaccgtgtaccccaagacgagtgggaacgcgtatcagcgcaccctccaatcgatattatcatctttgagggatggtgtgttgggtttcagtcactacctgacactgagctacacaagaggtggtcggccgcacgtgaccaggcaatgagcaggaatgaacgcgagattcgtggaactgcaagcagccttggaaacatttcatacgataatgtgcagttgctcaatgtcaatctgaaacgttataacgagacagtcatgggctctcacaattttgacttcctcgtccaccttgatgcggaccggctggataatgtctatcggtggcgtatacagcaagaaatggcattacgagcgtctcggggaacaggacaaactgatgaacaagtcatcgcatttgtagatggatatatgccagcttatgagttatacttggatagattgcaacgggaagcattcgtcccgaagaaaagcaagacttgtgctgggacacaatgtcgggtactactggatgatcaacggaatgtcgtcacagtgatgtcgctatagtaatggcacaagtcgc

SEQ ID NO: 5746 - DNA, 1764 bp, Muscodor strobelii
  misc_feature: SGI cDNA ID NO. 561638
  misc_feature: Encodes the peptide sequence at SEQ ID NO 5747
atgacatcttcaggtgacgacgagtacactggatcatggacacaatctggcgggggtcgagaaggcaccaggccgcctgatgctttatggcgtgccagaaaaagacgtcgcacatcgcacccccgcggatcgacacaggaacttgggttcatgggaggtggtaacgagcctggttctcctcgatttgtgggaagtggcagcggcattcatcttgtgcggattgtcttcgatgtgctggctgagtctcacgttgacaacagtcgggaatcgagcggcagtgcttgtgctagtaatgtcgttcctggcgaagaggatcaattgactgacggtccagcgttccttggcatgctcgagcaagtcggctctggcggaatcgaatcatcgggtccggctgaagcaatcattgttcggtccattctctcaatatgtctagctgacttccgccaagctggtgagcctggggggccctttccccggaatctagttttcacaagtcatgaagatatcacggctagtcttgcattcatcatcggcaacccagcgtccatcagaaacatccaggcagccctatccgccgagctattcttagtctccatgttgaggttcaacagcgcttcgaggattggaggcattattgttcaccagcaacaaaagcgcgatcaactcctgctcgtcacagtactatcgaagcatgcgaagcttcgaggaatgatcttggagttgcggaataagtccatcaggtctagacatgaagacccagatcgcgttctgcgagtacagactgagctaagaaaatgggctaacgaggtttacgacttggagactcctgcctcgccacctcggcatacgccaaggaccgagaatggtactcttctcgtctcaaacgatttaatactctcgccgcataagatgctgttctctgtattgcagcatgagtctgttctctcgctgcatagacctcttttagcatcggaccctcatactctatcatccaaggctgcattccaagagtgcatcaatgcatctcgatcgattattgacacaatagcggatttctcccatagttgtacatcaggtgacccagatcagaaatccgaccacctgttttggccatcgctcacatggtcgatatggatgagctgcttcgtgcttacatatggcgcaatagagggcgtcatatcagttgcttctgcccgcagatatgcaaatcgtgcattgcccatcttgaaacttctgtctctgcgcaaaacatcgtggccggaaagatgtactcttgctgttgatcagcttattgcgtttcttgagaacaaagcggccaacgagggttatgacctaaagggagcagaacaagcgctagatagatcaaatcgtacgagacgaaatcatacgtcagaaagcccacaaggtcttgacatacaagagcgtggcaatagggacacgcggatatccagcttgaacatgtcatgcaataacacatcgcgcgattcacggcaggctagccgtggcgagttccgaggcgcaaatcaccaccccaatgctgctaatacctcgtcgcggactccacatcctcagcaatcgtcagtattcctgaatttagataacgcgtcagatagaatatacacctatcctgatatatcggatatggaaggagcatattcattggataatgatccccttcttgcgctagacttttccaacttcctcccagggttcaatgcgcagaacatttcaactcagaacttcgacgtcaacggcttttactga

SEQ ID NO: 5747 - protein, 587 aa, Muscodor strobelii
  misc_feature: SGI Peptide ID NO. 561638
  misc_feature (31)..(435): NCBI GI: 255950558 Blast Desc: Pc22g21500 [Penicillium chrysogenum Wisconsin 54-1255] gi|211593063|emb|CAP99438.1| Pc22g21500 [Penicillium chrysogenum Wisconsin 54-1255]
  misc_feature (34)..(402): NCBI GI: 115385154 Blast Desc: conserved [Aspergillus terreus NIH2624] gi|114196816|gb|EAU38516.1| conserved [Aspergillus terreus NIH2624]
  misc_feature (221)..(537): NCBI GI: 159123977 Blast Desc: C6 transcription factor, [Aspergillus fumigatus A1163]
  misc_feature (221)..(537): NCBI GI: 70983127 Blast Desc: C6 transcription factor [Aspergillus fumigatus Af293] gi|66844716|gb|EAL85053.1| C6 transcription factor, [Aspergillus fumigatus Af293]
  misc_feature (210)..(537): NCBI GI: 119483672 Blast Desc: C6 transcription factor, [Neosartorya fischeri NRRL 181] gi|119409895|gb|EAW19842.1| C6 transcription factor, [Neosartorya fischeri NRRL 181]
  misc_feature (107)..(434): NCBI GI: 169599182 Blast Desc: SNOG_02408 [Phaeosphaeria nodorum SN15] gi|111069500|gb|EAT90620.1| SNOG_02408 [Phaeosphaeria nodorum SN15]
  misc_feature (180)..(400): NCBI GI: 154302820 Blast Desc: BC1G_09525 [Botryotinia fuckeliana B05.10] gi|150855272|gb|EDN30464.1| BC1G_09525 [Botryotinia fuckeliana B05.10]
  misc_feature (31)..(272): NCBI GI: 261360613 Blast Desc: conserved [Verticillium albo-atrum VaMs.102]
  misc_feature (222)..(427): NCBI GI: 121715121 Blast Desc: C6 transcription factor, [Aspergillus clavatus NRRL 1] gi|119403326|gb|EAW13744.1| C6 transcription factor, [Aspergillus clavatus NRRL 1]
  misc_feature (221)..(463): NCBI GI: 242798508 Blast Desc: C6 transcription factor, [Talaromyces stipitatus ATCC 10500] gi|218716529|gb|EED15950.1| C6 transcription factor, [Talaromyces stipitatus ATCC 10500]
MTSSGDDEYTGSWTQSGGGREGTRPPDALWRARKRRRTSHPRGSTQELGFMGGGNEPGSPRFVGSGSGIHLVRIVFDVLAESHVDNSRESSGSACASNVVPGEEDQLTDGPAFLGMLEQVGSGGIESSGPAEAIIVRSILSICLADFRQAGEPGGPFPRNLVFTSHEDITASLAFIIGNPASIRNIQAALSAELFLVSMLRFNSASRIGGIIVHQQQKRDQLLLVTVLSKHAKLRGMILELRNKSIRSRHEDPDRVLRVQTELRKWANEVYDLETPASPPRHTPRTENGTLLVSNDLILSPHKMLFSVLQHESVLSLHRPLLASDPHTLSSKAAFQECINASRSIIDTIADFSHSCTSGDPDQKSDHLFWPSLTWSIWMSCFVLTYGAIEGVISVASARRYANRALPILKLLSLRKTSWPERCTLAVDQLIAFLENKAANEGYDLKGAEQALDRSNRTRRNHTSESPQGLDIQERGNRDTRISSLNMSCNNTSRDSRQASRGEFRGANHHPNAANTSSRTPHPQQSSVFLNLDNASDRIYTYPDISDMEGAYSLDNDPLLALDFSNFLPGFNAQNISTQNFDVNGFY

SEQ ID NO: 5748 - DNA, 2100 bp, Muscodor strobelii
  misc_feature: SGI EST ID NO. CUFF.14546.0
  misc_feature: Variant of the nucleotide sequence at SEQ ID NO 5746
gctcgagcaagtcggctctggcggaatcgaatcatcgggtccggctgaagcaatcattgttcggtccattctctcaatatgtctagctgacttccgccaagctggtgagcctggggggccctttccccggaatctagttttcacaagtcatgaagatatcacggctagtcttgcattcatcatcggcaacccagcgtccatcagaaacatccaggcagccctatccgccgagctattcttagtctccatgttgaggttcaacagcgcttcgaggattggaggcattattgttcgtatgtcgtttaatcttggcctccaccgatgccctcgtcgctttccaaatttcaatcatcacaacgcatcgatgagaaaacgactgtggtggtctgtgtactgcctagacagaatggtatgtcaaacgcttggcttaccgctgggcatcagagatgacgatgtcgacgtgtgcctccccttagaggaactacatgttcaggattcgaccgccaaagtgaatgaccattcattgccgaaccagcaacaaaagcgcgatcaactcctgctcgtcacagtactatcgaagcatgcgaagcttcgaggaatgatcttggagttgcggaataagtccatcaggtctagacatgaagacccagatcgcgttctgcgagtacagactgagctaagaaaatgggctaacgaggtttacgacttggagactcctgcctcgccacctcggcatacgccaaggaccgagaatggtactcttctcgtctcaaacgatttaatactctcgccgcataagatgctgttctctgtattgcagcatgagtctgttctctcgctgcatagacctcttttagcatcggaccctcatactctatcatccaaggctgcattccaagagtgcatcaatgcatctcgatcgattattgacacaatagcggatttctcccatagttgtacatcaggtgacccagatcagaaatccgaccacctgttttggccatcgctcacatggtcgatatggatgagctgcttcgtgcttacatatggcgcaatagagggcgtcatatcagttgcttctgcccgcaggtcagtactgttatgcgtacttgacaacttgaagagaatcgaccatttaaccaagtctcctatatcgtagatatgcaaatcgtgcattgcccatcttgaaacttctgtctctgcgcaaaacatcgtggccggaaagatgtactcttgctgttgatcagcttattgcgtttcttgagaacaaagcggccaacgagggttatgacctaaagggagcagaacaagcgctagatagatcaaatcgtacgagacgaaatcatacgtcagaaagcccacaaggtcttgacatacaagagcgtggcaatagggacacgcggatatccagcttgaacatgtcatgcaataacacatcgcgcgattcacggcaggctagccgtggcgagttccgaggcgcaaatcaccaccccaatgctgctaatacctcgtcgcggactccacatcctcagcaatcgtcagtattcctgaatttagataacgcgtcagatagaatatacacctatcctgatatatcggatatggaaggagcatattcattggataatgatccccttcttgcgctagacttttccaacttcctcccagggttcaatgcgcagaacatttcaactcagaacttcgacgtcaacggcttttactgatagcctcataatcacaaattacgcatacaaatacaggcaacaactacctatgcgctcgtaaaataagtcatatttccggaatccgcatggttcgagctcattcactgttacacgtaaatgctgccgcggttgcggagagttacgttcaactggcacgggttcttaagctgaaactatacttatacactttatacatagagtcatggcatcataggtaacagagcatcttatcttgcttgtgcgctaatgaaaccaaatccaagcaacgattcttgtattcccgctcattgtcatgccacgcaacgatcctaaagaatggtgtcgccaagatgtggtaagcatgattcagctttgattctcgcagggtcgagttcga

SEQ ID NO: 5749 - DNA, 1488 bp, Muscodor strobelii
  misc_feature: SGI cDNA ID NO. 561639
  misc_feature: Encodes the peptide sequence at SEQ ID NO 5750
atggcgaactcttccaacggcgatgttgaaagaacatcaaaggagcctgccggggagaagctggagtcccagcattacgaagagtctgagagtcaaactactatgaccgaggaacaccgccagtatctcatcgcccatcatggaacagatcaacttgaccccctgccggactacacggatgcggatccatacaactgggcgcgaccgaagaaatggctcaaccttgcgttcattgtatttcacgcgttcatggcgaccttcaccgcagctgctattcaatcagcttttgtgaatattgccatggacttggatgtcacgatacagcaggctagttatctcacgtcactcgtcattgctgttctcggcggtgcaccattgctctggagaccattggccgatcgttacggtcggcgacccattttgttggtatcgcttgtcataagtctagtcgccaatgtcggatgtgcaaagagcccaacttatagcacgatgggcttgaaccgagctattgcggcgtttggtatttcaccggcggcagcaattgggagtggatgtgtgcaggaaatgtttttcaaacaccagagagcacgctacatgggaatctggaccgtattcgtaactcttggggttcctgttgctcctttcatcttcgggttcgtagcattacgcgtcgggtaccgctggatctactggacattggcaatcaccaatgccgtccagcttatactttacttcctcctcgggtcagaaacccggtatattcggggcgacgagtccaaagcacctactggatacgccaagaacttgctttactttaggcgtatcgataagactcccatcaccgttggcgacttcattcatcctttccgtctcgctgcctacccttgcgttatgattcccgctgttgcttactccatggtcttcgcccttgccaacgttctgccgacacttgaaataccccaactatatgtcgaagagttccatctgaatactcaggaagtagggcttcaaaacggagccatcatcattgggacactcctcggtgaacaagtcggtggcttctgctccgacaggtggatgaggcaaaagcgagcgaccgccgcggaattcagactatggttatcgtattccggctacgctttgtcaatcgtcggccttgctgtttttcttgcgcaagtggccagtgcaggtcaatcctggaacatcacaccgacggttggcgcaggtgttgcatccgctggaaatcagattgtcactactattctgatcacctatgcagtagactgtcaccgacatgaagcagcggctattggcgttttcatcacatttgttcgtcaaatttggggctttattggaccattctggttcccagatctcattaaaaatgtcgggctagtgggaagtattggtgttactaccgcgttgatgataggagcgagcgctatacccaccatcatacttcagtggaaaggcaaatcgtggcattaa

SEQ ID NO: 5750 - protein, 495 aa, Muscodor strobelii
  misc_feature: SGI Peptide ID NO. 561639
  misc_feature (78)..(453): Pfam Id: PF07690 Pfam Desc: Major Facilitator Superfamily
  misc_feature (130)..(167): Pfam Id: PF00083 Pfam Desc: Sugar (and other) transporter
  misc_feature (20)..(495): NCBI GI: 238495028 Blast Desc: conserved [Aspergillus flavus NRRL3357] gi|220695400|gb|EED51743.1| conserved [Aspergillus flavus NRRL3357]
  misc_feature (19)..(477): NCBI GI: 145229967 Blast Desc: An01g08700 [Aspergillus niger] gi|134055406|emb|CAK37115.1| protein product [Aspergillus niger]
  misc_feature (2)..(495): NCBI GI: 255939446 Blast Desc: Pc16g00730 [Penicillium chrysogenum Wisconsin 54-1255] gi|211585115|emb|CAP92743.1| Pc16g00730 [Penicillium chrysogenum Wisconsin 54-1255]
  misc_feature (8)..(491): NCBI GI: 189206706 Blast Desc: conserved [Pyrenophora tritici-repentis Pt-1C-BFP] gi|187975780|gb|EDU42406.1| conserved [Pyrenophora tritici-repentis Pt-1C-BFP]
  misc_feature (7)..(495): NCBI GI: 154309127 Blast Desc: BC1G_07458 [Botryotinia fuckeliana B05.10] gi|150852501|gb|EDN27693.1| BC1G_07458 [Botryotinia fuckeliana B05.10]
  misc_feature (59)..(495): NCBI GI: 116208780 Blast Desc: CHGG_03683 [Chaetomium globosum CBS 148.51] gi|88184280|gb|EAQ91748.1| CHGG_03683 [Chaetomium globosum CBS 148.51]
  misc_feature (20)..(455): NCBI GI: 169777799 Blast Desc: [Aspergillus oryzae RIB40] gi|83772102|dbj|BAE62232.1| protein product [Aspergillus oryzae]
  misc_feature (22)..(495): NCBI GI: 242815844 Blast Desc: MFS multidrug transporter, [Talaromyces stipitatus ATCC 10500] gi|218714989|gb|EED14412.1| MFS multidrug transporter, [Talaromyces stipitatus ATCC 10500]
  misc_feature (30)..(495): NCBI GI: 212545496 Blast Desc: MFS transporter, [Penicillium marneffei ATCC 18224] gi|210065871|gb|EEA19965.1| MFS transporter, [Penicillium marneffei ATCC 18224]
  misc_feature (11)..(495): NCBI GI: 145246564 Blast Desc: An12g04620 [Aspergillus niger] gi|134080249|emb|CAK97152.1| protein product [Aspergillus niger]
MANSSNGDVERTSKEPAGEKLESQHYEESESQTTMTEEHRQYLIAHHGTDQLDPLPDYTDADPYNWARPKKWLNLAFIVFHAFMATFTAAAIQSAFVNIAMDLDVTIQQASYLTSLVIAVLGGAPLLWRPLADRYGRRPILLVSLVISLVANVGCAKSPTYSTMGLNRAIAAFGISPAAAIGSGCVQEMFFKHQRARYMGIWTVFVTLGVPVAPFIFGFVALRVGYRWIYWTLAITNAVQLILYFLLGSETRYIRGDESKAPTGYAKNLLYFRRIDKTPITVGDFIHPFRLAAYPCVMIPAVAYSMVFALANVLPTLEIPQLYVEEFHLNTQEVGLQNGAIIIGTLLGEQVGGFCSDRWMRQKRATAAEFRLWLSYSGYALSIVGLAVFLAQVASAGQSWNITPTVGAGVASAGNQIVTTILITYAVDCHRHEAAAIGVFITFVRQIWGFIGPFWFPDLIKNVGLVGSIGVTTALMIGASAIPTIILQWKGKSWH

SEQ ID NO: 5751 - DNA, 2234 bp, Muscodor strobelii
  misc_feature: SGI EST ID NO. CUFF.14627.0
  misc_feature: Variant of the nucleotide sequence at SEQ ID NO 5749
aaagtaggaaggtgtgtcgctaggggcggccggtgaatagttccaccggcgcagaaaggtgatgatcagctccctcttgcgtcagccaggaaagcactccgccggtcatcgccattggacagtactctaaacttttcgtttaaaccggcttagatacagcagaaactgaatataaaattctttcaatatgctcggcatatgtgaccggctttagttaccaatgctgccatgcaccgagagaaagcttaccccggctttgccccagaatttctctggtagctcaccctagccttgactaggctggactactccacgttattaccacttcgcggttgtatctttcggccgacgagtaagtacttaagtacatgtagggatcactgataaagcatggtgagaaaagcacaaaagccttgaaggcccgtcgatcattgactcgtatctcttcatccctcatagtcgacgcgatacaatggcgaactcttccaacggcgatgttgaaagaacatcaaaggagcctgccggggagaagctggagtcccagcattacgaagagtctgaggttcgaggatcgatacctactcttgcttgacttgacactcacattgacgcagagtcaaactactatgaccgaggaacaccgccagtatctcatcgcccatcatggaacagatcaacttgaccccctgccggactacacggatgcggatccatacaactgggcgcgaccgaagaaatggctcaaccttgcgttcattgtatttcacgcgttcatggcgaccttcaccgcagctgctattcaatcagcttttgtgaatattgccatggacttggatgtcacgatacagcaggctagttatctcacgtcactcgtcattgctgttctcggcggtgcaccattgctctggagaccattggccgatcgttacggtcggcgacccattttgttggtatcgcttgtcataagtctagtcgccaatgtcggatgtgcaaagagcccaacttatagcacgatgggcttgaaccgagctattgcggcgtttggtatttcaccggcggcagcaattgggagtggatgtgtgcaggaaatgtttttcaaacaccagagagcacgctacatgggaatctggaccgtattcgtaactcttggggttcctgttgctcctttcatcttcgggttcgtagcattacgcgtcgggtaccgctggatctactggacattggcaatcaccaatgccgtccagcttatactttacttcctcctcgggtcagaaacccggtatattcggggcgacgagtccaaagcacctactggatacgccaagaacttgctttactttaggcgtatcgataagactcccatcaccgttggcgacttcattcatcctttccgtctcgctgcctacccttgcgttatgattcccgctgttgcttactccatggtcttcgcccttgccaacgttctgccgacacttgaaataccccaactatatgtcgaagagttccatctgaatactcaggaagtagggcttcaaaacggagccatcatcattgggacactcctcggtgaacaagtcggtggcttctgctccgacaggtggatgaggcaaaagcgagcgaccgccgcggaattcagactatggttatcgtattccggctacgctttgtcaatcgtcggccttgctgtttttcttgcgcaagtggccagtgcaggtcaatcctggaacatcacaccgacggttggcgcaggtgttgcatccgctggaaatcagattgtcactactattctgatcacctatgcagtagactgtcaccgacatgaagcagcggctattggcgttttcatcacatttgttcgtcaaatttggggctttattggaccattctggttcccagatctcattaaaaatgtcgggctagtgggaagtattggtgttactaccgcgttgatgataggagcgagcgctatacccaccatcatacttcagtggaaaggcaaatcgtggcattaatcatcagcgactacacaagttgcttagacatattttctaggtagtggtacaaaatatgaccctttcatgttttgtgctggctctgtcacctgtttgcagtattacagtgcccgatcgtaatggcgtcggcttccatattgttgaagtatgcatcataccatttcgccgtcatcttcacgctgttactatcaacgccagatcagacactatctcgattgaatg

SEQ ID NO: 5752 - DNA, 789 bp, Muscodor strobelii
  misc_feature: SGI cDNA ID NO. 561640
  misc_feature: Encodes the peptide sequence at SEQ ID NO 5753
atgccgttagatccgaatgattccgtcgcagagacgctgaaggccgccatttgcaatggcgacaccgaaacgctgcgatccatgcttcaagcggatccaaagctggcgcagatacgcattggccacctgacaaaaggcattcgaacgcctctccacattctcacagattttccaggacactaccccaacagcgtccaagtggcacagctcttaatcgagcacggcgcgaacgtcaatgccgcgttcgagggaccaaatcatagcgaaacgccactgcattgggcggcaagctgcaacgacgtggctctgatcaagacgctattagacgcgggagccgacatcgatgccgcgggaggggtcattgctggcggcactccgttggccgatgctcgagcatttctccaaatcgaggcggcgcacgagctgatacgacgcggtgcctctgtcggattacaggatgcggcaactttgggtttgctagatatcgttcactcattttacgaaaacaaagctggtgatcaattgagcaatgcgaccaggacaaccacagacatggaggttgcaaattgtctagcttcgcaggatgataccgatgccgctttctggaatgcttgccatggcggccaactcgatgtcgtcaagtacttgcacaagaaaggagccaacgtcaatgctgtcccggtatgggacaagttgacgccactggaagtggctcgacgcagcgatgcgcatggcatagttgattggtttgagagtatcaagcccagcacttcggaagatagtaaataa

SEQ ID NO: 5753 - protein, 262 aa, Muscodor strobelii
  misc_feature: SGI Peptide ID NO. 561640
  misc_feature (87)..(119): Pfam Id: PF00023 Pfam Desc: Ankyrin repeat
  misc_feature (3)..(260): NCBI GI: 257793050 Blast Desc: Ankyrin [Alicyclobacillus acidocaldarius subsp. acidocaldarius DSM 446] gi|257479742|gb|ACV60059.1| Ankyrin [Alicyclobacillus acidocaldarius subsp. acidocaldarius DSM 446]
  misc_feature (5)..(261): NCBI GI: 256670130 Blast Desc: ankyrin repeat domain protein [Streptomyces sp. AA4]
  misc_feature (6)..(258): NCBI GI: 280960414 Blast Desc: Ankyrin [Frankia sp. EuI1c] gi|270735714|gb|EFA63906.1| Ankyrin [Frankia sp. EuI1c]
  misc_feature (6)..(259): NCBI GI: 280964120 Blast Desc: Ankyrin [Frankia sp. EuI1c] gi|270731770|gb|EFA59999.1| Ankyrin [Frankia sp. EuI1c]
  misc_feature (13)..(262): NCBI GI: 72134394 Blast Desc: : similar to ankyrin 2,3/unc44, partial [Strongylocentrotus purpuratus] gi|115755843|ref|XP_001199940.1| : similar to ankyrin 2,3/unc44, partial [Strongylocentrotus
  misc_feature (7)..(239): NCBI GI: 189501684 Blast Desc: Aasi_0228 [Candidatus Amoebophilus asiaticus 5a2] gi|189497125|gb|ACE05672.1| Aasi_0228 [Candidatus Amoebophilus asiaticus 5a2]
  misc_feature (10)..(238): NCBI GI: 115941717 Blast Desc: : similar to ankyrin 2,3/unc44, partial [Strongylocentrotus purpuratus] gi|115943115|ref|XP_786997.2| : similar to ankyrin 2,3/unc44, partial [Strongylocentrotus
  misc_feature (20)..(237): NCBI GI: 123506042 Blast Desc: ankyrin repeat protein [Trichomonas vaginalis G3] gi|121912064|gb|EAY16890.1| ankyrin repeat protein, [Trichomonas vaginalis G3]
  misc_feature (13)..(260): NCBI GI: 72134394 Blast Desc: : similar to ankyrin 2,3/unc44, partial [Strongylocentrotus purpuratus] gi|115755843|ref|XP_001199940.1| : similar to ankyrin 2,3/unc44, partial [Strongylocentrotus
  misc_feature (6)..(238): NCBI GI: 115613210 Blast Desc: : similar to ankyrin 2,3/unc44 [Strongylocentrotus purpuratus]
MPLDPNDSVAETLKAAICNGDTETLRSMLQADPKLAQIRIGHLTKGIRTPLHILTDFPGHYPNSVQVAQLLIEHGANVNAAFEGPNHSETPLHWAASCNDVALIKTLLDAGADIDAAGGVIAGGTPLADARAFLQIEAAHELIRRGASVGLQDAATLGLLDIVHSFYENKAGDQLSNATRTTTDMEVANCLASQDDTDAAFWNACHGGQLDVVKYLHKKGANVNAVPVWDKLTPLEVARRSDAHGIVDWFESIKPSTSEDSK

SEQ ID NO: 5754 - DNA, 1261 bp, Muscodor strobelii
  misc_feature: SGI EST ID NO. CUFF.14508.0
  misc_feature: Variant of the nucleotide sequence at SEQ ID NO 5752
tagcttgatcgtacaatccaacagccacagcttcaatccaccagggacgtgtggctgcctaaaacgcaccgtcctttcgacgagcagaccgtttgtcgctgctcatcgtgacatgtcaaaacatcaacctcagactcgcaccaaaaggcttgatatttcataacaaccgatgccgttagatccgaatgattccgtcgcagagacgctgaaggccgccatttgcaatggcgacaccgaaacgctgcgatccatgcttcaagcggatccaaagctggcgcagatacgcattggccacctgacaaaaggcattcgaacgcctctccacattctcacagattttccaggacactaccccaacagcgtccaagtggcacagctcttaatcgagcacggcgcgaacgtcaatgccgcgttcgagggaccaaatcatagcgaaacgccactgcattgggcggcaagctgcaacgacgtggctctgatcaagacgctattagacgcgggagccgacatcgatgccgcgggaggggtcattgctggcggcactccgttggccgatgctcgagcatttctccaaatcgaggcggcgcacgagctgatacgacgcggtgcctctgtcggattacaggatgcggcaactttgggtttgctagatatcgttcactcattttacgaaaacaaagctggtgatcaattgagcaatgcgaccaggacaaccacagacatggaggttgcaaattgtctagcttcgcaggatgataccgatgccgctttctggaatgcttgccatggcggccaactcgatgtcgtcaagtacttgcacaagaaaggagccaacgtcaatgctgtcccggtatgggacaagttgacgccactggaagtggctcgacgcagcgatgcgcatggcatagttgattggtttgagagtatcaagcccagcacttcggaagatagtaaataaggggcagacttcatctttccttatgcacatgcattgaatgacgagaagtggaggcaatactttcgtaatataaatgacatttcgtatcaagggaagcagacaacactaaggagtcgcaaccaaaaccaacgcgctcgtagacaagacgcgtgtgtcactttcccagtcgcttaacatcaaagcttccgccacgttacataccgttgtaagagcctacgatcattgatcagaggtccggcttacttcagtagcaatggactttactaggaaatctgataacccgtcccaattggcgatctagag

SEQ ID NO: 5755 - DNA, 1671 bp, Muscodor strobelii
  misc_feature: SGI cDNA ID NO. 561641
  misc_feature: Encodes the peptide sequence at SEQ ID NO 5756
atggccgctttacacgaaccgtcttacttgcgctccggcctggcttatgtcttgggtttgatcaacaccctacccatcaggcaatttgtcaccatcgcaatccttagctttgtttcccgactcatctacaacttagagttccaccctctttctaaattccctggcccaacactggccgctgtttctgatctttggtgggcttttcatagcatgagtggaaagtatccgtgggcaattgagcgcatcctcggacgatatggcaggattccgccccaaaacacatcgagactaatcaagcatgagactgacaaaagaccaggtgacgtcgttcgaatcgcgccgaacgagctggtcttcctaacgccacaagcggccaaagacatttatttagcacaagaaaacaatctcgagttgtttgttcaggtgggatacgacgctcttgacactggtgacaatggcatcacaggcgagccgagcccggtcagacatcgcgagattgcgaaaagacttgcaccagcgttcagcaatagaaacttgattgccaaggaaacaaccattcaaaatcatgtgaatggctttatagaaaagatgaaaagtctagaaggaatagatatcgagctgaggcaatggtcagactggcttgctcttgatctttccgttgatatgacatacggcttagactggggccaagttagagacatgaaagactcgatcttcctcaactcatccctgaagctcaatcgattcctcaccctgagtcagatatcacggaagttctcgctcatcacccgcttgattctcacgcctctgatgtatctctctattccaacatccgtctggttcgctatcccgactttgatgagtgccaacgccaaggacctccagtatcgacttgaccgtcgaggtaacacagaacatctggattatgttgagcaactcattccttcggataagccactccctgagaagaaagaactctaccacatccagaacgttgcaggtcagctgctattagctagctggcagcctttagctaatcaattctacacaatcatccttctcctacttaagaatcctgacacatacgcagcgttggtttcggaagtaaggattactttcgccagcgatgatgatataacgatcggcagtctattgaacaataagctaaaatacctacaagcatgcgtctctgagggtcttcgactgcatgcagaaaccaccgatggtttgccgcggatcagtcctggtgctttcgtggatggtcattacgtacctcaaggggttacctgccaaataagttattttgcagcaactcgcagctcgcgcttctttcacgaggccctcgggtttcgcccagaacgttggctttcacccgatgacccgagatacgacacgtccttttccaacgacgatctgaaagcttcgaagccatttagtcagggcttgagaggatgtcccggcggagcaatctcaaccgcagttatccgtatatttgtcgcaaaggtaatgtggcatttcgacattgagggtattaatcacaatgatatatcctttgaccgagatttcaagttcatgactttctgggaaagaccggactttcgggtacgcatgaagtcggtccagaggccatgtcgcgtgcgaacagaagctgccatcggcatggatccatga

SEQ ID NO: 5756 - protein, 556 aa, Muscodor strobelii
  misc_feature: SGI Peptide ID NO. 561641
  misc_feature (71)..(537): Pfam Id: PF00067 Pfam Desc: Cytochrome P450
  misc_feature (351)..(509): Pfam Id: PF00067 Pfam Desc: Cytochrome P450
  misc_feature (107)..(339): NCBI GI: 156056787 Blast Desc: SS1G_04124 [Sclerotinia sclerotiorum 1980] gi|154701910|gb|EDO01649.1| SS1G_04124 [Sclerotinia sclerotiorum 1980]
  misc_feature (130)..(532): NCBI GI: 145606883 Blast Desc: MGG_03819 [Magnaporthe grisea 70-15] gi|145014505|gb|EDJ99073.1| MGG_03819 [Magnaporthe grisea 70-15]
  misc_feature (88)..(542): NCBI GI: 156054726 Blast Desc: SS1G_06211 [Sclerotinia sclerotiorum 1980] gi|154703991|gb|EDO03730.1| SS1G_06211 [Sclerotinia sclerotiorum 1980]
  misc_feature (104)..(542): NCBI GI: 154296440 Blast Desc: BC1G_13046 [Botryotinia fuckeliana B05.10] gi|150843407|gb|EDN18600.1| BC1G_13046 [Botryotinia fuckeliana B05.10]
  misc_feature (29)..(509): NCBI GI: 46138361 Blast Desc: FG10695.1 [Gibberella zeae PH-1]
  misc_feature (32)..(541): NCBI GI: 259485752 Blast Desc: TPA: cytochrome P450, (Eurofung) [Aspergillus nidulans FGSC A4]
  misc_feature (26)..(542): NCBI GI: 238492291 Blast Desc: cytochrome P450, [Aspergillus flavus NRRL3357] gi|220695876|gb|EED52218.1| cytochrome P450, [Aspergillus flavus NRRL3357]
  misc_feature (8)..(541): NCBI GI: 121716300 Blast Desc: benzoate 4-monooxygenase cytochrome P450 [Aspergillus clavatus NRRL 1] gi|119403916|gb|EAW14333.1| benzoate 4-monooxygenase cytochrome P450 [Aspergillus clavatus NRRL 1]
  misc_feature (14)..(540): NCBI GI: 57157398 Blast Desc: cytochrome P-450 [Alternaria solani]
  misc_feature (22)..(540): NCBI GI: 255931847 Blast Desc: Pc12g06380 [Penicillium chrysogenum Wisconsin 54-1255] gi|211582099|emb|CAP80265.1| Pc12g06380 [Penicillium chrysogenum Wisconsin 54-1255]
MAALHEPSYLRSGLAYVLGLINTLPIRQFVTIAILSFVSRLIYNLEFHPLSKFPGPTLAAVSDLWWAFHSMSGKYPWAIERILGRYGRIPPQNTSRLIKHETDKRPGDVVRIAPNELVFLTPQAAKDIYLAQENNLELFVQVGYDALDTGDNGITGEPSPVRHREIAKRLAPAFSNRNLIAKETTIQNHVNGFIEKMKSLEGIDIELRQWSDWLALDLSVDMTYGLDWGQVRDMKDSIFLNSSLKLNRFLTLSQISRKFSLITRLILTPLMYLSIPTSVWFAIPTLMSANAKDLQYRLDRRGNTEHLDYVEQLIPSDKPLPEKKELYHIQNVAGQLLLASWQPLANQFYTIILLLLKNPDTYAALVSEVRITFASDDDITIGSLLNNKLKYLQACVSEGLRLHAETTDGLPRISPGAFVDGHYVPQGVTCQISYFAATRSSRFFHEALGFRPERWLSPDDPRYDTSFSNDDLKASKPFSQGLRGCPGGAISTAVIRIFVAKVMWHFDIEGINHNDISFDRDFKFMTFWERPDFRVRMKSVQRPCRVRTEAAIGMDP

SEQ ID NO: 5757 - DNA, 2092 bp, Muscodor strobelii
  misc_feature: SGI EST ID NO. CUFF.14615.1
  misc_feature: Variant of the nucleotide sequence at SEQ ID NO 5755
gcttaactagataaatcctgctacctcacttttcacggtccgaacgatgcggacgaccatgctatttccaattggaacgtcggacatctcggtctcccgattcgcttgtcaggaatcgagcacgcctatcctcaatggccgctttacacgaaccgtcttacttgcgctccggcctggcttatgtcttgggtttgatcaacaccctacccatcaggcaatttgtcaccatcgcaatccttagctttgtttcccgactcatctacaacttagagttccaccctctttctaaattccctggcccaacactggccgctgtttctgatctttggtgggcttttcatagcatgagtggaaagtatccgtgggcaattgagcgcatcctcggacgatatggcaggattccgccccaaaacacatcgagactaatcaagcatgagactgacaaaagaccaggtgacgtcgttcgaatcgcgccgaacgagctggtcttcctaacgccacaagcggccaaagtctctactactcgcccacaactagctcgaggggatgatcatctaaataagcataaacagacatttatttagcacaagaaaacaatctcgagttgtttgttcaggtgggatacgacgctcttgacactggtgacaatggcatcacaggcgagccgagcccggtcagacatcgcgagattgcgaaaagacttgcaccagcgttcagcaatagaaacttgattgccaaggaaacaaccattcaaaatcatgtgaatggctttatagaaaagatgaaaagtctagaaggaatagatatcgagctgaggcaatggtcagactggcttgctcttgatctttccgttgatatgacatacggcttagactggggccaagttagagacatgaaagactcgatcttcctcaactcatccctgaagctcaatcgattcctcaccctgagtcagatatcacggaagttctcgctcatcacccgcttgattctcacgcctctgatgtatctctctattccaacatccgtctggttcgctatcccgactttgatgagtgccaacgccaaggacctccagtatcgacttgaccgtcgaggtaacacagaacatctggattatgttgagcaactcattccttcggataagccactccctgagaagaaagaactctaccacatccagaacgttgcaggtcagctgctattagctagctggcagcctttagctaatcaattctacacaatcatccttctcctacttaagaatcctgacacatacgcagcgttggtttcggaagtaaggattactttcgccagcgatgatgatataacgatcggcagtctattgaacaataagctaaaatacctacaagcatgcgtctctgagggtcttcgactgcatgcagaaaccaccgatggtttgccgcggatcagtcctggtgctttcgtggatggtcattacgtacctcaaggggttacctgccaaataagttattttgcagcaactcgcagctcgcgcttctttcacgaggccctcgggtttcgcccagaacgttggctttcacccgatgacccgagatacgacacgtccttttccaacgacgatctgaaagcttcgaagccatttagtcagggcttgagaggatgtcccggcggagcaatctcaaccgcagttatccgtatatttgtcgcaaaggtaatgtggcatttcgacattgagggtattaatcacaatgatatatcctttgaccgagatttcaagttcatgactttctgggaaagaccggactttcgggtacgcatgaagtcggtccagaggccatgtcgcgtgcgaacagaagctgccatcggcatggatccatgatgtagtgtagtatgcaatagttttatcacaaattactatcttatgttccaccgcgcgattgcgccgtagcccgtatggcttcgcctcatcttgtagataatctggtcgatctcgtagactgtaagacacttatttggacttggtgtttgtcccattcgcgggcgcacttggaagtacggctgtactaagaagatcgacagaagacgagacgagcgcgatcaatcaaac

SEQ ID NO: 5758 - DNA, 453 bp, Muscodor strobelii
  misc_feature: SGI cDNA ID NO. 561642
  misc_feature: Encodes the peptide sequence at SEQ ID NO 5759
atgcaactctccctattcttcgctgccatcttggctactgctgttgcagcttcgcctgctgtctacaacgacttccctaagcgcggcggtggtggtgatggaggatatcccacttcgactaagcctgccggtcctaccagcactacgtcctctggcggttcctatcccaccggtggtgacggcggcagcggcggttccggtggctccggtggctccggtggcagcggcggcggcagcccctatgacgcctgcagcggcctctatgacactcttcaatgctgctctactgacgttggcggcatcgctgatctggactgcgcttctcccggggccgtaccaagcagccctgctagcttccaagccatctgcgccgccaagggccagcgagctcgctgctgtgtcatccctgttcttggccaggacgtcctttgccagacccctcttggtctttaa

SEQ ID NO: 5759 - protein, 150 aa, Muscodor strobelii
  misc_feature: SGI Peptide ID NO. 561642
  misc_feature (83)..(147): Pfam Id: PF06766 Pfam Desc: Fungal hydrophobin
  misc_feature (80)..(150): NCBI GI: 164425836 Blast Desc: NCU08192 [Neurospora crassa OR74A] gi|157071084|gb|EAA30046.2| NCU08192 [Neurospora crassa OR74A]
  misc_feature (81)..(150): NCBI GI: 37724083 Blast Desc: hydrophobin [Gibberella moniliformis]
  misc_feature (81)..(150): NCBI GI: 46109898 Blast Desc: FG01831.1 [Gibberella zeae PH-1] gi|91221408|gb|ABE27986.1| hydrophobin 5 precursor [Fusarium culmorum]
  misc_feature (80)..(150): NCBI GI: 39950019 Blast Desc: MGG_01173 [Magnaporthe grisea 70-15] gi|4337063|gb|AAD18059.1| magnaporin [Magnaporthe grisea] gi|145021037|gb|EDK05166.1| MGG_01173 [Magnaporthe grisea 70-15]
  misc_feature (80)..(150): NCBI GI: 171685270 Blast Desc: protein product [Podospora anserina] gi|170942596|emb|CAP68248.1| protein product [Podospora anserina]
  misc_feature (81)..(150): NCBI GI: 1706154 Blast Desc: CRYP_CRYPA RecName: Full=Cryparin; Flags: Precursor gi|305085|gb|AAA19638.1| cryparin [Cryphonectria parasitica]
  misc_feature (86)..(150): NCBI GI: 154125601 Blast Desc: hydrophobin [Hypocrea virens]
  misc_feature (85)..(144): NCBI GI: 25091421 Blast Desc: THYD_CLAFS RecName: Full=Trihydrophobin; AltName: Full=CFTH1; Flags: Precursor gi|6448504|emb|CAB61236.1| Trihydrophobin [Claviceps fusiformis]
  misc_feature (74)..(150): NCBI GI: 256722079 Blast Desc: NECHADRAFT_51212 [Nectria haematococca mpVI 77-13-4]
  misc_feature (80)..(139): NCBI GI: 11359587 Blast Desc: NECHADRAFT_51212 [Nectria haematococca mpVI 77-13-4]
MQLSLFFAAILATAVAASPAVYNDFPKRGGGGDGGYPTSTKPAGPTSTTSSGGSYPTGGDGGSGGSGGSGGSGGSGGGSPYDACSGLYDTLQCCSTDVGGIADLDCASPGAVPSSPASFQAICAAKGQRARCCVIPVLGQDVLCQTPLGL

SEQ ID NO: 5760 - DNA, 969 bp, Muscodor strobelii
  misc_feature: SGI EST ID NO. CUFF.14791.0
  misc_feature: Variant of the nucleotide sequence at SEQ ID NO 5758
tgcagtcgactgatactctacccatgatgaaggcaacatggaaggaatcaaggtggccagggacaaaacttggtgaaagaagtcaagaagctctccgtcttcgaatataaatatctgttgatttcccctccaactccgtcgatctttctactcatcaggcaattcaaagcatcattccagcgaccagcccttcactactctacacacgctctctcagttgaaactctcaagtcaatctttgagcccaatcgccaatatgcaactctccctattcttcgctgccatcttggctactgctgttgcagcttcgcctgctgtctacaacgacttccctaagcgcggcggtggtggtgatggaggatatcccacttcgactaagcctgccggtcctaccagcactacgtcctctggcggttcctatcccaccggtggtgacggcggcagcggcggttccggtggctccggtggctccggtggcagcggcggcggcagcccctatgacgcctgcagcggcctctatgacactcttcaatgctgctctactgacgttggcggcatcgctgatctggactgcgcttctcccggggccgtaccaagcagccctgctagcttccaagccatctgcgccgccaagggccagcgagctcgctgctgtgtcatccctgttcttggccaggacgtcctttgccagacccctcttggtctttaaatcaggacttgtcaattacaggcatttatgagaacacgaaatcgtcgctcgttttgatggattggttagggtagcggattgaagtcatgagttgatgaggagttggtggactgtagtgttaggaactgaggtcttgtttctatccgctcgtttgaaacacaattggaactgctttgtatcctcaagtaatgattaatacacgaaattatgaggttctcaattcactatcatggcaaatacgatcggcccttgcgcattac

SEQ ID NO: 5761 - DNA, 1779 bp, Muscodor strobelii
  misc_feature: SGI cDNA ID NO. 561643
  misc_feature: Encodes the peptide sequence at SEQ ID NO 5762
atgaaggcgcatggtatatgtgctcggttggcattgctatgcttcgcgacgcccttttccgtcgctggcgcgccgagctctaaaatccctcaattccataatgcggcgactcattctggtgctgacccttatgttatgtacgatcatgcgaccggcctgtactatgcatactctaccgagggcgccgacgctggctacaattttgccatttacagcagccctgacttatcgacctggagcaagcaacctggtggtgtattgaaagcctgctatgatgccgacatgaacactcttccaggcggacaggcttgttgggcacgcgattggttctgggcgcctgagacgtattataatgaaaagacggggtggtatttcttcattttcgctggtcgcctgcgcgaagatctgaccgcggacaacttccgatactccaaattcgaggaaccgtctaagcttggcatcgcggtgagcaaatcgcctgccggccctttcaaggagattgagtcaaagccaatcgactattacccgttcgaccctgactactatgatgtcaacctcattatggacgacctgcagatgctgccgccgcggacccttgagaagggcgagactgcgccaaaaggcacatatatcccctacatcgaccccaacattttcttcgatgaggatgatcgtatttacttgtacgcatcacgtaatgcatatcgtaattggaattgggactcagaactcggcaaatacattgaagaatcaaacatcatagttgtcgaacttgagcgagcctggtgggacgaccccacagcgtcaatcatgcccgaaatcattgctagtcagaagaatatacacgccaaggacgcgcctaagataccctgcaacatttcgcactacaatggcaccggcgaaataggcaaacctcctcgcaaggacggatggaagacagtcatttcgtatggcgcggatccgcagtcgtgggagaactaccacgtaaacgattacgagaagttcaatggcactaaaaaggaccgccgatggtctgaagggagcacgctacttcgccgtgccaacaacaagaatggcaaacccgtgtacatgattctgtacagcgcaaacaattacgaggcagctaattacggcgttggtttcgcgacagccgagtctccgctgggtcccttccgaaagtcagcaaataacccggtgcttgtgcaaaagcccgactcggatatccccatctactcaacaggccacggaagcattgttgcgtcaccggcgagcggtgggaaagttggaaatttgcatgtaggagcgcaggaggtcacgcatcatacgcccaaaggcgccgagctgttctacgttcatcacgcgcggaacaacacagagagtgcgcggtcgctttacacgacacgcgtcaatcttgacggaatgtcagtgtatttcggttcagatgatgcaattagcatggagctgacgccgtttgaccaaccacttcccaagaacacatacccgctcacgattgaagcacaatgtacatcaaagacgggcattgaagtcgaagtcacttcggaagtgggtggcgcatttgatctcaccgagagctcgaatagagttgtcgcccttcctgggaatgaaaaggctgcgaagatcgaagaggatgagagcagcgagggtacttttagcttgaccttcggggagggcgtaacagtgaagcaggttgcttaccagcgcgaaggcgtggacgggagctgggcaactattgctacgaaggacgttcattgtacatga

SEQ ID NO: 5762 - protein, 592 aa, Muscodor strobelii
  misc_feature: SGI Peptide ID NO. 561643
  misc_feature (357)..(422): Pfam Id: PF04616 Pfam Desc: Glycosyl hydrolases family 43
  misc_feature (1)..(589): NCBI GI: 46111611 Blast Desc: FG02687.1 [Gibberella zeae PH-1]
  misc_feature (13)..(591): NCBI GI: 56555503 Blast Desc: xylanase 9 [Gibberella zeae]
  misc_feature (32)..(588): NCBI GI: 134101730 Blast Desc: SACE_5226 [Saccharopolyspora erythraea NRRL 2338] gi|133914353|emb|CAM04466.1| [Saccharopolyspora erythraea NRRL 2338]
  misc_feature (32)..(507): NCBI GI: 284035469 Blast Desc: glycoside hydrolase family 43 [Spirosoma linguale DSM 74] gi|283814762|gb|ADB36600.1| glycoside hydrolase family 43 [Spirosoma linguale DSM 74]
  misc_feature (32)..(419): NCBI GI: 270295517 Blast Desc: glycosyl hydrolase family 43 protein [Bacteroides sp. D20] gi|270274764|gb|EFA20625.1| glycosyl hydrolase family 43 protein [Bacteroides sp. D20]
  misc_feature (5)..(472): NCBI GI: 262384484 Blast Desc: glycoside hydrolase family beta-glycosidase [Bacteroides sp. 2_1_33B] gi|262293777|gb|EEY81711.1| glycoside hydrolase family beta-glycosidase [Bacteroides sp. 2_1_33B]
  misc_feature (32)..(419): NCBI GI: 160891346 Blast Desc: BACUNI_03795 [Bacteroides uniformis ATCC 8492] gi|156858753|gb|EDO52184.1| BACUNI_03795 [Bacteroides uniformis ATCC 8492]
  misc_feature (10)..(471): NCBI GI: 282878887 Blast Desc: glycosyl hydrolase, family 43 [Prevotella buccalis ATCC 35310] gi|281298886|gb|EFA91291.1| glycosyl hydrolase, family 43 [Prevotella buccalis ATCC 35310]
  misc_feature (41)..(472): NCBI GI: 154492122 Blast Desc: PARMER_01753 [Parabacteroides merdae ATCC 43184] gi|154087347|gb|EDN86392.1| PARMER_01753 [Parabacteroides merdae ATCC 43184]
  misc_feature (5)..(479): NCBI GI: 150008378 Blast Desc: glycoside hydrolase family beta-glycosidase [Parabacteroides distasonis ATCC 8503] gi|256839331|ref|ZP_05544840.1| glycoside hydrolase family sp.
MKAHGICARLALLCFATPFSVAGAPSSKIPQFHNAATHSGADPYVMYDHATGLYYAYSTEGADAGYNFAIYSSPDLSTWSKQPGGVLKACYDADMNTLPGGQACWARDWFWAPETYYNEKTGWYFFIFAGRLREDLTADNFRYSKFEEPSKLGIAVSKSPAGPFKEIESKPIDYYPFDPDYYDVNLIMDDLQMLPPRTLEKGETAPKGTYIPYIDPNIFFDEDDRIYLYASRNAYRNWNWDSELGKYIEESNIIVVELERAWWDDPTASIMPEIIASQKNIHAKDAPKIPCNISHYNGTGEIGKPPRKDGWKTVISYGADPQSWENYHVNDYEKFNGTKKDRRWSEGSTLLRRANNKNGKPVYMILYSANNYEAANYGVGFATAESPLGPFRKSANNPVLVQKPDSDIPIYSTGHGSIVASPASGGKVGNLHVGAQEVTHHTPKGAELFYVHHARNNTESARSLYTTRVNLDGMSVYFGSDDAISMELTPFDQPLPKNTYPLTIEAQCTSKTGIEVEVTSEVGGAFDLTESSNRVVALPGNEKAAKIEEDESSEGTFSLTFGEGVTVKQVAYQREGVDGSWATIATKDVHCT

SEQ ID NO: 5763 - DNA, 837 bp, Muscodor strobelii
  misc_feature: SGI cDNA ID NO. 561644
  misc_feature: Encodes the peptide sequence at SEQ ID NO 5764
atgaagttttctttcgagttcttaggcaatgagagggacatgatctcctttctaaaattcgcagccaaggtgccagcgaaatacggacacacgggcgacagtgggctggacgcattggccagaaccttgattgtcgacactccagtcgacgtcaatccagtcatggggcttatccactatctcgattccaagattctcgactttcaagaacactttaagcgacttatcaacccgaatgtcttagaaagcatccagtgttatctccatgggaaaatgactatctcgaggcatgatcaaggccctggcgaaaccaaagttctgttgacagagctgaatgacgcgtggatgaagctcaaaacaatctgctctaacaaatcgtggccagatcgtggcacggatccaaagccggaggagactgaagatcttggggacttcttgttgatggcagtcaaaacgagtggctcgaggacactcttcctggcaaaagaagggcagctgagactcggcggcctctggctaggagaaggcgagaatcagacgccgatggtgattgaatgctgcaatgtaccatgcttcttctcttcagctgcagaaagacacaaggcgcaatccgaggaggctcaaaggaagctacgaaagttaatgaagctgcaatcaggagactatgatcgacaggatgagatagatctataccaacgccatcttgagttcctcaaaaaccaaccaagcgcagaagctggctcatgggccttggatggagaagcatacgttcacgggttcatgcatggcgaagcgatggaattgggacgggctttcaagccgatcgcgatcgtctga

SEQ ID NO: 5764 - protein, 278 aa, Muscodor strobelii
  misc_feature: SGI Peptide ID NO. 561644
  misc_feature (156)..(278): NCBI GI: 238492903 Blast Desc: conserved [Aspergillus flavus NRRL3357] gi|220696182|gb|EED52524.1| conserved [Aspergillus flavus NRRL3357]
  misc_feature (156)..(278): NCBI GI: 169780118 Blast Desc: [Aspergillus oryzae RIB40] gi|83773263|dbj|BAE63390.1| protein product [Aspergillus oryzae]
  misc_feature (156)..(278): NCBI GI: 238505832 Blast Desc: conserved [Aspergillus flavus NRRL3357] gi|220690232|gb|EED46582.1| conserved [Aspergillus flavus NRRL3357]
  misc_feature (156)..(278): NCBI GI: 169783150 Blast Desc: [Aspergillus oryzae RIB40] gi|83774781|dbj|BAE64904.1| protein product [Aspergillus oryzae]
MKFSFEFLGNERDMISFLKFAAKVPAKYGHTGDSGLDALARTLIVDTPVDVNPVMGLIHYLDSKILDFQEHFKRLINPNVLESIQCYLHGKMTISRHDQGPGETKVLLTELNDAWMKLKTICSNKSWPDRGTDPKPEETEDLGDFLLMAVKTSGSRTLFLAKEGQLRLGGLWLGEGENQTPMVIECCNVPCFFSSAAERHKAQSEEAQRKLRKLMKLQSGDYDRQDEIDLYQRHLEFLKNQPSAEAGSWALDGEAYVHGFMHGEAMELGRAFKPIAIV

SEQ ID NO: 5765 - DNA, 463 bp, Muscodor strobelii
  misc_feature: SGI EST ID NO. CUFF.14584.0
  misc_feature: Variant of the nucleotide sequence at SEQ ID NO 5763
gggacatgatctcctttctaaaattcgcagccaaggtgccagcgaaatacggacacacgggcgacagtgggctggacgcattggccagaaccttgattgtcgacactccagtcgacgtcaatccagtcatggggcttatccactatctcgattccaagattctcgactttcaagaacactttaagcgacttatcaacccgaatgtcttagaaagcatccagtgttatctccatgggaaaatgactatctcgaggcatgatcaaggccctggcgaaaccaaagttctgttgacagagctgaatgacgcgtggatgaagctcaaaacaatctgctctaacaaatcgtggccagatcgtggcacggatccaaagccggaggagactgaagatcttggggacttcttgttgatggcagtcaaaacgagtggctcgaggacactcttcctggcaaaagaagggcagct

SEQ ID NO: 5766 - DNA, 954 bp, Muscodor strobelii
  misc_feature: SGI cDNA ID NO. 561645
  misc_feature: Encodes the peptide sequence at SEQ ID NO 5767
atggcggaccgcaaccgaatatcagtaatcaacgtgccatcagacattggctccatgataaagggcaagcatctagcacctgcagcatttgagtcaacgggcttcgcacaaaaacttcagcaagtgggatacgaagtgacaaccatcaatgcactcccaaatggtcctcaaatttggagttcggactcaacattcgagccgaacggtgctcgaaacgagactgcaaacgtgcaggtcaatcacgatgtgaagaaggccgtcagcgatgccatcacggaaagacaagaagcaccgctccttgcggtcgttggaggagaatgcaacatggtcccagcaattatgtccgcgctgtgggataagctcaatccgaaacgagtcggcgttatatatgttgatgcagacgctgacctcacagtgccgggcgagcctggctcttcggggaatattggtagcatgacattcacacatctgaccatgcgcgaaggtgcacttcagagcatgcaaccatttacccgccccaatggtcagggagtgtgcgatcctagcaataccgttctgtttggattgaactcggctgctcaaagcaacacacggcctcaacttgcgtatttgttcgatgagggatatcgcgttttcacatccacagccgtatcgcgagatcctgttggtagagccacacaagcactggcttggcttgagcagcgcgtcgattatatccttgtgcacttggatgtcgatgctattgatgggacattgttcccacttgcaaacctaccaaatcgaacaggagcggatttcgaagcagtcatgagtgcagtcgacgtatttctagctagtaaaaagatcggctgtatcagtattgcagaagtcaacccggatcatgaccctggactcaaaatgacaaaaaagcttgtcgacaagctgtcatctgcgctgacccgcagacatatgtag

SEQ ID NO: 5767 - protein, 317 aa, Muscodor strobelii
  misc_feature: SGI Peptide ID NO. 561645
  misc_feature (3)..(317): Pfam Id: PF00491 Pfam Desc: Arginase family
  misc_feature (1)..(316): NCBI GI: 256725914 Blast Desc: NECHADRAFT_43890 [Nectria haematococca mpVI 77-13-4]
  misc_feature (1)..(315): NCBI GI: 46117214 Blast Desc: FG04449.1 [Gibberella zeae PH-1]
  misc_feature (7)..(292): NCBI GI: 239825734 Blast Desc: arginase [Geobacillus sp. WCH70] gi|239806027|gb|ACS23092.1| arginase [Geobacillus sp. WCH70]
  misc_feature (5)..(292): NCBI GI: 255332444 Blast Desc: arginase [Geobacillus sp. Y4.1MC1] gi|255276876|gb|EET69872.1| arginase [Geobacillus sp. Y4.1MC1]
  misc_feature (1)..(292): NCBI GI: 194017642 Blast Desc: arginase [Bacillus pumilus ATCC 7061] gi|194010914|gb|EDW20485.1| arginase [Bacillus pumilus ATCC 7061]
  misc_feature (3)..(315): NCBI GI: 15615546 Blast Desc: arginase [Bacillus halodurans C-125] gi|10175606|dbj|BAB06703.1| arginase [Bacillus halodurans C-125]
  misc_feature (7)..(292): NCBI GI: 1703387 Blast Desc: arginase [Bacillus halodurans C-125] gi|10175606|dbj|BAB06703.1| arginase [Bacillus halodurans C-125]
  misc_feature (7)..(292): NCBI GI: 229500673 Blast Desc: arginase [Geobacillus sp. Y412MC52] gi|261417649|ref|YP_003251331.1| arginase [Geobacillus sp. Y412MC61] gi|229328433|gb|EEN94017.1| arginase [Geobacillus sp.
  misc_feature (7)..(292): NCBI GI: 56418684 Blast Desc: arginase [Geobacillus kaustophilus HTA426] gi|56378526|dbj|BAD74434.1| arginase [Geobacillus kaustophilus HTA426]
  misc_feature (1)..(315): NCBI GI: 157690956 Blast Desc: arginase [Bacillus pumilus SAFR-032] gi|157679714|gb|ABV60858.1| arginase [Bacillus pumilus SAFR-032]
  misc_feature (7)..(292): SWISSPROT Homolog: EC 3.5.3.1 Arginase
MADRNRISVINVPSDIGSMIKGKHLAPAAFESTGFAQKLQQVGYEVTTINALPNGPQIWSSDSTFEPNGARNETANVQVNHDVKKAVSDAITERQEAPLLAVVGGECNMVPAIMSALWDKLNPKRVGVIYVDADADLTVPGEPGSSGNIGSMTFTHLTMREGALQSMQPFTRPNGQGVCDPSNTVLFGLNSAAQSNTRPQLAYLFDEGYRVFTSTAVSRDPVGRATQALAWLEQRVDYILVHLDVDAIDGTLFPLANLPNRTGADFEAVMSAVDVFLASKKIGCISIAEVNPDHDPGLKMTKKLVDKLSSALTRRHM

SEQ ID NO: 5768 - DNA, 1339 bp, Muscodor strobelii
  misc_feature: SGI EST ID NO. CUFF.14587.0
  misc_feature: Variant of the nucleotide sequence at SEQ ID NO 5766
gttggactgaacattataaaacgactcatgcgtgtccgaaatgatattgtaggatggaatatgtgagaccagaagatttgccgactctagttacacataaaacgagccggtcgcccacaagacccccaaggatggcggaccgcaaccgaatatcagtaatcaacgtgccatcagacattggctccatgataaagggcaagcatctagcacctgcagcatttgagtcaacgggcttcgcacaaaaacttcagcaagtgggatacgaagtgacaaccatcaatgcactcccaaatggtcctcaaatttggagttcggactcaacattcgagccgaacggtgctcgaaacgagactgcaaacgtgcaggtcaatcacgatgtgaagaaggccgtcagcgatgccatcacggaaagacaagaagcaccgctccttgcggtcgttggaggagaatgcaacatggtcccagcaattatgtccgcgctgtgggataagctcaatccgaaacgagtcggcgttatatatgttgatgcagacgctgacctcacagtgccgggcgagcctggctcttcggggaatattggtagcatgacattcacacatctgaccatgcgcgaaggtgcacttcagagcatgcaaccatttacccgccccaatggtcagggagtgtgcgatcctagcaataccgttctgtttggattgaactcggctgctcaaagcaacacacggcctcaacttgcgtatttgttcgatgagggatatcgcgttttcacatccacagccgtatcgcgagatcctgttggtagagccacacaagcactggcttggcttgagcagcgcgtcgattatatccttgtgcacttggatgtcgatgctattgatgggacattgttcccacttgcaaacctaccaaatcgaacaggagcggatttcgaagcagtcatgagtgcagtcgacgtatttctagctagtaaaaagatcggctgtatcagtattgcagaagtcaacccggatcatgaccctggactcaaaatgacaaaaaagcttgtcgacaagctgtcatctgcgctgacccgcagacatatgtagcgtcgaaaaattgtcgctactcagacgatcgcgatcggcttgaaagcccgtcccaattccatcgcttcgccatgcatgaacccgtgaacgtatgcttctccatccaaggcccatgagccagcttctgcgcttggttggtttttgaggaactcaagatggcgttggtatagatctatctcatcctgtcgatcatagtctcctgattgcagcttcattaactttcgtagcttcctttgagcctcctcggattgcgc

SEQ ID NO: 5769 - DNA, 1701 bp, Muscodor strobelii
  misc_feature: SGI cDNA ID NO. 561646
  misc_feature: Encodes the peptide sequence at SEQ ID NO 5770
atggcaaactcttcgattgcattagctgaaaacaaccatctttttacaagtaacaatgcatttgaattgacccctcttaatccgaacaatgagatcgagcccggcgatcccgaaaccacttctgtcgaagaatggaagccctcaaagcacgagaaggcgatcttctgcactcttgcgctgttaaatctcgttgttgcacttgacgctaccgtcatcgtcacttcactgaatgccatcgttcaggagattggtggcacaaccacggcagccttctggatcgggacctcgtacctcctctcaaatgctgtttctatgccgttgtattgctccatcagcgatgtcatcggtcgcccgatatgccttgaagtttcgattattctcttcacggttggaactattatatgtagcacatcaatgggcatcgcatcaatgctggttggacgtgtgattcaaggcataggaggcggtggtattcattcgttaggtcttgtcattctgactgacatcgtgccgttgagatggaggccaaagtggtacggtatcattcttgctgcatgggctatcgggctttcgttaggacctgttctcggtggcgttatcgccgcgagaaccacttggcgatggatcttctacgagatgttctttggccctggcttgttccttgctccatacttgttgaccctgcgaccgaaagaagccacaacccgagagaagttcaatcgcattgactgggtcggtctttccgggttcactctttctgtgacattgttcttgatcgccatctcgtgggccggcacacagtacgcgtggaacagtgcggctgttttggtccccttgatacttggggttctagggactattgccgatgtgttctacgagaacaaattcgcaaagcatccgtttcttaacaaggatctcttccgcgacaccagctctgtaattgcctatgctgcggcgacgctacaaggatttttgctctacggtactctttactacgttcctctcttcttcgtatccgttaaaaatttcagcattataaactcaggcgtggctctgctgcccaatcttcttccctttgcaattgctggtattgtgacgggccgtcttgtcacccgattcaatagctttcgatgggctatctggtcaggatggtttttcagtgcagtcggcatggcattctatacctcgtggcacgtaaacaacagtacgccagtctgggttattggactatttatcggtggggcaagtaatggcgccatccttaccgcgcagaattttgctacgcaggctatgtgtaaagacggatccgagggcgccgcagctgcaatgtacatcttctttcgacaatgtggcattgccctcggcgttgggattggtgccacgatttttcagaacgctttgaatttgaagcttatatgggccgggcttccagcagacatagccgctgatatcgcgtaccaggccaacacatatatcgaagtgttgcatagcctcccagcgggccccgaaaagcgtgcaatcacaaatgcttacagcttcggctgtcaggtcgttttcgcaacctggctagcgatatctgttgttacactggtgctctgcctaatctctatcagacacgcggatatgaaccgcaagctggccagcgagcaccacctggacagcgaacgcgtgaacagacattggaataagaagcgatcgtaa

SEQ ID NO: 5770 - protein, 566 aa, Muscodor strobelii
  misc_feature: SGI Peptide ID NO. 561646
  misc_feature (58)..(456): Pfam Id: PF07690 Pfam Desc: Major Facilitator Superfamily
  misc_feature (58)..(211): Pfam Id: PF07690 Pfam Desc: Major Facilitator Superfamily
  misc_feature (248)..(456): Pfam Id: PF07690 Pfam Desc: Major Facilitator Superfamily
  misc_feature (38)..(556): NCBI GI: 212539462 Blast Desc: conserved [Penicillium marneffei ATCC 18224] gi|210067185|gb|EEA21277.1| conserved [Penicillium marneffei ATCC 18224]
  misc_feature (44)..(549): NCBI GI: 225558258 Blast Desc: conserved [Ajellomyces capsulatus G186AR]
  misc_feature (6)..(559): NCBI GI: 67525613 Blast Desc: AN3264.2 [Aspergillus nidulans FGSC A4] gi|40743983|gb|EAA63165.1| AN3264.2 [Aspergillus nidulans FGSC A4] gi|259485769|tpe|CBF83072.1| TPA: MFS multidrug transporter,
  misc_feature (21)..(555): NCBI GI: 242804434 Blast Desc: efflux pump antibiotic resistance protein, [Talaromyces stipitatus ATCC 10500] gi|218717719|gb|EED17140.1| efflux pump antibiotic resistance protein, [Talaromyces ATCC
  misc_feature (41)..(557): NCBI GI: 164425733 Blast Desc: NCU10910 [Neurospora crassa OR74A] gi|157071040|gb|EDO65171.1| [Neurospora crassa OR74A]
  misc_feature (11)..(556): NCBI GI: 212538817 Blast Desc: MFS multidrug transporter, [Penicillium marneffei ATCC 18224] gi|210069306|gb|EEA23397.1| MFS multidrug transporter, [Penicillium marneffei ATCC 18224]
  misc_feature (2)..(556): NCBI GI: 242820296 Blast Desc: MFS multidrug transporter, [Talaromyces stipitatus ATCC 10500] gi|218713948|gb|EED13372.1| MFS multidrug transporter, [Talaromyces stipitatus ATCC 10500]
  misc_feature (8)..(556): NCBI GI: 119467438 Blast Desc: MFS transporter, [Neosartorya fischeri NRRL 181] gi|119405677|gb|EAW15628.1| MFS transporter, [Neosartorya fischeri NRRL 181]
  misc_feature (44)..(566): NCBI GI: 171679820 Blast Desc: protein product [Podospora anserina] gi|170939536|emb|CAP64763.1| protein product [Podospora anserina]
  misc_feature (8)..(556): NCBI GI: 70984475 Blast Desc: MFS multidrug transporter [Aspergillus fumigatus Af293] gi|66845371|gb|EAL85706.1| MFS multidrug transporter, [Aspergillus fumigatus Af293] gi|159122527|gb|EDP47648.1| MFS
MANSSIALAENNHLFTSNNAFELTPLNPNNEIEPGDPETTSVEEWKPSKHEKAIFCTLALLNLVVALDATVIVTSLNAIVQEIGGTTTAAFWIGTSYLLSNAVSMPLYCSISDVIGRPICLEVSIILFTVGTIICSTSMGIASMLVGRVIQGIGGGGIHSLGLVILTDIVPLRWRPKWYGIILAAWAIGLSLGPVLGGVIAARTTWRWIFYEMFFGPGLFLAPYLLTLRPKEATTREKFNRIDWVGLSGFTLSVTLFLIAISWAGTQYAWNSAAVLVPLILGVLGTIADVFYENKFAKHPFLNKDLFRDTSSVIAYAAATLQGFLLYGTLYYVPLFFVSVKNFSIINSGVALLPNLLPFAIAGIVTGRLVTRFNSFRWAIWSGWFFSAVGMAFYTSWHVNNSTPVWVIGLFIGGASNGAILTAQNFATQAMCKDGSEGAAAAMYIFFRQCGIALGVGIGATIFQNALNLKLIWAGLPADIAADIAYQANTYIEVLHSLPAGPEKRAITNAYSFGCQVVFATWLAISVVTLVLCLISIRHADMNRKLASEHHLDSERVNRHWNKKRS

SEQ ID NO: 5771 - DNA, 1583 bp, Muscodor strobelii
  misc_feature: SGI EST ID NO. CUFF.14594.0
  misc_feature: Variant of the nucleotide sequence at SEQ ID NO 5769
acttgttgaccctgcgaccgaaagaagccacaacccgagagaagttcaatcgcattgactgggtcggtctttccgggttcactctttctgtgacattgttcttgatcgccatctcgtgggccggcacacagtacgcgtggaacagtgcggctgttttggtccccttgatacttggggttctagggactattgccgatgtgttctacgagaacaaattcgcaaagcatccgtttcttaacaaggatctcttccgcgacaccagctctgtaattgcctatgctgcggcgacgctacaaggatttttgctctacggtactctttactacgttcctctcttcttcgtatccgttaaaaatttcagcattataaactcaggcgtggctctgctgcccaatcttcttccctttgcaattgctggtattgtgacgggccgtcttgtcacccgattcaatagctttcgatgggctatctggtcaggatggtttttcagtgcagtcggcatggcattctatacctcgtggcacgtaaacaacagtacgccagtctgggttattggactatttatcggtggggcaagtaatggcgccatccttaccgcgcagaattttgctacgcaggctatgtgtaaagacggatccgagggcgccgcagctgcaatgtacatcttctttcgacaatgtggcattgccctcggcgttgggattggtgccacgatttttcagaacgctttgaatttgaagcttatatgggccgggcttccagcagacatagccgctgatatcgcgtaccaggccaacacatatatcgaagtgttgcatagcctcccagcgggccccgaaaagcgtgcaatcacaaatgcttacagcttcggctgtcaggtcgttttcgcaacctggctagcgatatctgttgttacactggtgctctgcctaatctctatcagacacgcggatatgaaccgcaagctggccagcgagcaccacctggacagcgaacgcgtgaacagacattggaataagaagcgatcgtaagagtggaggtctcatcccaaagacagctctctgcgatagaagagatgttagtcatcattatcgcgctgagtccttgtcgagacgcgtcttctggcacgatcgcattagcagcatatcagatattcatccccttcatgttgtcaggaaattcaattcgctttcgaacttcatagggtgtacttgacttcacttaacgctactttcgagaatgtctggattttatgatgattcgcttgtccactatcgaggatattcagcgagcttcagtagattgcaaagctttcaagtgaattcccattagtatgccgatgacaatattcaataaaacaaatacccaatcgatacgctcatatcacgttgagacatgacttgtgaggctttgatcgtttggcgttgcgcgttagggtgtttttttgtttatcattgacagatgcttaaggccctagctgggaatctctggttgaggtgtgcgcgaaatcaaagcacggcgtcgccagagaggttgatgaactgcaccatcgccaatcgacctgcctacaacgcagatggtat

SEQ ID NO: 5772 - DNA, 558 bp, Muscodor strobelii
  misc_feature: SGI cDNA ID NO. 561647
  misc_feature: Encodes the peptide sequence at SEQ ID NO 5773
atgcaaaccttaaaagctctagtctcacaagccctcctaggtgaagttttcagcgatggagcttatcttgagccagactcagcgcctaaacgtctggagacagacacccgacgaatgtttctatcgatcctccgaccaccaaccgctcagggaaacccagaagtagaaaagggcagggacaaatacattccactcgaacaaccctacaccgatgggttttcatcaaaagacaatggcaacagaacacatcatttcgttgttccaagcatctcacctccatcgtctgtgaatacgacgaatgtcagctcacagaaaacaagtggcttctcgtgggccccaggcagcgggagcttcgaaacttctggcaagcgaccttttgacgatgccttcaatgcttggaaagacgagcgccacaaggctgttgtcgaaagactagagaatgagaagctgcagtacttgaacactcgttgcctgccggccttgaagaacatgtcgcaagaagagctgaaaccattagggtcaaaagctcggttgtattcaccaaccctgaagaaatag

SEQ ID NO: 5773 - protein, 185 aa, Muscodor strobelii
  misc_feature: SGI Peptide ID NO. 561647
MQTLKALVSQALLGEVFSDGAYLEPDSAPKRLETDTRRMFLSILRPPTAQGNPEVEKGRDKYIPLEQPYTDGFSSKDNGNRTHHFVVPSISPPSSVNTTNVSSQKTSGFSWAPGSGSFETSGKRPFDDAFNAWKDERHKAVVERLENEKLQYLNTRCLPALKNMSQEELKPLGSKARLYSPTLKK

SEQ ID NO: 5774 - DNA, 2188 bp, Muscodor strobelii
  misc_feature: SGI EST ID NO. CUFF.14751.1
  misc_feature: Variant of the nucleotide sequence at SEQ ID NO 5772
aaacagcgcacatccggaaaggtaaggtagtgcgatgcagagcaagggttcaagccaaatttaccgttctcatgaggcctggagtcaactgtctattcgggtcaccaagtgcctcatttggggatttcctctgcggtttacctacacatactggttgcagccctacgaggtgtcagcacgttcgctgttctccaagattgagtgcatgcgctaatctccatcaccagctgtcgctccgctcctttacagacaacgtgaccattcttgcagttgagagccgcctcatggaagaactgtcaagcaattcaacaacgaacagattatcaacgagtggggcatagcgaggttgaagcacttgcagctgagtccttcgatttgcaagtagagagaagtagactacaggctggacggagggcttcgaaggacgcattgagtgtgtgtaggaaatgcaaaccttaaaagctctagtctcacaagccctcctaggtgaagttttcagcgatggagcttatcttgagccagactcagcgcctaaacgtctggagacagacacccgacgaatgtttctatcgatcctccgaccaccaaccgctcagggaaacccagaagtagaaaaggttcgaagttaatcagtatttgaaactcctcgcacgaaattaagcttgaatcaagacactagcaacggcctagggcagggacaaatacattccactcgaacaaccctgtgagtgggtctcacgggatactcagcttgcgagaaacacatatagccagtttttggagcagtgatagacttgagaacgtcccgactactctcaagtcacctttgagaaacgatgcgtagtttgatagcctgactacgaacatcacggtttcgataggctaattaaacgacaagatatcagacaccgatgggttttcatcaaaagacaatggcaacagaacacatcatttcgttgttccaagcatctcacctccatcgtctgtgaatacgacgaatgtcagctcacagaaaacaagtggcttctcgtgggccccaggcagcgggagcttcgaaacttctggcaagcgaccttttgacgatgccttcaatgcttggaaagacgagcgccacaaggctgttgtcgaaagactagagaatgagaagctgcagtacttgaacactcgttgcctgccggccttgaagaacatgtcgcaagaagagctgaaaccattagggtcaaaagctcggttgtattcaccaaccctgaagaaataggacctcttttatcctcgttatggtcaagacaatgaagatcctatatgcagtgtagaatggcagcacattggtatgctgccccagttcagttgtacttccttggacgagtcaagattggcggattcaacctgttatttactgcctacagccgagtatcccgaggctgataagatggcgacaaacacgatgactggtctctaagggcgtacttgggcagatggaagatcagccttcgagtctctttttggcgtcgagggatatcatatatcggaggtctgcaagatttcctgtattgggaaactttgacggtgcagaaatgacgacgcgatgatgtgtggaggctgctgttcgatgtagatgtgtactaggtttagagagttgttgtgtgctcgtcgttctccgtatcctttggcaggtgtgaccttccgacaaggacatgtagctaagtgaaaatactcagacaagcgtgacctgttctcctcgtcgtcccggcttgcaaaggaggcgaggcatcgatacacatttgagatgtgttttgggaaaggacccgcgcctcaaagtagagactattccgacacatacttatcgatgtatgacgcgaggggagaagaatcagaatttcatgaaatgctctatttcctttcatgccaacatatgagagcatgcattcgtcgcgctaatactgcaggagttagtattctttgcccgtgttgagaaagtactgaatggagttactttctgcaaggaaaggagttacagccaggaaccaagctagaccggagtatctgtgttggcgcactctctagcgctcaactattttgagatgtctcaggttccaagctaccaccgcaccatctcgacatctccatctcccatcatgcgacgatgctagtcgcgaagcgcacgagatcatacggagctgcatgcttg

SEQ ID NO: 5775 - DNA, 684 bp, Muscodor strobelii
  misc_feature: SGI cDNA ID NO. 561648
  misc_feature: Elevated expression when VOC is produced
  misc_feature: Encodes the peptide sequence at SEQ ID NO 5776
atgcagaaatctattctattcttcctcggcgccctcgcctctaccgttgctgctgctcctcagtacactgccagcagcctccttttcgccaggactggagagtgctccagcgcagctcaatgtcccgctggatactgttgctctcaatggggctactgcggtaccggctctgattactgtggcagtggtggcagtggcagtggtggaagcggtggtggtggcagcggaagcggaagcttcccgggtctcgacgctacccagtcgaataatgccgcggcggccattgcagacttttctggctaccaggaagttcgcgctgagggactcaaccgacaggcttgtcttgccgtcatcagcacggcccttcaggagtctactttgcacatctatgccaacaacgctgttcctgcgtctttgaactacccccatgatctcgtaggcggagaccaagatagcattggcatgttccagcagcgacctgagtggtacccagacattgcagcagacatgtctgcagcaggcagcacccgacagttcctggcagtcatggttacaatcagcggatggcaaaccatggaaatttcagccctcgaccaagctgtgcaaaaggctgaggctggaaatctttatgctcaacgcattcctcttgctacccaagtctgcgatgctgctggaggctggtaa

SEQ ID NO: 5776 - protein, 227 aa, Muscodor strobelii
  misc_feature: SGI Peptide ID NO. 561648
  misc_feature (30)..(68): Pfam Id: PF00187 Pfam Desc: Chitin recognition protein
  misc_feature (80)..(226): NCBI GI: 119485813 Blast Desc: NFIA_099880 [Neosartorya fischeri NRRL 181] gi|119410405|gb|EAW20352.1| conserved [Neosartorya fischeri NRRL 181]
  misc_feature (79)..(226): NCBI GI: 70983965 Blast Desc: conserved [Aspergillus fumigatus Af293] gi|66845134|gb|EAL85470.1| conserved [Aspergillus fumigatus Af293] gi|159123514|gb|EDP48633.1| conserved [Aspergillus A1163]
  misc_feature (79)..(226): NCBI GI: 255931785 Blast Desc: Pc12g06060 [Penicillium chrysogenum Wisconsin 54-1255] gi|211582068|emb|CAP80233.1| Pc12g06060 [Penicillium chrysogenum Wisconsin 54-1255]
  misc_feature (79)..(226): NCBI GI: 121720174 Blast Desc: conserved [Aspergillus clavatus NRRL 1] gi|119404997|gb|EAW15359.1| conserved [Aspergillus clavatus NRRL 1]
  misc_feature (82)..(212): NCBI GI: 270500039 Blast Desc: MicauDRAFT_1968 [Micromonospora aurantiaca ATCC 27029] gi|270323125|gb|EFA34043.1| MicauDRAFT_1968 [Micromonospora aurantiaca ATCC 27029]
  misc_feature (82)..(223): NCBI GI: 159037872 Blast Desc: Sare_2275 [Salinispora arenicola CNS-205] gi|157916707|gb|ABV98134.1| conserved [Salinispora arenicola CNS-205]
  misc_feature (82)..(223): NCBI GI: 145594660 Blast Desc: Strop_2128 [Salinispora tropica CNB-440] gi|145303997|gb|ABP54579.1| Strop_2128 [Salinispora tropica CNB-440]
  misc_feature (118)..(226): NCBI GI: 270500612 Blast Desc: Peptidase M23 [Micromonospora aurantiaca ATCC 27029] gi|270322638|gb|EFA33561.1| Peptidase M23 [Micromonospora aurantiaca ATCC 27029]
  misc_feature (105)..(223): NCBI GI: 238063780 Blast Desc: peptidase M23B [Micromonospora sp. ATCC 39149] gi|237885591|gb|EEP74419.1| peptidase M23B [Micromonospora sp. ATCC 39149]
  misc_feature (109)..(223): NCBI GI: 29566640 Blast Desc: gp133 [Mycobacterium phage Bxz1] gi|109393342|ref|YP_656140.1| gp132 [Mycobacterium phage Catera] gi|203457478|ref|YP_002224824.1| gp131 [Mycobacterium phage gp132
  misc_feature: Useful for introducing or modulating the production of volatile compounds
MQKSILFFLGALASTVAAAPQYTASSLLFARTGECSSAAQCPAGYCCSQWGYCGTGSDYCGSGGSGSGGSGGGGSGSGSFPGLDATQSNNAAAAIADFSGYQEVRAEGLNRQACLAVISTALQESTLHIYANNAVPASLNYPHDLVGGDQDSIGMFQQRPEWYPDIAADMSAAGSTRQFLAVMVTISGWQTMEISALDQAVQKAEAGNLYAQRIPLATQVCDAAGGW

SEQ ID NO: 5777 - DNA, 664 bp, Muscodor strobelii
  misc_feature: SGI EST ID NO. CUFF.14612.0
  misc_feature: Variant of the nucleotide sequence at SEQ ID NO 5775
aagttcgcgctgagggactcaaccgacaggcttgtcttgccgtcatcagcacggcccttcaggagtctactttgcacatctatgccaacaacgctgttcctgcgtctttgaactacccccatgatctcgtaggcggagaccaagatagcattggcatgttccagcagcgacctgagtggtacccagacattgcagcagacatgtctgcagcaggcagcacccgacagttcctggcagtcatggttacaatcagcggatggcaaaccatggaaatttcagccctcgaccaagctgtgcaaaaggctgaggctggaaatctttatgctcaacgcattcctcttgctacccaagtctgcgatgctgctggaggctggtaagctttcctacgcctgccgattggcgcagcaggcttgtatagcaatttgtgctttttacatgatctggatatcttgctggcttaaagcgctttctcttctttgtttattttaaccgtttatctgcatatttttccaattcttgactttataatcttctggtatatatcttatgttaaagcccatgcctgctttatttcgtcttactattcatgtatatacttctctggccttcttgtatatatcatatgtgatagcaagagtatatattatatatctgccgattcgac

SEQ ID NO: 5778 - DNA, 240 bp, Muscodor strobelii
  misc_feature: SGI cDNA ID NO. 561649
  misc_feature: Encodes the peptide sequence at SEQ ID NO 5779
atggttgcgtacgagtctcacgacttcaagttattttgcaaagcatgggccaagaatatcagatctggcgacgatgccgagcgttcaattttgagcgtcatcgaagcatttgttctttcggggcaaatacgtatccttgagctgttcaatggcctcatgagcggaagcatcttggatcaaatcctcagcagaatagaagcctggaaggttcggaagggtcaagcggggaacgtcggatga

SEQ ID NO: 5779 - protein, 79 aa, Muscodor strobelii
  misc_feature: SGI Peptide ID NO. 561649
MVAYESHDFKLFCKAWAKNIRSGDDAERSILSVIEAFVLSGQIRILELFNGLMSGSILDQILSRIEAWKVRKGQAGNVG

SEQ ID NO: 5780 - DNA, 1005 bp, Muscodor strobelii
  misc_feature: SGI cDNA ID NO. 561650
  misc_feature: Encodes the peptide sequence at SEQ ID NO 5781
atgggaagtgttcttaacgctggtgttcataggttccctggccgactatcgtatctcattatagtgcttttgtttcgttggggttataatctaccgaacggagtcgcaaagccattgatcgaggagaatgtgcgcgctttcttacaacttgtcgggacgcagagaaagcaagctcagaacatctttcagaggctttattggtatagtttagactcgataacggccttcttgtatggtaaggattacggagggcccagggcattaaacggccaccaagcgagtagagatcttcttttggacatattcgaccgccggcagcgaattctgacgtggtccacagtccatttcccgggctacactgcatggctgtacgcacaaaccggcgtggccgagaaaatcttacagacactaggcctgtacccaatgcctaaaccagcgacttatactgcgatcatacaacatgctctcgaagcttggattaggtacgatgaggctgtaacacggagtgatgtcttggagaaggaagactccattgtccaaaaactccgaaagtaccaaatgaacggcaaaggtcagcaattggacggtcttgactgtgcctctgaagcctccgatcacttccttgccggtatcgacaccacgagcgatgccacaatgttcctgatttggcaactgtctcgtcccgagaacgcgggatatcaacaacatctgatcaacgaagtgagcgcaatatcggaaagttgtctcaataaaaatggcattccgactattgaagcagcggatcaattaccatatctcgacgcattaatcaaggagacgtggcgcttacatgcgccgattccctcttccgagcctcggtcatcgccagttgacagtgttatcgatggatacaaagtcccagcgagtacagcagtgagcatgactccttacaccttgcaccggaacggcgaagtattccccgatccactggccttcagacgtgagcgctggcttggcgagctgtga

SEQ ID NO: 5781 - protein, 334 aa, Muscodor strobelii
  misc_feature: SGI Peptide ID NO. 561650
  misc_feature (255)..(333): Pfam Id: PF00067 Pfam Desc: Cytochrome P450
  misc_feature (32)..(332): NCBI GI: 242786770 Blast Desc: benzoate 4-monooxygenase cytochrome P450, [Talaromyces stipitatus ATCC 10500] gi|218721017|gb|EED20436.1| benzoate 4-monooxygenase cytochrome P450, [Talaromyces stipitatus ATCC
  misc_feature (32)..(333): NCBI GI: 212543469 Blast Desc: benzoate 4-monooxygenase cytochrome P450, [Penicillium marneffei ATCC 18224] gi|210066796|gb|EEA20889.1| benzoate 4-monooxygenase cytochrome P450, [Penicillium marneffei ATCC
  misc_feature (35)..(334): NCBI GI: 145609157 Blast Desc: MGG_07406 [Magnaporthe grisea 70-15] gi|145016575|gb|EDK01005.1| MGG_07406 [Magnaporthe grisea 70-15]
  misc_feature (33)..(331): NCBI GI: 238490988 Blast Desc: cytochrome P450, [Aspergillus flavus NRRL3357] gi|220697144|gb|EED53485.1| cytochrome P450, [Aspergillus flavus NRRL3357]
  misc_feature (33)..(331): NCBI GI: 169773057 Blast Desc: [Aspergillus oryzae RIB40] gi|83768858|dbj|BAE58995.1| protein product [Aspergillus oryzae]
  misc_feature (33)..(331): NCBI GI: 255953901 Blast Desc: Pc21g06580 [Penicillium chrysogenum Wisconsin 54-1255] gi|211589414|emb|CAP95555.1| Pc21g06580 [Penicillium chrysogenum Wisconsin 54-1255]
  misc_feature (39)..(332): NCBI GI: 115386916 Blast Desc: conserved [Aspergillus terreus NIH2624] gi|114190997|gb|EAU32697.1| conserved [Aspergillus terreus NIH2624]
  misc_feature (39)..(332): NCBI GI: 256723658 Blast Desc: NECHADRAFT_52286 [Nectria haematococca mpVI 77-13-4]
  misc_feature (33)..(333): NCBI GI: 46126553 Blast Desc: FG07654.1 [Gibberella zeae PH-1]
  misc_feature (33)..(333): NCBI GI: 169595494 Blast Desc: SNOG_00486 [Phaeosphaeria nodorum SN15] gi|160701104|gb|EAT91981.2| SNOG_00486 [Phaeosphaeria nodorum SN15]
  misc_feature (50)..(330): SWISSPROT Homolog: EC 1.14.14.1 Unspecific monooxygenase
MGSVLNAGVHRFPGRLSYLIIVLLFRWGYNLPNGVAKPLIEENVRAFLQLVGTQRKQAQNIFQRLYWYSLDSITAFLYGKDYGGPRALNGHQASRDLLLDIFDRRQRILTWSTVHFPGYTAWLYAQTGVAEKILQTLGLYPMPKPATYTAIIQHALEAWIRYDEAVTRSDVLEKEDSIVQKLRKYQMNGKGQQLDGLDCASEASDHFLAGIDTTSDATMFLIWQLSRPENAGYQQHLINEVSAISESCLNKNGIPTIEAADQLPYLDALIKETWRLHAPIPSSEPRSSPVDSVIDGYKVPASTAVSMTPYTLHRNGEVFPDPLAFRRERWLGEL

SEQ ID NO: 5782 - DNA, 675 bp, Muscodor strobelii
  misc_feature: SGI cDNA ID NO. 561651
  misc_feature: Encodes the peptide sequence at SEQ ID NO 5783
atgacgaccattgtaaacatcgatatggagatgactggtgcagaaatttccaacacaggggtcaccactgctgtccgtgacgagctcggagttctgattgagggaaaccgggagcgtggtgataaaggtcaagcaggacgacatgatggtattgaagctcgccataagaacgagcacggcgaaggacgtggaagagttcgtgcggacagcgatcatggccacttgatgatcaagatccgaggccgagatcacggagacaaggacggtcatcaccgtcataatgatgaccaccacaatcgtatcgcaaggagtggtagagaggatcgagaagatcatcgaaacgaccacggaaataggggagagagtggaaacggcgatgatcggcatgagggtagtcgcgactctcgccatcaggctcggggtcgtggaggaaacggtgatacaaagagtccccaagagcgacgccacgatcatcacggagaccatcatgataatcaccataagcgcaactcgcaccggggcgtgagcgatcgagacgggagccgagatgggcgtagaggccatggcggcgaacggaatggtaacaacagagaaatgagtgatcatggatttggctacggcagcgatggcagaaatcgcagcaggaaagatgacgacaacgaatttgaagagtga

SEQ ID NO: 5783 - protein, 224 aa, Muscodor strobelii
  misc_feature: SGI Peptide ID NO. 561651
MTTIVNIDMEMTGAEISNTGVTTAVRDELGVLIEGNRERGDKGQAGRHDGIEARHKNEHGEGRGRVRADSDHGHLMIKIRGRDHGDKDGHHRHNDDHHNRIARSGREDREDHRNDHGNRGESGNGDDRHEGSRDSRHQARGRGGNGDTKSPQERRHDHHGDHHDNHHKRNSHRGVSDRDGSRDGRRGHGGERNGNNREMSDHGFGYGSDGRNRSRKDDDNEFEE

SEQ ID NO: 5784 - DNA, 1269 bp, Muscodor strobelii
  misc_feature: SGI cDNA ID NO. 561652
  misc_feature: Encodes the peptide sequence at SEQ ID NO 5785
atggccaacgcaaattccgaaagattcggcgaagccgacccccaaattgcagagctggccggcaagcaatgggcggaagccggacttccgctggatccccagcgctggacagcgatacatcgtcagtggactactgcatgcgtccaggtagatcaaccaggcgccttaatagttatgacaacatcgcagtgctctgagctcggtgctgaaatgctcggacaaagtggcccaggccacacttacttcattgagcagtacagaaagatgactcagcacccacacctcaacatcgacttttggctcgacggtagagtcgataattatgggagggtgtaccttggtcccttaagctccgtagaggagcgtgttatgggaaacgctgcctacatcagcaacaacctcggattggttgttatcaaaccaaatattgacttccgatcggatgaagagatcacgaatgatcttaacaacttgattcccatgccgggaacgcccaccatcttccctggttcaccgggagctttgctcaacactgtcactcacggagatgtggcccacgaagacgacgccgaaatggctgacacttattctctgagcgatcagactgaagatggggacgaaacctacgagcaggatagtattggagacccgggtaatgctctgcagaatcatgtcgctcttcaaaatcacgttgctcctcagaactatggtgctcttcagaactatagtactcatcaaaattatgtcgatcctcaacatggtgctcctcagaaccccggtgctcctcagggtgctcctcagggtgctcctcagaactacagtgttactcagaactatggtgttcttcagaaccatgtcgctcctcaacatggtgctcctcagatcactcctcagaaccaagtttccttcgcgaagattccaatgccacggaactcgtggcttctctaccgtagctatatgcagaggttttaccgtgcagaaaatccaggtattcagaatcacgaagtctcaactcgagctgggttagaatgggaacaagtcgataagactccctggacaagacttgccgagatagaagctgccaagcaccaccaattattcccacactacagtcggcagaagaacaacaagttcttcaacccaacccaggagcaactggacttgctccaggcatatgatgactggaagcctacacttgtatgcccgccgggataccaaatgcctcccgctgaacgcccttcgcgcaagaagaagcgctcttcttcatag

SEQ ID NO: 5785 - protein, 422 aa, Muscodor strobelii
  misc_feature: SGI Peptide ID NO. 561652
  misc_feature (306)..(371): Pfam Id: PF00505 Pfam Desc: HMG (high mobility group) box
  misc_feature (305)..(373): NCBI GI: 255947904 Blast Desc: Pc22g06930 [Penicillium chrysogenum Wisconsin 54-1255] gi|211591736|emb|CAP97981.1| Pc22g06930 [Penicillium chrysogenum Wisconsin 54-1255]
  misc_feature (265)..(373): NCBI GI: 238843938 Blast Desc: HMG-box transcription factor [Microsporum canis CBS 113480]
  misc_feature (305)..(373): NCBI GI: 145258122 Blast Desc: An04g05820 [Aspergillus niger] gi|134074552|emb|CAK38845.1| protein product [Aspergillus niger]
  misc_feature (305)..(373): NCBI GI: 212542131 Blast Desc: HMG box transcriptional regulator, [Penicillium marneffei ATCC 18224] gi|210066127|gb|EEA20220.1| HMG box transcriptional regulator, [Penicillium marneffei ATCC 18224]
  misc_feature (305)..(373): NCBI GI: 242769688 Blast Desc: SNF2 family helicase, [Talaromyces stipitatus ATCC 10500] gi|218725017|gb|EED24434.1| SNF2 family helicase, [Talaromyces stipitatus ATCC 10500]
  misc_feature (305)..(373): NCBI GI: 70993796 Blast Desc: HMG box transcriptional regulator [Aspergillus fumigatus Af293] gi|66849379|gb|EAL89707.1| HMG box transcriptional regulator, [Aspergillus fumigatus Af293] HMG box
  misc_feature (305)..(373): NCBI GI: 115391321 Blast Desc: [Aspergillus terreus NIH2624] gi|114194089|gb|EAU35789.1| [Aspergillus terreus NIH2624]
  misc_feature (305)..(373): NCBI GI: 119500358 Blast Desc: HMG box transcriptional regulator, [Neosartorya fischeri NRRL 181] gi|119415101|gb|EAW25039.1| HMG box transcriptional regulator, [Neosartorya fischeri NRRL 181]
  misc_feature (305)..(373): NCBI GI: 238485914 Blast Desc: HMG box protein, [Aspergillus flavus NRRL3357] gi|220699074|gb|EED55413.1| HMG box protein, [Aspergillus flavus NRRL3357]
  misc_feature (305)..(373): NCBI GI: 121707831 Blast Desc: HMG box transcriptional regulator, [Aspergillus clavatus NRRL 1] gi|119400101|gb|EAW10527.1| HMG box transcriptional regulator, [Aspergillus clavatus NRRL 1]
MANANSERFGEADPQIAELAGKQWAEAGLPLDPQRWTAIHRQWTTACVQVDQPGALIVMTTSQCSELGAEMLGQSGPGHTYFIEQYRKMTQHPHLNIDFWLDGRVDNYGRVYLGPLSSVEERVMGNAAYISNNLGLVVIKPNIDFRSDEEITNDLNNLIPMPGTPTIFPGSPGALLNTVTHGDVAHEDDAEMADTYSLSDQTEDGDETYEQDSIGDPGNALQNHVALQNHVAPQNYGALQNYSTHQNYVDPQHGAPQNPGAPQGAPQGAPQNYSVTQNYGVLQNHVAPQHGAPQITPQNQVSFAKIPMPRNSWLLYRSYMQRFYRAENPGIQNHEVSTRAGLEWEQVDKTPWTRLAEIEAAKHHQLFPHYSRQKNNKFFNPTQEQLDLLQAYDDWKPTLVCPPGYQMPPAERPSRKKKRSSS

SEQ ID NO: 5786 - DNA, 2220 bp, Muscodor strobelii
  misc_feature: SGI cDNA ID NO. 561653
  misc_feature: Elevated expression when VOC is produced
  misc_feature: Encodes the peptide sequence at SEQ ID NO 5787
atgaagttctctgctatccgcgcggcggcgctcgccagtgccatcaatatggtgtccgcccaaagcaccacagcgccaactcccacggaagcttgcgcgatcgtgagttcgacatgggcagctcagatcagtgccacacctactccgacggttgaggcgtccattgcatttgaatgtctcaactcggtgcccatcaacaaggagggtgctcttcggtacatcgcctctatgaagccctacattaagtggcaatccgatgtagtgttcaaagccaatgttccagacgactatggctggccgagctatgacatcttgggtgtaattgacgaggtcaacgccaatattgaggccgacaagtatgccaacgagtacgaatggcaacaagatttgtacaccaagctttttggtcctggaaaagacggccatttcgtcaactacccggatattttgacaaatgccctgcagtggcagcgaccatttgcattggtctcgatcagtgatagtcccagtggcgccgctcctgagatcaagctgtacaacgacgttatctcatccccggaaaccgcctctgttctgaaggagatcaatggcgaagatgctgagactttcctcctgaattgggttgcaaaggcttccggtaatcaggatgttgatgctgcgtacaactctctcttctatgagcatgctttcgttgcagagttggcttccacaggctacttccagaatggtggccgaacaagatacgtttatcccggtaacaccacttcgttcaagttcgagaacggcacattcatcgaacttcccaacacagctcagctcaaaggcgactggactggcgttattgatggcacttcgttcttcgccacttttgcacccggcgcgtcatcatctgacacggtcgctgcaaccacgacctcggcaacgcccacgtccaccgcaacggcgcttgctgccccaacaggatatcccgaacctgtcattgtttccagcgatggtatcctttccggctactaccttgaaggtgaaggattcgatgacactgccgttttggtcgctttgtcgttctctcccgagtccccgatcgagttccaagatgttgctcaggatttcttcgccatggccaaagccgacggcaagaagaacctggtggtggacgtctcggccaacggcggcggttacatcttctctggatacgatctcttccgtcagcttttccccgatattgttcaagaaggccttggccgctggccagcgagcgacgcttttcaagctgtcgctaagaccttctctgcggattccgccaacttcgaccccgacaccgctgacgtggacacaatcttccagtacgagtcggtcttcaactggcgctatgatctcgatgaatctaacaagcacttcacttcgttcgaggataagtttggtcctaaggtgttccgtggcgtgaactacaccgatgtgatgcagtgggatttcaacgacccgttgaacaccatcaactccacctacggcttcggtaccgacatcacgggctaccgcagccgtgccaatttcacacgcccgtttaaaggtcccgagaacattgttgtccttctcgacggcttttgcgcttctacctgcaccctcttttctcagttcatgttccacgacgccggtgtcaagagcatcgccatgggtggccgagcctcgaaggagggcctcatccagggtgtcggcggtgtaaagggttcgcagagtctcggctacgtcgatgttctttcctatatccaggaggcacaactattcaccaatgacacggatgactaccagatcttggccgagtacgacgagtacgtcatcgaccgcagtcaagtgacgagcttgaacgctaaagacgaaatctaccgtgaccatctcgatgacggtttaccggcccaattcgttgccgagtactccgattgtagactgttttggacggaggcgatgatcaaggatgtcaccgaggtctggaaggccgctgctacgtctgccttccagggcggccagtgcgcctacggcggcatcaagcagccttcgaagtgcaagtcgaagagatcgattgagcgtcccgctccgttcaacaagccacgcatgacattccctggggacattgcccgcccccctgttaagcgggccaagtcgtaccccaagtttgaaatgaatgagaagcagaaggcaaacatgtacatgaaggccatcaactaa

SEQ ID NO: 5787 - protein, 739 aa, Muscodor strobelii
  misc_feature: SGI Peptide ID NO. 561653
  misc_feature (31)..(663): NCBI GI: 154309609 Blast Desc: BC1G_07275 [Botryotinia fuckeliana B05.10] gi|150852298|gb|EDN27490.1| BC1G_07275 [Botryotinia fuckeliana B05.10]
  misc_feature (5)..(680): NCBI GI: 85107757 Blast Desc: NCU07923 [Neurospora crassa OR74A] gi|28924045|gb|EAA33203.1| [Neurospora crassa OR74A]
  misc_feature (48)..(703): NCBI GI: 171676888 Blast Desc: protein product [Podospora anserina] gi|170936511|emb|CAP61171.1| protein product [Podospora anserina]
  misc_feature (31)..(678): NCBI GI: 156045575 Blast Desc: SS1G_09978 [Sclerotinia sclerotiorum 1980] gi|154694371|gb|EDN94109.1| SS1G_09978 [Sclerotinia sclerotiorum 1980]
  misc_feature (5)..(682): NCBI GI: 169777881 Blast Desc: [Aspergillus oryzae RIB40] gi|83772143|dbj|BAE62273.1| protein product [Aspergillus oryzae]
  misc_feature (1)..(680): NCBI GI: 261359152 Blast Desc: conserved [Verticillium albo-atrum VaMs.102]
  misc_feature (103)..(682): NCBI GI: 238495114 Blast Desc: pyridine nucleotide-disulphide oxidoreductase family protein [Aspergillus flavus NRRL3357] gi|220695443|gb|EED51786.1| pyridine nucleotide-disulphide oxidoreductase family protein
  misc_feature (3)..(679): NCBI GI: 169597355 Blast Desc: SNOG_01463 [Phaeosphaeria nodorum SN15] gi|111069992|gb|EAT91112.1| SNOG_01463 [Phaeosphaeria nodorum SN15]
  misc_feature (46)..(692): NCBI GI: 169594984 Blast Desc: SNOG_00225 [Phaeosphaeria nodorum SN15] gi|160700989|gb|EAT91720.2| SNOG_00225 [Phaeosphaeria nodorum SN15]
  misc_feature (22)..(720): NCBI GI: 189196070 Blast Desc: peptidase S41 family protein [Pyrenophora tritici-repentis Pt-1C-BFP] gi|187980252|gb|EDU46878.1| peptidase S41 family protein [Pyrenophora tritici-repentis Pt-1C-BFP]
  misc_feature: Useful for introducing or modulating the production of volatile compounds
MKFSAIRAAALASAINMVSAQSTTAPTPTEACAIVSSTWAAQISATPTPTVEASIAFECLNSVPINKEGALRYIASMKPYIKWQSDVVFKANVPDDYGWPSYDILGVIDEVNANIEADKYANEYEWQQDLYTKLFGPGKDGHFVNYPDILTNALQWQRPFALVSISDSPSGAAPEIKLYNDVISSPETASVLKEINGEDAETFLLNWVAKASGNQDVDAAYNSLFYEHAFVAELASTGYFQNGGRTRYVYPGNTTSFKFENGTFIELPNTAQLKGDWTGVIDGTSFFATFAPGASSSDTVAATTTSATPTSTATALAAPTGYPEPVIVSSDGILSGYYLEGEGFDDTAVLVALSFSPESPIEFQDVAQDFFAMAKADGKKNLVVDVSANGGGYIFSGYDLFRQLFPDIVQEGLGRWPASDAFQAVAKTFSADSANFDPDTADVDTIFQYESVFNWRYDLDESNKHFTSFEDKFGPKVFRGVNYTDVMQWDFNDPLNTINSTYGFGTDITGYRSRANFTRPFKGPENIVVLLDGFCASTCTLFSQFMFHDAGVKSIAMGGRASKEGLIQGVGGVKGSQSLGYVDVLSYIQEAQLFTNDTDDYQILAEYDEYVIDRSQVTSLNAKDEIYRDHLDDGLPAQFVAEYSDCRLFWTEAMIKDVTEVWKAAATSAFQGGQCAYGGIKQPSKCKSKRSIERPAPFNKPRMTFPGDIARPPVKRAKSYPKFEMNEKQKANMYMKAIN

SEQ ID NO: 5788 - DNA, 2604 bp, Muscodor strobelii
  misc_feature: SGI EST ID NO. CUFF.14682.0
  misc_feature: Variant of the nucleotide sequence at SEQ ID NO 5786
cctgtctgtctgggacgtagagttggatagagaatcatatcagagtatcaattatgaagttctctgctatccgcgcggcggcgctcgccagtgccatcaatatggtgtccgcccaaagcaccacagcgccaactcccacggaagcttgcgcgatcgtgagttcgacatgggcagctcagatcagtgccacacctactccgacggttgaggcgtccattgcatttgaatgtctcaactcggtgcccatcaacaaggagggtgctcttcggtacatcgcctctatgaagccctacattaagtggcaatccgatgtagtgttcaaagccaatgttccagacgactatggctggccgagctatgacatcttgggtgtaattgacgaggtcaacgccaatattgaggccgacaagtatgccaacgagtacgaatggcaacaagatttgtacaccaagctttttggtcctggaaaagacggccatttcgtcaactacccggatattttgacaaatgccctgcagtggcagcgaccatttgcattggtctcgatcagtgatagtcccagtggcgccgctcctgagatcaagctgtacaacgacgttatctcatccccggaaaccgcctctgttctgaaggagatcaatggcgaagatgctgagactttcctcctgaattgggttgcaaaggcttccggtaatcaggatgttgatgctgcgtacaactctctcttctatgagcatgctttcgttgcagagttggcttccacaggctacttccagaatggtggccgaacaagatacgtttatcccggtaacaccacttcgttcaagttcgagaacggcacattcatcgaacttcccaacacagctcagctcaaaggcgactggactggcgttattgatggcacttcgttcttcgccacttttgcacccggcgcgtcatcatctgacacggtcgctgcaaccacgacctcggcaacgcccacgtccaccgcaacggcgcttgctgccccaacaggatatcccgaacctgtcattgtttccagcgatggtatcctttccggctactaccttgaaggtgaaggattcgatgacactgccgttttggtcgctttgtcgttctctcccgagtccccgatcgagttccaagatgttgctcaggatttcttcgccatggccaaagccgacggcaagaagaacctggtggtggacgtctcggccaacggcggcggttacatcttctctggatacgatctcttccgtcagcttttccccgatattgttcaagaaggccttggccgctggccagcgagcgacgcttttcaagctgtcgctaagaccttctctgcggattccgccaacttcgaccccgacaccgctgacgtggacacaatcttccagtacgagtcggtcttcaactggcgctatgatctcgatgaatctaacaagcacttcacttcgttcgaggataagtttggtcctaaggtgttccgtggcgtgaactacaccgatgtgatgcagtgggatttcaacgacccgttgaacaccatcaactccacctacggcttcggtaccgacatcacgggctaccgcagccgtgccaatttcacacgcccgtttaaaggtcccgagaacattgttgtccttctcgacggcttttgcgcttctacctgcaccctcttttctcagttcatgttccacgacgccggtgtcaagagcatcgccatgggtggccgagcctcgaaggagggcctcatccagggtgtcggcggtgtaaagggttcgcagagtctcggctacgtcgatgttctttcctatatccaggaggcacaactattcaccaatgacacggatgactaccagatcttggccgagtacgacgagtacgtcatcgaccgcagtcaagtgacgagcttgaacgctaaagacgaaatctaccgtgaccatctcgatgacggtttaccggcccaattcgttgccgagtactccgattgtagactgttttggacggaggcgatgatcaaggatgtcaccgaggtctggaaggccgctgctacgtctgccttccagggcggccagtgcgcctacggcggcatcaagcagccttcgaagtgcaagtcgaagagatcgattgagcgtcccgctccgttcaacaagccacgcatgacattccctggggacattgcccgcccccctgttaagcgggccaagtcgtaccccaagtttgaaatgaatgagaagcagaaggcaaacatgtacatgaaggccatcaactaaagtatgagaaacccggtgcttatagcaacttggaactttctgtattcagagaaacaatttaatacagtcaaaatttgaaaatgcagtgttgactcttcgtgacatcgccgggtcgaagttttcaccagcatgaccggacgaggatacgccttcgaattaatggagactcgaccgttctgagcaaggaatacattacttgccgcggaattgccgaaatgattaattggcatcgcaattgaagaccgtagttggcaatttactcctgttgtgtatattttacatgttgcttgtcccatttatcgcgttatcgaaatctccgtccttactcccg

SEQ ID NO: 5789 - DNA, 1686 bp, Muscodor strobelii
  misc_feature: SGI cDNA ID NO. 561654
  misc_feature: Encodes the peptide sequence at SEQ ID NO 5790
atgttgcctcaggttctgatcactctcgtatcgctctgcgcacgttgcgtcgtctcgcagggcgtgagcacctattccaacccgacagtgccaacgggtaccccggtcccgggtggttatactggcgctttcagacctcaagttcacttctcgccgccgaaaaaccacagcaacgacccaaatggactcttcctagacgctcaaggcacgtggcacatgtactatcaatatagccctacaagcgttgatggtggaaacctgcactggggccatgcaacgtcccaagatttgtaccattggatcaatcaacaaattgctttgtttccacctaccgaaacaacgtacgttttctcaggaagcgctgtcatcgacaagaacaatacatctgggttcttccccaatcaagacaatggggtagttgccatgtttacgttccatgatgcggtaactggcattcagaagcaagccattgcatattccttagatgacgggtacacctttgagtattatgccgggaaccctgtcatagatagcaataataccaattttcgagatcctcacataatctggtatgaggagggccattgggtcgccgtcatatcgtacgctgttgatcagatcgttggtatatacacaagtcttgatcttcgcaaatggacatggtcgtcgaatttcacgggttatggtattcaagctgtgtgggaatgcccacagcttgtcaagatgccggtgcgcgatggtatcggtggcagcatcatcaaccagtcgtacgttctatccatgtccgtccaaagtggcgggccacaaggaggctctgcagagcagtacttcataggcagcttcaacggtactcacttcgagcccaaggacacggagacacggctcatcaattttgctaccgacgactacgccggtgcctatttctacggaacaccagatggcgagaatgctgtctatgtcggatggtcagcgaacactgccgacgctgaggcacacccaacgaaggacaccgagggctggattcagcagatgacatttgcgcgctcgaactatttgattgacgatccaagtgttgggctgatcatagtgcatgaactcgatctaacacctgtacaagatagcgtgctcaaacaacaaagtctagtcaacggaaatgtcgaagtggattactctgacacatcgtctggtgcagtactcgtcgacatcaatgtgacgagcatcgacatagcgggattgctagcatcatcatcgctcaacatttcgtattccacacccgcgtcggatgaagcactcagcgcgggtttctacttcggcggcgacgtggaattttgggttgaccgttcgaaggtcaacgcgtacaatgataccttctttagcaaagcgatcaatgtcatggactcatactacgtagaagattctacagattcggcgtcgtggtcactccgtgcaatcatcgatcgcactatgctcgaagtctttgttgatcacggcaagtacatcgggacggtgctgttctaccctaccaagccttttagtgtgctgaatattacaacgaaagacctgcctgagggtgctgaagtaagtgtcaatgttattgcattgaagagtgcatgggctccatatgagaatgaggacggcattgtgctgggaaatgtgacgacaaccacggataggaagttgaagtag

SEQ ID NO: 5790 - protein, 561 aa, Muscodor strobelii
  misc_feature: SGI Peptide ID NO. 561654
  misc_feature (49)..(356): Pfam Id: PF00251 Pfam Desc: Glycosyl hydrolases family 32 N terminal
  misc_feature (49)..(348): Pfam Id: PF00251 Pfam Desc: Glycosyl hydrolases family 32 N terminal
  misc_feature (13)..(553): NCBI GI: 116205988 Blast Desc: CHGG_02287 [Chaetomium globosum CBS 148.51] gi|88182884|gb|EAQ90352.1| CHGG_02287 [Chaetomium globosum CBS 148.51]
  misc_feature (20)..(538): NCBI GI: 145606150 Blast Desc: MGG_02507 [Magnaporthe grisea 70-15] gi|145013875|gb|EDJ98516.1| MGG_02507 [Magnaporthe grisea 70-15]
  misc_feature (1)..(557): NCBI GI: 46110915 Blast Desc: FG02339.1 [Gibberella zeae PH-1]
  misc_feature (6)..(552): NCBI GI: 156051554 Blast Desc: SS1G_07184 [Sclerotinia sclerotiorum 1980] gi|154704962|gb|EDO04701.1| SS1G_07184 [Sclerotinia sclerotiorum 1980]
  misc_feature (5)..(538): NCBI GI: 58260730 Blast Desc: beta-fructofuranosidase [Cryptococcus neoformans var. neoformans JEC21] gi|134117479|ref|XP_772633.1| CNBK3370 [Cryptococcus neoformans var. neoformans B-3501A] CNBK3370 var.
  misc_feature (23)..(548): NCBI GI: 169615773 Blast Desc: SNOG_11049 [Phaeosphaeria nodorum SN15] gi|111060428|gb|EAT81548.1| SNOG_11049 [Phaeosphaeria nodorum SN15]
  misc_feature (23)..(553): NCBI GI: 189209848 Blast Desc: invertase precursor [Pyrenophora tritici-repentis Pt-1C-BFP] gi|187977349|gb|EDU43975.1| invertase precursor [Pyrenophora tritici-repentis Pt-1C-BFP]
  misc_feature (78)..(548): NCBI GI: 154302020 Blast Desc: BC1G_10247 [Botryotinia fuckeliana B05.10] gi|150855639|gb|EDN30831.1| BC1G_10247 [Botryotinia fuckeliana B05.10]
  misc_feature (40)..(538): NCBI GI: 121711130 Blast Desc: beta-fructofuranosidase, [Aspergillus clavatus NRRL 1] gi|119401331|gb|EAW11755.1| beta-fructofuranosidase, [Aspergillus clavatus NRRL 1]
  misc_feature (40)..(538): NCBI GI: 119497855 Blast Desc: beta-fructofuranosidase, [Neosartorya fischeri NRRL 181] gi|119413849|gb|EAW23788.1| beta-fructofuranosidase, [Neosartorya fischeri NRRL 181]
  misc_feature (45)..(531): SWISSPROT Homolog: EC 3.2.1.26 Beta-fructofuranosidase
MLPQVLITLVSLCARCVVSQGVSTYSNPTVPTGTPVPGGYTGAFRPQVHFSPPKNHSNDPNGLFLDAQGTWHMYYQYSPTSVDGGNLHWGHATSQDLYHWINQQIALFPPTETTYVFSGSAVIDKNNTSGFFPNQDNGVVAMFTFHDAVTGIQKQAIAYSLDDGYTFEYYAGNPVIDSNNTNFRDPHIIWYEEGHWVAVISYAVDQIVGIYTSLDLRKWTWSSNFTGYGIQAVWECPQLVKMPVRDGIGGSIINQSYVLSMSVQSGGPQGGSAEQYFIGSFNGTHFEPKDTETRLINFATDDYAGAYFYGTPDGENAVYVGWSANTADAEAHPTKDTEGWIQQMTFARSNYLIDDPSVGLIIVHELDLTPVQDSVLKQQSLVNGNVEVDYSDTSSGAVLVDINVTSIDIAGLLASSSLNISYSTPASDEALSAGFYFGGDVEFWVDRSKVNAYNDTFFSKAINVMDSYYVEDSTDSASWSLRAIIDRTMLEVFVDHGKYIGTVLFYPTKPFSVLNITTKDLPEGAEVSVNVIALKSAWAPYENEDGIVLGNVTTTTDRKLK

SEQ ID NO: 5791 - DNA, 657 bp, Muscodor strobelii
  misc_feature: SGI EST ID NO. CUFF.14645.0
  misc_feature: Variant of the nucleotide sequence at SEQ ID NO 5789
gagcccaaggacacggagacacggctcatcaattttgctaccgacgactacgccggtgcctatttctacggaacaccagatggcgagaatgctgtctatgtcggatggtcagcgaacactgccgacgctgaggcacacccaacgaaggacaccgagggctggattcagcagatgacatttgcgcgctcgaactatttgattgacgatccaagtgttgggctgatcatagtgcatgaactcgatctaacacctgtacaagatagcgtgctcaaacaacaaagtctagtcaacggaaatgtcgaagtggattactctgacacatcgtctggtgcagtactcgtcgacatcaatgtgacgagcatcgacatagcgggattgctagcatcatcatcgctcaacatttcgtattccacacccgcgtcggatgaagcactcagcgcgggtttctacttcggcggcgacgtggaattttgggttgaccgttcgaaggtcaacgcgtacaatgataccttctttagcaaagcgatcaatgtcatggactcatactacgtagaagattctacagattcggcgtcgtggtcactccgtgcaatcatcgatcgcactatgctcgaagtctttgttgatcacggcaagtacatcgggacggtgctgttc

SEQ ID NO: 5792 - DNA, 1068 bp, Muscodor strobelii
  misc_feature: SGI cDNA ID NO. 561655
  misc_feature: Encodes the peptide sequence at SEQ ID NO 5793
atgcccgtcgacgacttagacagggagatcaaagcggtcggggagaggttgacgagcctgacgcgacgaatcgagaggtttgaagcagagtccaaatcaaaaatagcagccaaacacaaaacgatgctcagcgagctgcgcgatagcgtcaatgctgtgaacaaaacgacgcttttcctcggccagggcgaagactcatacatggactcagtgatagggaccctgtcagaagcccagtctaccaaggacatagtaaagaagcactcagctagcatgcatgagagcttcctgcagttgcgcaagacggcgatatcagctgtaaagcaggcggaagatgtcaaatgccagttcagcgagtatgatgtacagctagatgttctgagaaaagatctagatgacgttgctgcacgagcagacttgttatttgcgaaggctaaatcgacactgactgccaaagagagagagtttgggaaggcaaaacagactcttattaagaagagagaagggatcgataacctagaggaccagctagatgatgatagagatgagcgacatcgcctacggaaaaagagagcgaaggcttgggcagcatcagtcatcttcccacctatggccatacgcgcgatctcgcttgaattggatgcaagacaatgcagcgatttacgagcccagataagagagttgaaacaacagataaatcacgaagagttaaagatgtggtctattgagcgggagaaagatatccttgaaagtcaaaaaagagctcttgccgcggtcgttgccaatacaaaaaccttgatcgctcggtgtgagcctctgacttccagtgcctccgagacacaaaaactagttgatagcagaatcgtcgaataccatgacctggtactgagggcagacgatttcgcttcctggacgggcgacctatctcgacagacaaatgccttcaggttactaggatcaagcacaagaatgcaattgcagacaagcacggcgaaaattgtcacgcgattactggagatggatcaagcgggagtgaagctgattactgcggatctgaaacgtgtatga

SEQ ID NO: 5793 - protein, 355 aa, Muscodor strobelii
  misc_feature: SGI Peptide ID NO. 561655
  misc_feature (6)..(355): NCBI GI: 256721147 Blast Desc: NECHADRAFT_88866 [Nectria haematococca mpVI 77-13-4]
MPVDDLDREIKAVGERLTSLTRRIERFEAESKSKIAAKHKTMLSELRDSVNAVNKTTLFLGQGEDSYMDSVIGTLSEAQSTKDIVKKHSASMHESFLQLRKTAISAVKQAEDVKCQFSEYDVQLDVLRKDLDDVAARADLLFAKAKSTLTAKEREFGKAKQTLIKKREGIDNLEDQLDDDRDERHRLRKKRAKAWAASVIFPPMAIRAISLELDARQCSDLRAQIRELKQQINHEELKMWSIEREKDILESQKRALAAVVANTKTLIARCEPLTSSASETQKLVDSRIVEYHDLVLRADDFASWTGDLSRQTNAFRLLGSSTRMQLQTSTAKIVTRLLEMDQAGVKLITADLKRV

SEQ ID NO: 5794 - DNA, 160 bp, Muscodor strobelii
  misc_feature: SGI EST ID NO. CUFF.14652.0
  misc_feature: Variant of the nucleotide sequence at SEQ ID NO 5792
gtttgggaaggcaaaacagactcttattaagaagagagaagggatcgataacctagaggaccagctagatgatgatagagatgagcgacatcgcctacggaaaaagagagcgaaggcttgggcagcatcagtcatcttcccacctatggccatacgcgcg

SEQ ID NO: 5795 - DNA, 2130 bp, Muscodor strobelii
  misc_feature: SGI cDNA ID NO. 561656
  misc_feature: Elevated expression when VOC is produced
  misc_feature: Encodes the peptide sequence at SEQ ID NO 5796
atgacacagacgtcgaaaacttcgacgacaaacgaggtcccactgagcccgatattctctcccgatgactccggtttccagcagaacgaggaactcctgcgacttgtaagaaccacacaaggcgccagctcgatagtcagcaaattcgcacagaacgctctcggctattccaactggggtgctctgctcggcgccgctccgaatgcgcttgggagactcggacaatgttttgtactagcatcagaccctttagccgggtctcttgtttttgcagacccgaaagccattggactgaaatattcgtctctgcggcctaacctaatcgagtgcgctcaccttgggcgcaaagccttcaacgaggccgaagaatgcatgaaatccatatcgatgctagcgggcggcatcatcaagctagatggcaatatcgacgacattattgaggcagtcgaagaccccgaaatggccgagcttgagctccctgatcatgtagctcggttaaaggaaatatcagcgacgtccgtggacgatatcaaggccgtaaagaaaaaattcgacgactgggccgacttcgtgagggctattcacaaagcttgcatcgctaaggacgaccagctggagaggaacaagattgagctcaacgatgaaatcgcagtacaagagatgactaagcagaggagacagtcactcatcgaccaggcgaaattagaaaaacaagaattacttcgacagcgagacgacagagccgaagagcataggaaggctcagaagtctgttaacggaggcaaatgggttgatctcggtcgtggagccgcatcaatagtcacgatgacggcgaagttatacacggaccctatctcttccgtaattgactatttcggtaaggcatttgatgcccagggccagcaaacagccaagattccggcctacgaacccgacccgaaggatcctcttcacacccgagatagtggttacgcattagcgcaggctctagctgagtgtctgtacaggctcaatgctgctctcataagtgcaaatggagtagtagagtaccacggcgttgactgggagggacttagcggacatgctcagactgagcggaacattatctttatctggaatggcttccaaggaacaacatcgcggtatgcgaaagaacagacgcctgtggcgaatcaagcgcgagctgtagcaaagccaggcgtcaaggttgccgctgatattcgtgcgctcgttaaagctgagcgcgaagtccaacaagatacgacagcttcgctatcgcgatgcgccgacgtctggcgcgatcatgttaaacaatctctggaagcagtgacggccattattgcgcaggggtatctagaagtcgacagggaagaaaagcagaaggagagaatcatggctgaacaaatagcatctcgcaaaccatcgtctgctgagctccgctttcagcatctccagcgatcccagcgtgccctcttcgatgctgagcgacgtttgcgaaagcgtatggaagctgaaatgaaagaagcagaggattttacactcatggagcttagactggagaaaatgttgatggagaaggctaatatggctcaagtaaaagaaattctcggcgactgcgtcgaacaactgcagtacttctgcgagaacttggacgaactagtcagattcttcgccagcatgcagacaatgatcgtacacatggatcaagaccaagtgaacagttttgggtccaaggctatcgctactagccgttacaaggcatcggctgccaatgcatccgatgacgatccggagaaacgagagaagcgagagagaaaaatacaagaaagactagagaaactccgatttcaagcgctagagctcaaaggacactacatcgttgtgcaagccatggccgacacgtatgccgaggtctcgggactttacatcctgcccggcatcaagacaattgagagactcggcttgccggacgcgaagaacatgacgaaagatgagcgcgctatgcagatctccgaggttggtaagatggcgcgcaaagcgaaagaggatgtctcgagcctcgcaggcaagaggaggaagcaactctgggcagctgtcacggaggaaagggctgtagtagaagaagattag

SEQ ID NO: 5796 - protein, 709 aa, Muscodor strobelii
  misc_feature: SGI Peptide ID NO. 561656
  misc_feature (42)..(695): NCBI GI: 85076623 Blast Desc: NCU06413 [Neurospora crassa OR74A] gi|28916990|gb|EAA26719.1| [Neurospora crassa OR74A]
  misc_feature (46)..(703): NCBI GI: 119499509 Blast Desc: NFIA_041930 [Neosartorya fischeri NRRL 181] gi|119414676|gb|EAW24615.1| conserved [Neosartorya fischeri NRRL 181]
  misc_feature (59)..(708): NCBI GI: 256726300 Blast Desc: NECHADRAFT_43968 [Nectria haematococca mpVI 77-13-4]
  misc_feature (46)..(703): NCBI GI: 70985552 Blast Desc: conserved [Aspergillus fumigatus Af293] gi|66845910|gb|EAL86244.1| conserved [Aspergillus fumigatus Af293] gi|159125787|gb|EDP50903.1| conserved [Aspergillus A1163]
  misc_feature (39)..(653): NCBI GI: 156035653 Blast Desc: SS1G_13030 [Sclerotinia sclerotiorum 1980] gi|154698435|gb|EDN98173.1| SS1G_13030 [Sclerotinia sclerotiorum 1980]
  misc_feature (284)..(708): NCBI GI: 258571475 Blast Desc: [Uncinocarpus reesii 1704] gi|237904811|gb|EEP79212.1| [Uncinocarpus reesii 1704]
  misc_feature (30)..(647): NCBI GI: 46138083 Blast Desc: FG10556.1 [Gibberella zeae PH-1]
  misc_feature (51)..(212): NCBI GI: 242826395 Blast Desc: TSTA_110570 [Talaromyces stipitatus ATCC 10500] gi|218712451|gb|EED11877.1| TSTA_110570 [Talaromyces stipitatus ATCC 10500]
  misc_feature (51)..(212): NCBI GI: 242826400 Blast Desc: TSTA_110570 [Talaromyces stipitatus ATCC 10500] gi|218712452|gb|EED11878.1| TSTA_110570 [Talaromyces stipitatus ATCC 10500]
  misc_feature (59)..(707): NCBI GI: 154297181 Blast Desc: [Botryotinia fuckeliana B05.10] gi|150842953|gb|EDN18146.1| [Botryotinia fuckeliana B05.10]
  misc_feature: Useful for introducing or modulating the production of volatile compounds
MTQTSKTSTTNEVPLSPIFSPDDSGFQQNEELLRLVRTTQGASSIVSKFAQNALGYSNWGALLGAAPNALGRLGQCFVLASDPLAGSLVFADPKAIGLKYSSLRPNLIECAHLGRKAFNEAEECMKSISMLAGGIIKLDGNIDDIIEAVEDPEMAELELPDHVARLKEISATSVDDIKAVKKKFDDWADFVRAIHKACIAKDDQLERNKIELNDEIAVQEMTKQRRQSLIDQAKLEKQELLRQRDDRAEEHRKAQKSVNGGKWVDLGRGAASIVTMTAKLYTDPISSVIDYFGKAFDAQGQQTAKIPAYEPDPKDPLHTRDSGYALAQALAECLYRLNAALISANGVVEYHGVDWEGLSGHAQTERNIIFIWNGFQGTTSRYAKEQTPVANQARAVAKPGVKVAADIRALVKAEREVQQDTTASLSRCADVWRDHVKQSLEAVTAIIAQGYLEVDREEKQKERIMAEQIASRKPSSAELRFQHLQRSQRALFDAERRLRKRMEAEMKEAEDFTLMELRLEKMLMEKANMAQVKEILGDCVEQLQYFCENLDELVRFFASMQTMIVHMDQDQVNSFGSKAIATSRYKASAANASDDDPEKREKRERKIQERLEKLRFQALELKGHYIVVQAMADTYAEVSGLYILPGIKTIERLGLPDAKNMTKDERAMQISEVGKMARKAKEDVSSLAGKRRKQLWAAVTEERAVVEED

SEQ ID NO: 5797 - DNA, 1829 bp, Muscodor strobelii
  misc_feature: SGI EST ID NO. CUFF.14660.0
  misc_feature: Variant of the nucleotide sequence at SEQ ID NO 5795
tggggactcagctgtacacgtgtaggtaatcaaagagcattcgtaatccaccttcctcacctagtgcaacgtaacggcccccaaggcgcagcaaggcaacttcacgaaaacactgccttagcactacccacggccgctgcgacgacggtatctacgtacttctaaagcgccgatgtatctacaagggtacccttcgctaccagttattaatggcctcattctagttaagtatgtccggcacgcacatattgcaacggttgcgccccgcaccgagctctcgaaagcgtagacatcgtaggtttgggcgatgttgcatactctcgtaatcactcttataaggtatatcagtccacgtgcgtctcgacaaaagacgcgcaggtgtcgatagatctgggaagttgatgaatagtagtccctcagacatctccagcatctccagcatctccagcatctccagcatctccagcatctgtgatttatgacaatgacacagacgtcgaaaacttcgacgacaaacgaggtcccactgagcccgatattctctcccgatgactccggtttccagcagaacgaggaactcctgcgacttgtaagaaccacacaaggcgccagctcgatagtcagcaaattcgcacagaacgctctcggctattccaactggggtgctctgctcggcgccgctccgaatgcgcttgggagactcggacaatgttttgtactagcatcagaccctttagccgggtctcttgtttttgcagacccgaaagccattggactgaaatattcgtctctgcggcctaacctaatcgagtgcgctcaccttgggcgcaaagccttcaacgaggccgaagaatgcatgaaatccatatcgatgctagcgggcggcatcatcaagctagatggcaatatcgacgacattattgaggcagtcgaagaccccgaaatggccgagcttgagctccctgatcatgtagctcggttaaaggaaatatcagcgacgtccgtggacgatatcaaggccgtaaagaaaaaattcgacgactgggccgacttcgtgagggctattcacaaagcttgcatcgctaaggacgaccagctggagaggaacaagattgagctcaacgatgaaatcgcagtacaagagatgactaagcagaggagacagtcactcatcgaccaggcgaaattagaaaaacaagaattacttcgacagcgagacgacagagccgaagagcataggaaggctcagaagtctgttaacggaggcaaatgggttgatctcggtcgtggagccgcatcaatagtcacgatgacggcgaagttatacacggaccctatctcttccgtaattgactatttcggtaaggcatttgatgcccagggccagcaaacagccaagattccggcctacgaacccgacccgaaggatcctcttcacacccgagatagtggttacgcattagcgcaggctctagctgagtgtctgtacaggctcaatgctgctctcataagtgcaaatggagtagtagagtaccacggcgttgactgggagggacttagcggacatgctcagactgagcggaacattatctttatctggaatggcttccaaggaacaacatcgcggtatgcgaaagaacagacgcctgtggcgaatcaagcgcgagctgtagcaaagccaggcgtcaaggttgccgctgatattcgtgcgctcgttaaagctgagcgcgaagtccaacaagatacgacagcttcgctatcgcgatgcgccgacgtctggcgcgatcatgttaaacaatctctggaagcagtgacggccattattgcgc

SEQ ID NO: 5798 - DNA, 762 bp, Muscodor strobelii
  misc_feature: SGI cDNA ID NO. 561657
  misc_feature: Encodes the peptide sequence at SEQ ID NO 5799
tatttctataaagtggaagcgctcaagaagtacaaatggtattggagactggaacccgacgtcgagttctcatgtgctatcacctacgaccctttccgccagatggcccgcaacaacaaagtctacggcttcactctcgggctctgggaagagcctagaacttgtcctggcttgtttcgtcaagtttcagactggaaagaagccaataatatcccctcaacttctctctggaatgccggtatcgatccctcttgggtcccatggccattccgcagcgccatgagctggttctcacatcgagatcgtaatggcgataagtggaatctctgtcactactggagtaattttgagattgcggacctcgacttcttccgcggcgagaaatatcagtcgctttaccagcaactagagaagtctggaggcttctactatgagagatggggagacgcagccgtccattctctcgcggtgaatatgctagccaagccacatcaagtccaccacttcagtgacattggctaccgacacgattggtattatcagtgccccgcaaacgctccaggcgctcagcttcccgaatccgatacactcaaccgtctcaaaggatcatggtcaccagagctgcctggtggtgtaggctgccgatgcgaatgcgatggccgcaagaaccggaacactgccgcctactgcagcaacaaactcaaggccccaaatacggtcagacgtccttggtctacatggcttctcgggttcatattttga

SEQ ID NO: 5799 - protein, 253 aa, Muscodor strobelii
  misc_feature: SGI Peptide ID NO. 561657
  misc_feature (2)..(179): Pfam Id: PF01793 Pfam Desc: Glycolipid 2-alpha-mannosyltransferase
  misc_feature (2)..(242): NCBI GI: 85086217 Blast Desc: NCU04037 [Neurospora crassa OR74A] gi|28918746|gb|EAA28416.1| conserved [Neurospora crassa OR74A] gi|39979228|emb|CAE85598.1| related to alpha-1, [Neurospora
  misc_feature (16)..(249): NCBI GI: 145614612 Blast Desc: MGG_04514 [Magnaporthe grisea 70-15] gi|145021513|gb|EDK05642.1| MGG_04514 [Magnaporthe grisea 70-15]
  misc_feature (2)..(236): NCBI GI: 171682212 Blast Desc: protein product [Podospora anserina] gi|170941065|emb|CAP66715.1| protein product [Podospora anserina]
  misc_feature (2)..(243): NCBI GI: 171689716 Blast Desc: protein product [Podospora anserina] gi|170944820|emb|CAP70932.1| protein product [Podospora anserina]
  misc_feature (2)..(224): NCBI GI: 164425706 Blast Desc: NCU06166 [Neurospora crassa OR74A] gi|157071030|gb|EAA30792.2| conserved [Neurospora crassa OR74A]
  misc_feature (2)..(242): NCBI GI: 116205273 Blast Desc: CHGG_10520 [Chaetomium globosum CBS 148.51] gi|88176648|gb|EAQ84116.1| CHGG_10520 [Chaetomium globosum CBS 148.51]
  misc_feature (1)..(219): NCBI GI: 171681088 Blast Desc: protein product [Podospora anserina] gi|170940502|emb|CAP65730.1| protein product [Podospora anserina]
  misc_feature (1)..(219): NCBI GI: 85109183 Blast Desc: NCU05680 [Neurospora crassa OR74A] gi|28924428|gb|EAA33558.1| NCU05680 [Neurospora crassa OR74A]
  misc_feature (1)..(219): NCBI GI: 116191317 Blast Desc: CHGG_05376 [Chaetomium globosum CBS 148.51] gi|88181289|gb|EAQ88757.1| CHGG_05376 [Chaetomium globosum CBS 148.51]
  misc_feature (1)..(219): NCBI GI: 238842654 Blast Desc: glycolipid 2-alpha-mannosyltransferase [Microsporum canis CBS 113480]
  misc_feature (2)..(232): SWISSPROT Homolog: EC 2.4.1.131 Glycolipid 2-alpha-mannosyltransferase
YFYKVEALKKYKWYWRLEPDVEFSCAITYDPFRQMARNNKVYGFTLGLWEEPRTCPGLFRQVSDWKEANNIPSTSLWNAGIDPSWVPWPFRSAMSWFSHRDRNGDKWNLCHYWSNFEIADLDFFRGEKYQSLYQQLEKSGGFYYERWGDAAVHSLAVNMLAKPHQVHHFSDIGYRHDWYYQCPANAPGAQLPESDTLNRLKGSWSPELPGGVGCRCECDGRKNRNTAAYCSNKLKAPNTVRRPWSTWLLGFIF

SEQ ID NO: 5800 - DNA, 1891 bp, Muscodor strobelii
  misc_feature: SGI EST ID NO. CUFF.14803.0
  misc_feature: Variant of the nucleotide sequence at SEQ ID NO 5798
tttctataaagtggaagcgctcaagaagtacaaatggtattggagactggaacccgacgtcgagttctcatgtgctatcacctacgaccctttccgccagatggcccgcaacaacaaagtctacggcttcactctcgggctctgggaagagcctagaacttgtcctggcttgtttcgtcaagtttcagactggaaagaagccaataatatcccctcaacttctctctggaatgccggtatcgatccctcttgggtcccatggccattccgcagcgccatgagctggttctcacatcgagatcgtaatggcgataagtggaatctctgtcactactggagtaattttgagattgcggacctcgacttcttccgcggcgagaaatatcagtcgctttaccagcaactagagaagtctggaggcttctactatgagagatggggagacgcagccgtccattctctcgcggtgaatatgctagccaagccacatcaagtccaccacttcagtgacattggctaccgacacgattggtattatcagtgccccgcaaacgctccaggcgctcagcttcccgaatccgatacactcaaccgtctcaaaggatcatggtcaccagagctgcctggtggtgtaggctgccgatgcgaatgcgatggccgcaagaaccggaacactgccgcctactgcagcaacaaactcaaggccccaaatacggtcagacgtccttggtctacatggcttctcgggttcatattttgagctttttaaaccgtttttgggtaacacagaatcatcgtaaccgagatcgaacccagagctgaacctattccgacacccgagaatagcttcctgctgtcacttcacaaagctataggaagacttaacatttcaagctagtgtaggacgggaccgatccgttggctgcgccttgactggtgtctcgtaagtatcgtcgactatttattgacatccccagtttgatgggatctcaacgccaaccatcatcggcggatagccgtactaatcatccctctccatccaaggcctcatagcatcaaacaaccgctgaaacgcctcctccccagccataatcttttcaaaagcctgcttggaataaatactagcacccttcaagaaagccgcaaacacaatatcagcataactcagatccgcacccaagaaaaacggtccctcatccgcagtcttcctcagcaagtccgccaaaacatctaactgcggcttcgcagccgcccattccgcctctttatcagctgttcgctcgagttcctcaacactcatacctagaaatttggaccgcgtatcacgccaataggcagcggagacggggttgaggatttctcgaggtacgacagccatgaacgttgatttgagagacggggttaaaggtgtcactgcgctgattacctgtggaaggatttcagagtctaaattgaggggaggtgaggggtagaccgcttccacggcatgggcgattgggagactgtccattatgtaggtatcattgagtttgattgccggtagagagtgagagatatatgctccggggccgctgtgggctgggatcccgagtgaggagagagtgggtgcgatggagggatattctagccatgttgtggtgtagggaagtcctttgaagtttaggagcatgcgtgctattttacaagtgtgagatgagtgggtgatgtgagaggagagggtgagagacgtactgcgccatggactagagttccagcatttgtttgcgccgtttgctatatcgtagaggattatttcggatgacatgtttgtgattgagaggtcggaatattgagactatgtgagtaaattgacagagaataaatgcatcagagacgaatagtgtgtggtgat

SEQ ID NO: 5801 - DNA, 726 bp, Muscodor strobelii
  misc_feature: SGI cDNA ID NO. 561658
  misc_feature: Encodes the peptide sequence at SEQ ID NO 5802
atgtcatccgaaataatcctctacgatatagcaaacggcgcaaacaaatgctggaactctagtccatggcgcacacgcatgctcctaaacttcaaaggacttccctacaccacaacatggctagaatatccctccatcgcacccactctctcctcactcgggatcccagcccacagcggccccggagcatatatctctcactctctaccggcaatcaaactcaatgatacctacataatggacagtctcccaatcgcccatgccgtggaagcggtctacccctcacctcccctcaatttagactctgaaatccttccacaggtaatcagcgcagtgacacctttaaccccgtctctcaaatcaacgttcatggctgtcgtacctcgagaaatcctcaaccccgtctccgctgcctattggcgtgatacgcggtccaaatttctaggtatgagtgttgaggaactcgagcgaacagctgataaagaggcggaatgggcggctgcgaagccgcagttagatgttttggcggacttgctgaggaagactgcggatgagggaccgtttttcttgggtgcggatctgagttatgctgatattgtgtttgcggctttcttgaagggtgctagtatttattccaagcaggcttttgaaaagattatggctggggaggaggcgtttcagcggttgtttgatgctatgaggccttggatggagagggatgattag

SEQ ID NO: 5802 - protein, 241 aa, Muscodor strobelii
  misc_feature: SGI Peptide ID NO. 561658
  misc_feature (4)..(241): NCBI GI: 212544420 Blast Desc: conserved [Penicillium marneffei ATCC 18224] gi|210065333|gb|EEA19427.1| conserved [Penicillium marneffei ATCC 18224]
  misc_feature (27)..(241): NCBI GI: 169607367 Blast Desc: SNOG_06740 [Phaeosphaeria nodorum SN15] gi|160701395|gb|EAT85391.2| SNOG_06740 [Phaeosphaeria nodorum SN15]
  misc_feature (2)..(241): NCBI GI: 256734782 Blast Desc: NECHADRAFT_102396 [Nectria haematococca mpVI 77-13-4]
  misc_feature (1)..(241): NCBI GI: 261360561 Blast Desc: conserved [Verticillium albo-atrum VaMs.102]
  misc_feature (3)..(241): NCBI GI: 238499527 Blast Desc: conserved [Aspergillus flavus NRRL3357] gi|220692751|gb|EED49097.1| conserved [Aspergillus flavus NRRL3357]
  misc_feature (4)..(241): NCBI GI: 256722112 Blast Desc: NECHADRAFT_55532 [Nectria haematococca mpVI 77-13-4]
  misc_feature (3)..(241): NCBI GI: 169778939 Blast Desc: [Aspergillus oryzae RIB40] gi|83772673|dbj|BAE62801.1| protein product [Aspergillus oryzae]
  misc_feature (3)..(241): NCBI GI: 85119122 Blast Desc: NCU02888 [Neurospora crassa OR74A] gi|28927381|gb|EAA36334.1| NCU02888 [Neurospora crassa OR74A]
  misc_feature (2)..(241): NCBI GI: 171694786 Blast Desc: protein product [Podospora anserina] gi|170947635|emb|CAP59797.1| protein product [Podospora anserina]
  misc_feature (3)..(241): NCBI GI: 156049007 Blast Desc: SS1G_08210 [Sclerotinia sclerotiorum 1980] gi|154692609|gb|EDN92347.1| SS1G_08210 [Sclerotinia sclerotiorum 1980]
MSSEIILYDIANGANKCWNSSPWRTRMLLNFKGLPYTTTWLEYPSIAPTLSSLGIPAHSGPGAYISHSLPAIKLNDTYIMDSLPIAHAVEAVYPSPPLNLDSEILPQVISAVTPLTPSLKSTFMAVVPREILNPVSAAYWRDTRSKFLGMSVEELERTADKEAEWAAAKPQLDVLADLLRKTADEGPFFLGADLSYADIVFAAFLKGASIYSKQAFEKIMAGEEAFQRLFDAMRPWMERDD

SEQ ID NO: 5803 - DNA, 1402 bp, Muscodor strobelii
  misc_feature: SGI EST ID NO. CUFF.14804.2
  misc_feature: Variant of the nucleotide sequence at SEQ ID NO 5801
actattcgtctctgatgcatttattctctgtcaatttactcacatagtctcaatattccgacctctcaatcacaaacatgtcatccgaaataatcctctacgatatagcaaacggcgcaaacaaatgctggaactctagtccatggcgcacacgcatgctcctaaacttcaaaggacttccctacaccacaacatggctagaatatccctccatcgcacccactctctcctcactcgggatcccagcccacagcggccccggagcatatatctctcactctctaccggcaatcaaactcaatgatacctacataatggacagtctcccaatcgcccatgccgtggaagcggtctacccctcacctcccctcaatttagactctgaaatccttccacaggtaatcagcgcagtgacacctttaaccccgtctctcaaatcaacgttcatggctgtcgtacctcgagaaatcctcaaccccgtctccgctgcctattggcgtgatacgcggtccaaatttctaggtatgagtgttgaggaactcgagcgaacagctgataaagaggcggaatgggcggctgcgaagccgcagttagatgttttggcggacttgctgaggaagactgcggatgagggaccgtttttcttgggtgcggatctgagttatgctgatattgtgtttgcggctttcttgaagggtgctagtatttattccaagcaggcttttgaaaagattatggctggggaggaggcgtttcagcggttgtttgatgctatgaggccttggatggagagggatgattagtacggctatccgccgatgatggttggcgttgagatcccatcaaactggggatgtcaataaatagtcgacgatacttacgagacaccagtcaaggcgcagccaacggatcggtcccgtcctacactagcttgaaatgttaagtcttcctatagctttgtgaagtgacagcaggaagctattctcgggtgtcggaataggttcagctctgggttcgatctcggttacgatgattctgtgttacccaaaaacggtttaaaaagctcaaaatatgaacccgagaagccatgtagaccaaggacgtctgaccgtatttggggccttgagtttgttgctgcagtaggcggcagtgttccggttcttgcggccatcgcattcgcatcggcagcctacaccaccaggcagctctggtgaccatgatcctttgagacggttgagtgtatcggattcgggaagctgagcgcctggagcgtttgcggggcactgataataccaatcgtgtcggtagccaatgtcactgaagtggtggacttgatgtggcttggctagcatattcaccgcgagagaatggacggctgcgtctccccactacagatttattg

SEQ ID NO: 5804 - DNA, 378 bp, Muscodor strobelii
  misc_feature: SGI cDNA ID NO. 561659
  misc_feature: Encodes the peptide sequence at SEQ ID NO 5805
atgccctccgtcaagaaccccaacggcccctccaagaaccggctcgccgcccgcaaagcaacagcacgcaagatcagcgccaaacaaaacacccgcgctaccctcaccgagcacaagatcacaaaagcagatgcgaagcgcggcgctcgtaccggtctcttgcctaccagtggcccaaatcgagcactcggcggcaaacaagccaggaagttggagagaaagatgaagtatgctctgaagcgcaagatggagtctgagggcgaggtcgagatgagggatgccggagaggagaattgcaagagcaaggcgaagggcaaaaaggatgatggtaaggagactgaggacagtatggtggtcgatgaggataccatctcctga

SEQ ID NO: 5805 - protein, 125 aa, Muscodor strobelii
  misc_feature: SGI Peptide ID NO. 561659
  misc_feature (1)..(98): NCBI GI: 256728717 Blast Desc: NECHADRAFT_85948 [Nectria haematococca mpVI 77-13-4]
  misc_feature (1)..(120): NCBI GI: 39940846 Blast Desc: MGG_05335 [Magnaporthe grisea 70-15] gi|145021962|gb|EDK05982.1| MGG_05335 [Magnaporthe grisea 70-15]
  misc_feature (1)..(91): NCBI GI: 85089929 Blast Desc: NCU04620 [Neurospora crassa OR74A] gi|21622513|emb|CAD37060.1| [Neurospora crassa] gi|28919509|gb|EAA28940.1| conserved [Neurospora crassa OR74A]
  misc_feature (1)..(94): NCBI GI: 46110250 Blast Desc: FG02007.1 [Gibberella zeae PH-1]
  misc_feature (1)..(94): NCBI GI: 171692529 Blast Desc: protein product [Podospora anserina] gi|170946213|emb|CAP73014.1| protein product [Podospora anserina]
  misc_feature (2)..(87): NCBI GI: 261360492 Blast Desc: VDBG_09030 [Verticillium albo-atrum VaMs.102]
  misc_feature (1)..(96): NCBI GI: 156051266 Blast Desc: SS1G_07040 [Sclerotinia sclerotiorum 1980] gi|154704818|gb|EDO04557.1| SS1G_07040 [Sclerotinia sclerotiorum 1980]
  misc_feature (1)..(109): NCBI GI: 154316071 Blast Desc: [Botryotinia fuckeliana B05.10] gi|150846407|gb|EDN21600.1| [Botryotinia fuckeliana B05.10]
MPSVKNPNGPSKNRLAARKATARKISAKQNTRATLTEHKITKADAKRGARTGLLPTSGPNRALGGKQARKLERKMKYALKRKMESEGEVEMRDAGEENCKSKAKGKKDDGKETEDSMVVDEDTIS

SEQ ID NO: 5806 - DNA, 698 bp, Muscodor strobelii
  misc_feature: SGI EST ID NO. CUFF.14669.0
  misc_feature: Variant of the nucleotide sequence at SEQ ID NO 5804
tgctgctaagagaactaggtaccccaatgggtgattttcattttcatcaccatcaccatccctcgtctagaatcaagtcaacagcatcttaccgatcgaataaaaagcagtcacgagtcaaccacatattcagaataacaggaacctgcctccctcacggctaatatccaaccaccacaatgccctccgtcaagaaccccaacggcccctccaagaaccggctcgccgcccgcaaagcaacagcacgcaagatcagcgccaaacaaaacacccgcgctaccctcaccgagcacaagatcacaaaagcagatgcgaagcgcggcgctcgtaccggtctcttgcctaccagtggcccaaatcgagcactcggcggcaaacaagccaggaagttggagagaaagatgaagtatgctctgaagcgcaagatggagtctgagggcgaggtcgagatgagggatgccggagaggagaattgcaagagcaaggcgaagggcaaaaaggatgatggtaaggagactgaggacagtatggtggtcgatgaggataccatctcctgaaggaagaatgtcgtgagaacagaggaaagacgcaattcgatgggatgcaagacacgaccatgataactactcgatcgactcgacaaactcgaggataatgaaaactccgatgaattcggacaaagctggtctggaaccttc

SEQ ID NO: 5807 - DNA, 1170 bp, Muscodor strobelii
  misc_feature: SGI cDNA ID NO. 561660
  misc_feature: Encodes the peptide sequence at SEQ ID NO 5808
atgagaccaccaaagttcaggcgaggaaatggaggacaaaaccagcagctaaagagcgggaaaacaggccatcctgtgagcagacgttcgacgaacaagattggaagggccgacgtggtagtcgtagtaggcaggctgatgattgtagccgatatagtggatgttgcagacgttgtaaacgatgcagtcgttgcagaaagtgcagaccccgtcgatgcaatattgctagtgctcgttgtatcttttgagcttgaatcaatacttgaaccttggagtgttgtgggatcggcgctctgcgagcttagtgtggaggtagatgtcgtatcgcttccacctccaatcacgggtactgtctcggtactgctggcacctgttggtaaagatagggtgtttgcagctgtcgagtcagtgtttgttgccgtcggaacctcctcgctggacgatggtgtttgcccacctgagatggctgggagtgtcgtactcgagctccctggagaattgaccgaaactgtcggagatgatccagttgatgttcctgctgaaatgattggtatggtcgaaagcgctgcgctcgacacgtctgttaaccctcctggtatcgcagagagtgttgcactggaaggatttgtaggcaacactgacactgagggcgcgcctgatgtactcgatcccgtaggcaacggtggtatcgaagacgtgatagtccaggatgaggatgtcgtatcagacgccggtaccgtctcagatgttgcagagcttagacctgcagtattagtgtcgctcgtagagataaccgagttcgttgaagtcgctatctcagagtctgaggccaaggtggtgatggatggtatgcttgcggtggaagagggagaaatgccggtactgatagataacgtagtgccgctacctagtgtgggtgccatagaagtcgtctcgagcgcggaagatgatattgccagagtcgatgataactcagtgttcgtgatgcttgtaagtgtcgacgaactcgtggtctgcccatctgtcccagagggagtcgaggctattttgctggaacttgaggtcgtggccgcaacgggcggctcctgtgtggaggttcccgaccgagaaaggctaccaagagtggttaggtcactcgacgagattaatggcactgaaattgaactttga

SEQ ID NO: 5808 - protein, 389 aa, Muscodor strobelii
  misc_feature: SGI Peptide ID NO. 561660
MRPPKFRRGNGGQNQQLKSGKTGHPVSRRSTNKIGRADVVVVVGRLMIVADIVDVADVVNDAVVAESADPVDAILLVLVVSFELESILEPWSVVGSALCELSVEVDVVSLPPPITGTVSVLLAPVGKDRVFAAVESVFVAVGTSSLDDGVCPPEMAGSVVLELPGELTETVGDDPVDVPAEMIGMVESAALDTSVNPPGIAESVALEGFVGNTDTEGAPDVLDPVGNGGIEDVIVQDEDVVSDAGTVSDVAELRPAVLVSLVEITEFVEVAISESEAKVVMDGMLAVEEGEMPVLIDNVVPLPSVGAIEVVSSAEDDIARVDDNSVFVMLVSVDELVVCPSVPEGVEAILLELEVVAATGGSCVEVPDRERLPRVVRSLDEINGTEIEL

SEQ ID NO: 5809 - DNA, 3387 bp, Muscodor strobelii
  misc_feature: SGI cDNA ID NO. 561661
  misc_feature: Encodes the peptide sequence at SEQ ID NO 5810
atgccctctttcaccttagatccagatggcgacccgacctacccgacagattcgccatcggataaccccaggcccacgcctacgcctacgccagaaaacccgactgcgacaccttctgggacctcgaacccacaaagccctacgccaactccttcacgaacttgcccagggggtccatcgatttcgctagggtctacaagcgcgtcctcatcttcgtcgtcttcgtcttcttcaactacgccggtagtcccactttgcacaggtctaagctctttctctcgaattatggtgtcaatcaatggaaatggttattatgtgccgacgatgggggatccggtcagcttgatcttaaacgataaggagcaaactggaatcactattggccccagtcaggtcgtcattgggcaaacaacattcaaagtaccatctgctccgttgccttcgccgacagacgtctcagccgaggggtacgaagttgttttctcacctcgcgctctaccaaagccggctcttgcatcaacaggcgctgaaggtcaagcttacgcgattcaagttgcaaaaagctacattgaattggctgcagaaatgacgcagcacatcggtcaatttttaggaccagtttatgatctcttggtccgagccgacgcaccctctgtcgatgatgcagaccgattgctgggtccggagagcgaaatggtcgataatgtactgtcaagtgccacactgctctccacattcttcactgatggtcgtcaagagaattgggaaggattcttgaatgaggtgtccttactggacttgccgggtgacgaagatgaggatggcgatgatggtgacggtgacggtgacggtgacggtgacggcgacgatggcgccgatggacctgatggtgacaataaccctccaccggacgactcatgtccagagccagaaactggcggcgatggcccagatactgatggtcccgatgcggacggtccggaccctgattccgatggcccaggatcacgaaatcaaacagcatcggaatatatagatggtgcttttgcagggtttccaggcatcaagaacctctgcgagcgagctccatgggcaacggagcgattattcaacgtagcgaggtctttgtctttactcgatcgtaactcaactgacaattccgctctggtttctaagctgcaaagttatcgcaaaagctggatgaataatcagcctcaaggtgccgagggtttgcagagcggaggaggcgtgattgtttcgggagccgcaggatttcatatggtctctagaatcaacatgtcgacaaccatcgacctcttcgagaaacgttactggtacatcagtacgtatgaaagtgttgtcaccaacgaaggaagttggtacgttaactcaacggtggattggttagatgggggcggcggatacagaaacgggggccaatattgccctggttttgggtaccaagcaaacatgccaagcgctcaaggatatccgataatgtgggctttggaaaatgcgacgacaactattgccattgcaagcctctgccgcaccgtcgaagagaacgagcagatacttgcacagggccggtcaagctttttcggtggctacaagaatgactctagagtcaacgcagcctatacaagttcatatatccccccttggccccttgaagccaggtccaacttcaagagagagagacattacttcaccgtccctcctgcccagcaccatcagagattgatttctgctcgctcaaccgcaaatcagcctctagaccggcaaggctacggttattacgattccaaaggcgcaaagccaatgatatttatcatcgattcagggttcgcgtatgatttctcaggaaatgaaattgggctctccccgagcgctgatgttgctgaatggagctatgttgttcctaacagactgatcttgccaaacatggccccgtcacgaatttttccggaggatccgaaagattgttacttcgatgatgacggtaaatatatgggacatggaacaccagtggcaatgatggctgttgggcgtaaatatggaattgcccctgatgccgacgtattcataataaaggctacaaatgcttaccacggcacaaacggcaaatggataacaagtctggtggcccctaaatcagtagacgacgcatttaacaaggtacaccgcatggttgaagagaaatcactgcagaatcgagctgtagtaaatttttcattagcaatgtattatatggatctcacaggagacacgacgacgtggcaagcgaaattcaaatcccacatggaaaaattcgaacgcaatggggtcgtgtttgtgcaagccgcagggaataccggttatcgccagccctatcagtactggatggatgacctcataactcagagcctggggacttcggacaattcgatcataacggttggtggaacagacgaccatggccgctatgtgagcaacttcccgagttcttttctaactatcttccgaataaaccagcgaataatgccgtggtacggcactacaccggaacgatcatctgggagcatcacgatatgggcgcaggctgtagatgtcgcggtgaagactgcgacagggaaagaggagctccttgtcggaacttcttttgccgctccacaggtggccggcctcgctgcttacacgctcatgcaatggccggaattattcacggccgcaggaaaggagcataccctagctgtcaaaaagaagctagtggaaatgtcatacagaaggatacccatggcgcaacaagttgacccttacgatatgcctccgtttgccctgcccaaggatatcaacgtagcgtacaataactactggggcccacaagggagctgcgatccttctcctccgcgcggcggtacacgtatgcagcacagtctccagatatctagaagacaaaatgttgggccagacgatgacggctatatgtgcccatatgcgacctcgagtcctgtaccaacaacgtttgttacttccataagctcgagtgacactgtcagcgccagctccggccagtttgcctcaatcacctcggtctcagcaaacgcttcttcgatcactattgcaacaagtagtattgcatcaagcacgtcgctgctcggctcgagctctgcagggttcaatcagaccacagccgtgtcgggaaacgtttcttcatcgacaagtgccattactccgagtggtagtactactgctacaataacagctatttcgagaagcagcgtagttatgaacagtagcatctcatctagtaccacagaaatgtcgactaccacactcgagttcgtatacaactacatacacgcttgtatatccagtgagcagttctaccacgatttcatcaactaa

SEQ ID NO: 5810 - protein, 1128 aa, Muscodor strobelii
  misc_feature: SGI Peptide ID NO. 561661
  misc_feature (587)..(927): Pfam Id: PF00082 Pfam Desc: Subtilase family
  misc_feature (773)..(894): Pfam Id: PF00082 Pfam Desc: Subtilase family
  misc_feature (671)..(949): NCBI GI: 169605173 Blast Desc: SNOG_05604 [Phaeosphaeria nodorum SN15] gi|160706719|gb|EAT86668.2| SNOG_05604 [Phaeosphaeria nodorum SN15]
  misc_feature (589)..(907): NCBI GI: 260776899 Blast Desc: alkaline serine exoprotease A precursor [Vibrio coralliilyticus ATCC BAA-450] gi|260606565|gb|EEX32839.1| alkaline serine exoprotease A precursor [Vibrio coralliilyticus
  misc_feature (589)..(920): NCBI GI: 153832400 Blast Desc: alkaline serine exoprotease A [Vibrio harveyi HY01] gi|148871429|gb|EDL70292.1| alkaline serine exoprotease A [Vibrio harveyi HY01]
  misc_feature (671)..(920): NCBI GI: 258576553 Blast Desc: conserved [Uncinocarpus reesii 1704] gi|237902724|gb|EEP77125.1| conserved [Uncinocarpus reesii 1704]
MPSFTLDPDGDPTYPTDSPSDNPRPTPTPTPENPTATPSGTSNPQSPTPTPSRTCPGGPSISLGSTSASSSSSSSSSSTTPVVPLCTGLSSFSRIMVSINGNGYYVPTMGDPVSLILNDKEQTGITIGPSQVVIGQTTFKVPSAPLPSPTDVSAEGYEVVFSPRALPKPALASTGAEGQAYAIQVAKSYIELAAEMTQHIGQFLGPVYDLLVRADAPSVDDADRLLGPESEMVDNVLSSATLLSTFFTDGRQENWEGFLNEVSLLDLPGDEDEDGDDGDGDGDGDGDGDDGADGPDGDNNPPPDDSCPEPETGGDGPDTDGPDADGPDPDSDGPGSRNQTASEYIDGAFAGFPGIKNLCERAPWATERLFNVARSLSLLDRNSTDNSALVSKLQSYRKSWMNNQPQGAEGLQSGGGVIVSGAAGFHMVSRINMSTTIDLFEKRYWYISTYESVVTNEGSWYVNSTVDWLDGGGGYRNGGQYCPGFGYQANMPSAQGYPIMWALENATTTIAIASLCRTVEENEQILAQGRSSFFGGYKNDSRVNAAYTSSYIPPWPLEARSNFKRERHYFTVPPAQHHQRLISARSTANQPLDRQGYGYYDSKGAKPMIFIIDSGFAYDFSGNEIGLSPSADVAEWSYVVPNRLILPNMAPSRIFPEDPKDCYFDDDGKYMGHGTPVAMMAVGRKYGIAPDADVFIIKATNAYHGTNGKWITSLVAPKSVDDAFNKVHRMVEEKSLQNRAVVNFSLAMYYMDLTGDTTTWQAKFKSHMEKFERNGVVFVQAAGNTGYRQPYQYWMDDLITQSLGTSDNSIITVGGTDDHGRYVSNFPSSFLTIFRINQRIMPWYGTTPERSSGSITIWAQAVDVAVKTATGKEELLVGTSFAAPQVAGLAAYTLMQWPELFTAAGKEHTLAVKKKLVEMSYRRIPMAQQVDPYDMPPFALPKDINVAYNNYWGPQGSCDPSPPRGGTRMQHSLQISRRQNVGPDDDGYMCPYATSSPVPTTFVTSISSSDTVSASSGQFASITSVSANASSITIATSSIASSTSLLGSSSAGFNQTTAVSGNVSSSTSAITPSGSTTATITAISRSSVVMNSSISSSTTEMSTTTLEFVYNYIHACISSEQFYHDFIN

SEQ ID NO: 5811 - DNA, 405 bp, Muscodor strobelii
  misc_feature: SGI cDNA ID NO. 561662
  misc_feature: Encodes the peptide sequence at SEQ ID NO 5812
atgtcaaccatatccacggtcgccgccgctaagccaaaacccaccgagtaccacaagggtgacggctgtggcaatgatgactgtagcacatgcgccagtgacgactggcacctggactgtaccgaatttgactcggggtggaaatgcgcgtgtgtatggcaatccggctgtcaagatcaagttactggccactgccttgatgactgtggtaagtacaagatcaacatgtgcgacaccaatgtggacaagaccgcatatccttatggcaaatgtacatgtacgcaataccagtgtcgcgatccacgcggctgtcagaccggcgtgacatgcccgtctgacaaggatccaacttgccacttcaacgaagttggagccggtcttacgggctattgcgagtgtgcctag

SEQ ID NO: 5812 - protein, 134 aa, Muscodor strobelii
  misc_feature: SGI Peptide ID NO. 561662
MSTISTVAAAKPKPTEYHKGDGCGNDDCSTCASDDWHLDCTEFDSGWKCACVWQSGCQDQVTGHCLDDCGKYKINMCDTNVDKTAYPYGKCTCTQYQCRDPRGCQTGVTCPSDKDPTCHFNEVGAGLTGYCECA

SEQ ID NO: 5813 - DNA, 1143 bp, Muscodor strobelii
  misc_feature: SGI cDNA ID NO. 561663
  misc_feature: Reduced expression when VOC is produced
  misc_feature: Encodes the peptide sequence at SEQ ID NO 5814
atgtctagcgaagaaatccaaaacgtgacatggctcggttcatcaggttcagcgaaatacgacttccgaagcgatgtggtgacaactcctactccgtctatgttagccgcgatcgcgcgatgtactcttcaagatgatgtctcacaagaagatgagacaacgaatgatctcgaggcccactgcgctactctgacaggaacgcagtccgctcttttcgtattatctggcacaatgggaaatcaactcgcgctcagagccctgttaactcagccccctcattcgatactctgcgatagtcgctctcacattttcaacagcgaagctggaggagttgcactattgacaagtgcaatgattcgtcctgtagtgccaagaaatggattgtatctgacgcttgaagacgtcgaggatcactttcaggctgtagggtccatcattggctgtccgacgaaggtgattagtctggagaacacacttcacggggtcattgcacccttagaagaagtgcgtcgaatatcggtcttcgcgaagaagaataatgttaaaatgcattgcgacggtgctcggctttgggaggctgtcgctgcgggtgctggcagcttgactgattatgtggcttgctttgatacggtcactctttgtttctcgaagggcttaggcgcgcccgtgggaagcattttggtcggcgattcggagacaatccaggtggcgcgacatattcggaaggctatcggtggaggactgcgtcaacctggtctcatcaccgctgcagcgcgagtggcactggacgagacattcggctcgagccctaatgggcaacaggggctcctcaaacgctcacacgatacggcaaaggtgattgagagcatgtggaaaagcttgggtggcactacgaagtaccctgtgcaaaccaatattgtctgcatcaatttgaaagatgagggcatctccttagcacgattcaatgagatggggcaacgcgagggattaaggctcaagggtgagcgccttgttgtgcattatcagatcgcgcaaaatgcggatgacacactcgaaagactgcggagggtctttgaaaaagcatggacagagagaggtaaagatattccagcagttgcagacgcgaatgcgtcggtatattaa

SEQ ID NO: 5814 - protein, 380 aa, Muscodor strobelii
  misc_feature: SGI Peptide ID NO. 561663
  misc_feature (21)..(314): Pfam Id: PF01212 Pfam Desc: Beta-eliminating lyase
  misc_feature (3)..(380): NCBI GI: 46122491 Blast Desc: FG05623.1 [Gibberella zeae PH-1]
  misc_feature (11)..(365): NCBI GI: 171694952 Blast Desc: protein product [Podospora anserina] gi|170947718|emb|CAP59880.1| protein product [Podospora anserina]
  misc_feature (10)..(360): NCBI GI: 261357338 Blast Desc: threonine aldolase [Verticillium albo-atrum VaMs.102]
  misc_feature (1)..(365): NCBI GI: 164428706 Blast Desc: NCU00944 [Neurospora crassa OR74A] gi|157072248|gb|EAA35901.2| NCU00944 [Neurospora crassa OR74A]
  misc_feature (11)..(358): NCBI GI: 156062644 Blast Desc: SS1G_01438 [Sclerotinia sclerotiorum 1980] gi|154696774|gb|EDN96512.1| SS1G_01438 [Sclerotinia sclerotiorum 1980]
  misc_feature (11)..(379): NCBI GI: 154308906 Blast Desc: BC1G_07981 [Botryotinia fuckeliana B05.10] gi|150852607|gb|EDN27799.1| BC1G_07981 [Botryotinia fuckeliana B05.10]
  misc_feature (10)..(366): NCBI GI: 145614608 Blast Desc: MGG_11389 [Magnaporthe grisea 70-15] gi|145021511|gb|EDK05640.1| MGG_11389 [Magnaporthe grisea 70-15]
  misc_feature (3)..(367): NCBI GI: 242767520 Blast Desc: L-allo-threonine aldolase, [Talaromyces stipitatus ATCC 10500] gi|218724581|gb|EED23998.1| L-allo-threonine aldolase, [Talaromyces stipitatus ATCC 10500]
  misc_feature (1)..(361): NCBI GI: 255930891 Blast Desc: Pc12g01020 [Penicillium chrysogenum Wisconsin 54-1255] gi|211581621|emb|CAP79729.1| Pc12g01020 [Penicillium chrysogenum Wisconsin 54-1255]
  misc_feature (23)..(361): NCBI GI: 119481855 Blast Desc: l-allo-threonine aldolase [Neosartorya fischeri NRRL 181] gi|119409110|gb|EAW19059.1| l-allo-threonine aldolase [Neosartorya fischeri NRRL 181]
  misc_feature (21)..(353): SWISSPROT Homolog: EC 4.1.2.5 Threonine aldolase
  misc_feature: Useful for introducing or modulating the production of volatile compounds
MSSEEIQNVTWLGSSGSAKYDFRSDVVTTPTPSMLAAIARCTLQDDVSQEDETTNDLEAHCATLTGTQSALFVLSGTMGNQLALRALLTQPPHSILCDSRSHIFNSEAGGVALLTSAMIRPVVPRNGLYLTLEDVEDHFQAVGSIIGCPTKVISLENTLHGVIAPLEEVRRISVFAKKNNVKMHCDGARLWEAVAAGAGSLTDYVACFDTVTLCFSKGLGAPVGSILVGDSETIQVARHIRKAIGGGLRQPGLITAAARVALDETFGSSPNGQQGLLKRSHDTAKVIESMWKSLGGTTKYPVQTNIVCINLKDEGISLARFNEMGQREGLRLKGERLVVHYQIAQNADDTLERLRRVFEKAWTERGKDIPAVADANASVY

SEQ ID NO: 5815 - DNA, 2172 bp, Muscodor strobelii
  misc_feature: SGI EST ID NO. CUFF.14957.0
  misc_feature: Variant of the nucleotide sequence at SEQ ID NO 5813
ttcggtatccatttgtcaggcggcgattccaattacggttaaccatccaaattgtgactatatagtatcctacctacggtcgtatcgtcgtgtaacagacactttgtactccagtcgagctgatcgaggactgacgatctgcgtcaggtctttcttgcatttcgtataaacaggggataggattaaagcaacatgtctagcgaagaaatccaaaacgtgacatggctcggttcatcaggttcagcgaaatacgacttccgaagcgatgtggtgacaactcctactccgtctatgttagccgcgatcgcgcgatgtactcttcaagatgatgtctcacaagaagatgagacaacgaatgatctcgaggcccactgcgctactctgacaggaacgcagtccgctcttttcgtattatctggcacaatgggaaatcaactcgcgctcagagccctgttaactcagccccctcattcgatactctgcgatagtcgctctcacattttcaacagcgaagctggaggagttgcactattgacaagtgcaatgattcgtcctgtagtgccaagaaatggattgtatctgacgcttgaagacgtcgaggatcactttcaggctgtagggtccatcattggctgtccgacgaaggtgattagtctggagaacacacttcacggggtcattgcacccttagaagaagtgcgtcgaatatcggtcttcgcgaagaagaataatgttaaaatgcattgcgacggtgctcggctttgggaggctgtcgctgcgggtgctggcagcttgactgattatgtggcttgctttgatacggtcactctttgtttctcgaagggcttaggcgcgcccgtgggaagcattttggtcggcgattcggagacaatccaggtggcgcgacatattcggaaggctatcggtggaggactgcgtcaacctggtctcatcaccgctgcagcgcgagtggcactggacgagacattcggctcgagccctaatgggcaacaggggctcctcaaacgctcacacgatacggcaaaggtgattgagagcatgtggaaaagcttgggtggcactacgaagtaccctgtgcaaaccaatattgtctgcatcaatttgaaagatgagggcatctccttagcacgattcaatgagatggggcaacgcgagggattaaggctcaagggtgagcgccttgttgtgcattatcagatcgcgcaaaatgcggatgacacactcgaaagactgcggagggtctttgaaaaagcatggacagagagaggtaaagatattccagcagttgcagacgcgaatgcgtcggtatattaaggtaacaaaacactccataattcgtatatctactcccgcggctctcatagaaataagtcaatctcgttacccattttcaatctgtggcttgacactatcctctccaaaacagctcgcccaccgtaagtgtcattctttactatgctctctgagtctaatgcctgaattcagatcttggctaactcatcgcatgcctgcacaagagctgcagatgttccaggctcctaggtcatgttagcacaaatgtttgcgcgatgatgtgttagagactcacactcgcagaatgtccggcatcgtgaatgaactgaagcttagaagcgggccaacccttgtgtacttcgtatgccgtaacaggggtacacaggatatcatatcgcccctggacgattcgccctggatccaatattagccgacatgtactctaccatatctctgtgcatatagactgaccaggtatgtccttaatcttggccatgttctcaggttttaaaagatggccatcttccatgtatcccttgttcttaaacaaatagtgagcctcaaatagcgcatgcgtccgacaccactccgcgtcgtccagtttgtcatagccgttcgggtcttggtaaagcgtgccaattgagagatcccagtgattccactcccagcatgccttttgagatatctccgggtcgtctgacataatgcgtttataatacgccatttgaatatcgtctcgttcgtcttcgggaatgaatgagacaaaccgttcccattcctggggatagaattctgcggcgatcgggttgtttttgtacctcaactcactagcccgtacggtgaagacacctcgtagta

SEQ ID NO: 5816 - DNA, 969 bp, Muscodor strobelii
  misc_feature: SGI cDNA ID NO. 561664
  misc_feature: Reduced expression when VOC is produced
  misc_feature: Encodes the peptide sequence at SEQ ID NO 5817
atggcgcaaggatatactcatgaaccagcgtatgacgcaggacatcttgctgtcagctcccttcatcagatctattacgagcaatatggaaagaaagacggattgccagtaatatttcttcacggaggacctggagggaagacaagcccagccaatgccaaatttttcaatccggatgtataccgcgtagttctcatggatcaacggggtgtaggcaaatctaaaccgcagaacgagctcgaggagaacacgacgcaacacctctccgatgacataaacaggctacgcgagcacctgggaatcgcgaagtggcacctggtgtttggcggatcatggggtagtgcactcgcgctcttctatgcgcaagcgcacccggaactcgtcagctctttagtaagtgatctagtactacgaggtgtcttcaccgtacgggctagtgagttgaggtacaaaaacaacccgatcgccgcagaattctatccccaggaatgggaacggtttgtctcattcattcccgaagacgaacgagacgatattcaaatggcgtattataaacgcattatgtcagacgacccggagatatctcaaaaggcatgctgggagtggaatcactgggatctctcaattggcacgctttaccaagacccgaacggctatgacaaactggacgacgcggagtggtgtcggacgcatgcgctatttgaggctcactatttgtttaagaacaagggatacatggaagatggccatcttttaaaacctgagaacatggccaagattaaggacatacctgggcgaatcgtccaggggcgatatgatatcctgtgtacccctgttacggcatacgaagtacacaagggttggcccgcttctaagcttcagttcattcacgatgccggacattctgcgagtgagcctggaacatctgcagctcttgtgcaggcatgcgatgagttagccaagatctga

SEQ ID NO: 5817 - protein, 322 aa, Muscodor strobelii
  misc_feature: SGI Peptide ID NO. 561664
  misc_feature (61)..(315): Pfam Id: PF00561 Pfam Desc: alpha/beta hydrolase fold
  misc_feature (61)..(134): Pfam Id: PF00561 Pfam Desc: alpha/beta hydrolase fold
  misc_feature (4)..(322): NCBI GI: 238843006 Blast Desc: proline iminopeptidase [Microsporum canis CBS 113480]
  misc_feature (4)..(322): NCBI GI: 169621853 Blast Desc: SNOG_14139 [Phaeosphaeria nodorum SN15] gi|160704636|gb|EAT78376.2| SNOG_14139 [Phaeosphaeria nodorum SN15]
  misc_feature (5)..(314): NCBI GI: 255950000 Blast Desc: Pc22g18620 [Penicillium chrysogenum Wisconsin 54-1255] gi|211592784|emb|CAP99150.1| Pc22g18620 [Penicillium chrysogenum Wisconsin 54-1255]
  misc_feature (4)..(317): NCBI GI: 189197109 Blast Desc: proline iminopeptidase [Pyrenophora tritici-repentis Pt-1C-BFP] gi|187980840|gb|EDU47466.1| proline iminopeptidase [Pyrenophora tritici-repentis Pt-1C-BFP]
  misc_feature (2)..(318): NCBI GI: 212532615 Blast Desc: proline iminopeptidase, [Penicillium marneffei ATCC 18224] gi|210071828|gb|EEA25917.1| proline iminopeptidase, [Penicillium marneffei ATCC 18224]
  misc_feature (11)..(322): NCBI GI: 242200625 Blast Desc: proline iminopeptidase [Phanerochaete chrysosporium]
  misc_feature (1)..(322): NCBI GI: 71003826 Blast Desc: UM00432.1 [Ustilago maydis 521] gi|46096110|gb|EAK81343.1| UM00432.1 [Ustilago maydis 521]
  misc_feature (11)..(322): NCBI GI: 30679088 Blast Desc: PIP; aminopeptidase [Arabidopsis thaliana] gi|148880081|sp|P93732.3|PIP_ARATH RecName: Full=Proline iminopeptidase; Short=PIP; AltName: Full=Prolyl aminopeptidase;
  misc_feature (11)..(322): NCBI GI: 42570761 Blast Desc: PIP; aminopeptidase [Arabidopsis thaliana] gi|4406804|gb|AAD20113.1| proline iminopeptidase [Arabidopsis thaliana]
  misc_feature (11)..(320): NCBI GI: 254375095 Blast Desc: FTDG_01284 [Francisella novicida GA99-3548] gi|151572813|gb|EDN38467.1| FTDG_01284 [Francisella novicida GA99-3548]
  misc_feature (11)..(322): SWISSPROT Homolog: EC 3.4.11.5 Prolyl aminopeptidase
  misc_feature: Useful for introducing or modulating the production of volatile compounds
MAQGYTHEPAYDAGHLAVSSLHQIYYEQYGKKDGLPVIFLHGGPGGKTSPANAKFFNPDVYRVVLMDQRGVGKSKPQNELEENTTQHLSDDINRLREHLGIAKWHLVFGGSWGSALALFYAQAHPELVSSLVSDLVLRGVFTVRASELRYKNNPIAAEFYPQEWERFVSFIPEDERDDIQMAYYKRIMSDDPEISQKACWEWNHWDLSIGTLYQDPNGYDKLDDAEWCRTHALFEAHYLFKNKGYMEDGHLLKPENMAKIKDIPGRIVQGRYDILCTPVTAYEVHKGWPASKLQFIHDAGHSASEPGTSAALVQACDELAKI

SEQ ID NO: 5818 - DNA, 2121 bp, Muscodor strobelii
  misc_feature: SGI EST ID NO. CUFF.14958.1
  misc_feature: Variant of the nucleotide sequence at SEQ ID NO 5816
tactacgaggtgtcttcaccgtacgggctagtgagttgaggtacaaaaacaacccgatcgccgcagaattctatccccaggaatgggaacggtttgtctcattcattcccgaagacgaacgagacgatattcaaatggcgtattataaacgcattatgtcagacgacccggagatatctcaaaaggcatgctgggagtggaatcactgggatctctcaattggcacgctttaccaagacccgaacggctatgacaaactggacgacgcggagtggtgtcggacgcatgcgctatttgaggctcactatttgtttaagaacaagggatacatggaagatggccatcttttaaaacctgagaacatggccaagattaaggacatacctgggcgaatcgtccaggggcgatatgatatcctgtgtacccctgttacggcatacgaagtacacaagggttggcccgcttctaagcttcagttcattcacgatgccggacattctgcgagtgagcctggaacatctgcagctcttgtgcaggcatgcgatgagttagccaagatctgaattcaggcattagactcagagagcatagtaaagaatgacacttacggtgggcgagctgttttggagaggatagtgtcaagccacagattgaaaatgggtaacgagattgacttatttctatgagagccgcgggagtagatatacgaattatggagtgttttgttaccttaatataccgacgcattcgcgtctgcaactgctggaatatctttacctctctctgtccatgctttttcaaagaccctccgcagtctttcgagtgtgtcatccgcattttgcgcgatctgataatgcacaacaaggcgctcacccttgagccttaatccctcgcgttgccccatctcattgaatcgtgctaaggagatgccctcatctttcaaattgatgcagacaatattggtttgcacagggtacttcgtagtgccacccaagcttttccacatgctctcaatcacctttgccgtatcgtgtgagcgtttgaggagcccctgttgcccattagggctcgagccgaatgtctcgtccagtgccactcgcgctgcagcggtgatgagaccaggttgacgcagtcctccaccgatagccttccgaatatgtcgcgccacctggattgtctccgaatcgccgaccaaaatgcttcccacgggcgcgcctaagcccttcgagaaacaaagagtgaccgtatcaaagcaagccacataatcagtcaagctgccagcacccgcagcgacagcctcccaaagccgagcaccgtcgcaatgcattttaacattattcttcttcgcgaagaccgatattcgacgcacttcttctaagggtgcaatgaccccgtgaagtgtgttctccagactaatcaccttcgtcggacagccaatgatggaccctacagcctgaaagtgatcctcgacgtcttcaagcgtcagatacaatccatttcttggcactacaggacgaatcattgcacttgtcaatagtgcaactcctccagcttcgctgttgaaaatgtgagagcgactatcgcagagtatcgaatgagggggctgagttaacagggctctgagcgcgagttgatttcccattgtgccagataatacgaaaagagcggactgcgttcctgtcagagtagcgcagtgggcctcgagatcattcgttgtctcatcttcttgtgagacatcatcttgaagagtacatcgcgcgatcgcggctaacatagacggagtaggagttgtcaccacatcgccttgttcagcgatgattagcttgctacgttgattgttcaggaagcatgatacttacttcggaagtcgtatttcgctgaacctgatgaaccgagccatgtcacgttttggatttcttcgctagacatgttgctttaatcctatcccctgtttatacgaaatgcaagaaagacctgacgcagatcgtcagtcctcgatcagctcgactggagtacaaagtgtctgttacacgacgatacgaccgtaggtaggatactatatagtcacaatttggatggttaaccgtaattggaatcgccgcctgacaaatggataccgaa

SEQ ID NO: 5819 - DNA, 1926 bp, Muscodor strobelii
  misc_feature: SGI cDNA ID NO. 561665
  misc_feature: Encodes the peptide sequence at SEQ ID NO 5820
atgaaagatgacatcggagaaccgctatctgaaatcaagaagcattataatcaacctcttgtgtcattactgatggatatacaaagggctgagatacagcatctcaagtcggcagagttcgtgcagaaattagattgtttgatgctccccaagcaaggcatggaattatgtcctggggagggatcagcgaagtcttggagtgctgcccgagacaatacctttttaaaaacccaaataaactccttccgggagagaaactacgtcgctgtatcctatacttggcaacattcttcacctggagaagagccatatggtaattactatgttcaatcgaaggagaggaaaactaaaactaaatccgaagtccgagattcaatattcaagagggcaaaaaactacatgatacacaaccgacttcattatctttggatagataaggaatgcgttccccaggaagacggcaatgaaaaagaaatagctgttcaggcaatggatctggtctatagccacagcaaccacccaatcggcttgttgtgcgaaacaaaaatatcgaccgctgagcttagtttactagaaagccttatgacgaataaacccaaatacctcgtgggtatctctcacgagaaggatcacgatatcctcaagcttttagaaaaaattgtcggcgacaggtggtggactcgtgcatggacttaccaagaaaactaccgagggggtaagaacatgaatatattgatacaacgtgagtgcccacaagacgacaagattcatcatgatcgtcttttcgggaatctacccggcgagattgttctctcttcaaccaaattccatgcggccgcaaccgagttctgctcagcaatcaatcccccagcctttttggaagaagcgaaagaccttgtgctcagacaggctaggaggttcaaactccttttggaagagcctaacgagtacggctttgatattgcaacaaagtccatgacacatttgataattggagacatcgagaagcggcagttgaaaatccccctggatcgactgcccatcatcgcaaactgctgtcagtactccgttcgtctcgaccggattgaacttgagcaaagggggcatagtgtaagcctctccgttcttgccttgttcctcttgaatggagagattctatataatggccactatagcaatcgtatctcaggctctgataatattactcgcttcctggatgtgcaaggattcaggcaatactccccgcccaatcagactctgggtcttacattcaacaagagttgcagattcgtcgacgtggagctcacaaaagatgggataagaacacaagggcacctatggaaactgagttgcgagattgatgcttccaagttccctagatggcgtccattcgttgacgacgggggcagtttagaacgcgatgaacgacgcaatcttatgtttcttgcagatgagctgaatgagctggggtataagggactttctgaggagatttttaatttcctcaatcatggaggagagtcgcagaatagaaattcatttgcattggagtatcagatccacatggcccgagagctggcgaaagcagtcgatgaaggcagaaagcttcgattggggtgcctctggaatcccgatgatgagtacagtccatatcttggcatttttgtatgccgccgatttgaggcaagaaatcccgttaggtttgctttcacagcttctcgagagaagcacaacgattccgactctgtcctgttgaatgatatcgacaggcatgtgtcacttgaggttgacctcgaggaaactgcggtcaacgggccactgccgcgcctgtacacgagacggtggattcacgggttatgtttcttttacgggtgtcccaggattgatgttgtttttccttggccaaaggttctagcgcagatatga

SEQ ID NO: 5820 - protein, 641 aa, Muscodor strobelii
  misc_feature: SGI Peptide ID NO. 561665
  misc_feature (141)..(171): Pfam Id: PF06985 Pfam Desc: Heterokaryon incompatibility protein (HET)
  misc_feature (20)..(638): NCBI GI: 256722257 Blast Desc: NECHADRAFT_86861 [Nectria haematococca mpVI 77-13-4]
  misc_feature (21)..(637): NCBI GI: 46113901 Blast Desc: FG02946.1 [Gibberella zeae PH-1]
  misc_feature (1)..(638): NCBI GI: 238507972 Blast Desc: conserved [Aspergillus flavus NRRL3357] gi|220688706|gb|EED45058.1| conserved [Aspergillus flavus NRRL3357]
  misc_feature (3)..(634): NCBI GI: 28950026 Blast Desc: [Neurospora crassa]
  misc_feature (246)..(556): NCBI GI: 169784806 Blast Desc: [Aspergillus oryzae RIB40] gi|83775611|dbj|BAE65731.1| protein product [Aspergillus oryzae]
  misc_feature (139)..(449): NCBI GI: 189197077 Blast Desc: conserved [Pyrenophora tritici-repentis Pt-1C-BFP] gi|187980824|gb|EDU47450.1| conserved [Pyrenophora tritici-repentis Pt-1C-BFP]
  misc_feature (84)..(458): NCBI GI: 115387685 Blast Desc: [Aspergillus terreus NIH2624] gi|114195432|gb|EAU37132.1| [Aspergillus terreus NIH2624]
  misc_feature (138)..(449): NCBI GI: 169621859 Blast Desc: SNOG_14142 [Phaeosphaeria nodorum SN15] gi|160704638|gb|EAT78379.2| SNOG_14142 [Phaeosphaeria nodorum SN15]
  misc_feature (87)..(454): NCBI GI: 225682264 Blast Desc: [Paracoccidioides brasiliensis Pb03]
  misc_feature (87)..(454): NCBI GI: 226289638 Blast Desc: [Paracoccidioides brasiliensis Pb18]
MKDDIGEPLSEIKKHYNQPLVSLLMDIQRAEIQHLKSAEFVQKLDCLMLPKQGMELCPGEGSAKSWSAARDNTFLKTQINSFRERNYVAVSYTWQHSSPGEEPYGNYYVQSKERKTKTKSEVRDSIFKRAKNYMIHNRLHYLWIDKECVPQEDGNEKEIAVQAMDLVYSHSNHPIGLLCETKISTAELSLLESLMTNKPKYLVGISHEKDHDILKLLEKIVGDRWWTRAWTYQENYRGGKNMNILIQRECPQDDKIHHDRLFGNLPGEIVLSSTKFHAAATEFCSAINPPAFLEEAKDLVLRQARRFKLLLEEPNEYGFDIATKSMTHLIIGDIEKRQLKIPLDRLPIIANCCQYSVRLDRIELEQRGHSVSLSVLALFLLNGEILYNGHYSNRISGSDNITRFLDVQGFRQYSPPNQTLGLTFNKSCRFVDVELTKDGIRTQGHLWKLSCEIDASKFPRWRPFVDDGGSLERDERRNLMFLADELNELGYKGLSEEIFNFLNHGGESQNRNSFALEYQIHMARELAKAVDEGRKLRLGCLWNPDDEYSPYLGIFVCRRFEARNPVRFAFTASREKHNDSDSVLLNDIDRHVSLEVDLEETAVNGPLPRLYTRRWIHGLCFFYGCPRIDVVFPWPKVLAQI

SEQ ID NO: 5821 - DNA, 165 bp, Muscodor strobelii
  misc_feature: SGI EST ID NO. CUFF.14705.0
  misc_feature: Variant of the nucleotide sequence at SEQ ID NO 5819
aagaaaactaccgagggggtaagaacatgaatatattgatacaacgtgagtgcccacaagacgacaagattcatcatgatcgtcttttcgggaatctacccggcgagattgttctctcttcaaccaaattccatgcggccgcaaccgagttctgctcagcaatca

SEQ ID NO: 5822 - DNA, 1227 bp, Muscodor strobelii
  misc_feature: SGI cDNA ID NO. 561666
  misc_feature: Encodes the peptide sequence at SEQ ID NO 5823
atgttcgccaacatgaatctgctgctctttttttcggtatgcgccggcatgattcatctttcaggagcgcagaagaatgtaaaaggtgtgcttcttgatgccaggctcaagtaccttctgcctgagggatacaatggcagtatatcaagcaacttcgtcgacatcacaatttcagggaatgtcaacgtatcacaggccttggaggcagcccgcgacgccgcattctatgcttactacgaagaattcttctcggttgtcggtgcctctcctacaatgcgagttatcgaaaacatcacatctggacttgcctacgaagccggtatttgggtgcccgatcgcaacgaagtctggtttactggttgggtagacgatgaagatcaccagactgctgttctcagtcttgatgattatactgtcactactttgaatctggaatacccgtcagatggcaatcctaattttatgggcgggagctacttggacggaaaagtgtacttcgctggcggtggtaatgcaaacgcctcgatcagtcctggcttgtatgcaatcgaccctcgcactaagaccgtgagcactgagatcaattcttactttggtgtcgcattaaacagccttgacgatttacatggagtcacggccaatcgatctcctggttctggcccttgcgcgcaatccggaacagatcacatctttttcacgacactagatctcggtgctaatggcgaagcatggtacggaacggctgttcttccaaatggagtattccgctatactccctccaagaaatcacttcaacaagtcatctcaagaaatgatgtgctagcacccaacggaattcgtacagattctacaggcaggtacctgtacgtcactgatgccgccattctctcagtcagcgggcccgggtcaaacagctctggccagcctgcaatatatcggtttgaactcgacgagaactgtatgccttttgataagcgtcttttcgcatttccacgcagcggtctagcggatggtgtacgtgtggacaaccgaggccgtgtttggacagctgagtggaatgggatcactgtcagggactcgctaggcaaggaactaggagtcttcaatgctgagtacttgaatagttctttggatcatataagtcagtttgcgctcgcgagaaacaaattggtcgtactctccggggacaagattcaggtgatccaattaggccagaatctcgcatag

SEQ ID NO: 5823 - protein, 408 aa, Muscodor strobelii
  misc_feature: SGI Peptide ID NO. 561666
  misc_feature (94)..(396): Pfam Id: PF08450 Pfam Desc: SMP-30/Gluconolaconase/LRE-like region
  misc_feature (32)..(407): NCBI GI: 145252902 Blast Desc: An16g06620 [Aspergillus niger] gi|134083519|emb|CAK46996.1| protein product [Aspergillus niger]
  misc_feature (7)..(405): NCBI GI: 154310079 Blast Desc: BC1G_06960 [Botryotinia fuckeliana B05.10] gi|150851748|gb|EDN26941.1| BC1G_06960 [Botryotinia fuckeliana B05.10]
  misc_feature (23)..(277): NCBI GI: 154315916 Blast Desc: BC1G_04530 [Botryotinia fuckeliana B05.10] gi|150846926|gb|EDN22119.1| BC1G_04530 [Botryotinia fuckeliana B05.10]
  misc_feature (68)..(404): NCBI GI: 3810873 Blast Desc: lactonohydrolase [Fusarium oxysporum] gi|6448475|dbj|BAA34218.2| lactonohydrolase [Fusarium oxysporum] gi|54013444|dbj|BAD54840.1| lactonase [Fusarium oxysporum]
  misc_feature (68)..(404): NCBI GI: 183238971 Blast Desc: levo-lactonase [Fusarium proliferatum]
  misc_feature (53)..(365): NCBI GI: 238506487 Blast Desc: gluconolactonase precursor, [Aspergillus flavus NRRL3357] gi|220689158|gb|EED45509.1| gluconolactonase precursor, [Aspergillus flavus NRRL3357]
  misc_feature (68)..(403): NCBI GI: 46115948 Blast Desc: FG03816.1 [Gibberella zeae PH-1]
  misc_feature (68)..(404): NCBI GI: 84683019 Blast Desc: evolved D-pantonohydrolase [synthetic construct]
  misc_feature (72)..(394): NCBI GI: 38636429 Blast Desc: lactonohydrolase [Neurospora crassa]
  misc_feature (62)..(366): NCBI GI: 226281370 Blast Desc: lactonohydrolase [Paracoccidioides brasiliensis Pb01]
MFANMNLLLFFSVCAGMIHLSGAQKNVKGVLLDARLKYLLPEGYNGSISSNFVDITISGNVNVSQALEAARDAAFYAYYEEFFSVVGASPTMRVIENITSGLAYEAGIWVPDRNEVWFTGWVDDEDHQTAVLSLDDYTVTTLNLEYPSDGNPNFMGGSYLDGKVYFAGGGNANASISPGLYAIDPRTKTVSTEINSYFGVALNSLDDLHGVTANRSPGSGPCAQSGTDHIFFTTLDLGANGEAWYGTAVLPNGVFRYTPSKKSLQQVISRNDVLAPNGIRTDSTGRYLYVTDAAILSVSGPGSNSSGQPAIYRFELDENCMPFDKRLFAFPRSGLADGVRVDNRGRVWTAEWNGITVRDSLGKELGVFNAEYLNSSLDHISQFALARNKLVVLSGDKIQVIQLGQNLA

SEQ ID NO: 5824 - DNA, 385 bp, Muscodor strobelii
  misc_feature: SGI EST ID NO. CUFF.14714.0
  misc_feature: Variant of the nucleotide sequence at SEQ ID NO 5822
ccgggtcaaacagctctggccagcctgcaatatatcggtttgaactcgacgagaactgtatgccttttgataagcgtcttttcgcatttccacgcagcggtctagcggatggtgtacgtgtggacaaccgaggccgtgtttggacagctgagtggaatgggatcactgtcagggactcgctaggcaaggaactaggagtcttcaatgctgagtacttgaatagttctttggatcatataagtcagtttgcgctcgcgagaaacaaattggtcgtactctccggggacaagattcaggtgatccaattaggccagaatctcgcataggcgacttcacggtgttgcatatcaatcaccattgactgttcaaaagtattcaatctctg

SEQ ID NO: 5825 - DNA, 1428 bp, Muscodor strobelii
  misc_feature: SGI cDNA ID NO. 561667
  misc_feature: Reduced expression when VOC is produced
  misc_feature: Encodes the peptide sequence at SEQ ID NO 5826
atgtctaccacgaagcttctgcttgctgcacttagcagtgtggctctggccgtccctgtagttgaggaacgacaaacgtgcgcgtcgttgtacgggcaatgtggcggcataggctggacgggcgcgacctgttgtgtgtccggcgcgacttgccaagtcggcaatgattactacagccagtgtcttgctggcgctggtggtactacgactggggcgggaacaacgactaccaagacaagcagtacaacatcaaaggcttcgagtactactacgactaaggtcacaactacggtgacgactactaaggccacaaccactaaggctacaactacagcggtcggcacagggactgctacttacagtggcaaccccttcgtaggggttacgcaatgggcaaattctttctacaagtcggaagtgtctgcatcggctgtcccaactcttggaaccaaggccgcggccgttgctgacgtacccaattttatgtggctggataccctctctaaagtccaagacaacctagcagataccttgaccgatatccgggcggccaacaaggctggcggcaatcaccttggtctctttgtcgtctatgatcttcctgatcgtgattgtgctgcggccgcctccaatggagagtactcgattgccaacaatggcgtagcaaactacaaggcgtacatcgatgcaatccggaaaattctggtccaattctccgatgttcgtgtcgcattggtcgttgaacctgactcgcttgccaacttggtgactaacctcagcgtggcgaagtgctctaatgcacaggctgcctatcttgaatgcacaaactatgcagtcatgcaactgaaccttcccaacgttgcgatgtatcttgatgcaggacatgccggctggctgggatggcccgccaaccttcaacccgctgcgaatctgttttaccaagtttattcggacgccggaaagccagcggcactccgaggccttgctaccaacgttgccaattataatgcctggacgatcagcacttgcccgtcatacacgcaaggcaactctgtttgcgacgagtccagctacatcaacgagcttgctcctctccttactgctaagggttggaatgcacacttcatcactgataccggccgcaatggtgttcagcctaccaaacaacaagcgtggggtgattggtgtaatgtcatcggtactggttttggtatccgcccatcatctaacactggtagtgaccttctcgatgcgttcacgtggatcaagcctggtggcgagtgcgatggtaccagcgacacttctgctgctcggtacgacttccactgcggtttggcagatgctcttcagcctgctcccgaggctggatcctggttcgaggcgtactttgagcagctttacaagaacgccaatcctgcatttacttaa

SEQ ID NO: 5826 - protein, 475 aa, Muscodor strobelii
  misc_feature: SGI Peptide ID NO. 561667
  misc_feature (30)..(58): Pfam Id: PF00734 Pfam Desc: Fungal cellulose binding domain
  misc_feature (132)..(441): Pfam Id: PF01341 Pfam Desc: Glycosyl hydrolases family 6
  misc_feature (17)..(474): NCBI GI: 121855 Blast Desc: GUX2_TRIRE RecName: Full=Exoglucanase 2; AltName: Full=Exoglucanase II; AltName: Full=Exocellobiohydrolase II; Short=CBHII; AltName: Full=1,4-beta-cellobiohydrolase; Flags: II
  misc_feature (21)..(474): NCBI GI: 34582636 Blast Desc: cellobiohydrolase II [Trichoderma viride]
  misc_feature (17)..(474): NCBI GI: 11692747 Blast Desc: cellobiohydrolase II [Hypocrea jecorina] gi|12667268|gb|AAK01367.1| cellobiohydrolase II [Hypocrea koningii]
  misc_feature (17)..(474): NCBI GI: 170543 Blast Desc: [Hypocrea jecorina]
  misc_feature (21)..(474): NCBI GI: 52547947 Blast Desc: cellobiohydrolase II precursor [Trichoderma parceramosum] gi|54145386|gb|AAV31052.1| cellobiohydrolase II [Trichoderma parceramosum]
  misc_feature (17)..(474): NCBI GI: 269308682 Blast Desc: cellobiohydrolase II [Trichoderma longibrachiatum]
  misc_feature (17)..(474): NCBI GI: 95115828 Blast Desc: cellobiohydrolase II [Hypocrea koningii]
  misc_feature (17)..(474): NCBI GI: 202072836 Blast Desc: cellubiohydrolase II [Trichoderma sp. XST1]
  misc_feature (17)..(474): NCBI GI: 110006643 Blast Desc: cbh2 [Hypocrea koningii]
  misc_feature (19)..(474): NCBI GI: 85074607 Blast Desc: exoglucanase 2 precursor [Neurospora crassa OR74A] gi|28922292|gb|EAA31534.1| exoglucanase 2 precursor [Neurospora crassa OR74A] gi|28949972|emb|CAD70733.1| cellulose 1, II crassa]
  misc_feature (22)..(474): SWISSPROT Homolog: EC 3.2.1.91 Cellulose 1,4-beta-cellobiosidase
  misc_feature: Useful for introducing or modulating the production of volatile compounds
MSTTKLLLAALSSVALAVPVVEERQTCASLYGQCGGIGWTGATCCVSGATCQVGNDYYSQCLAGAGGTTTGAGTTTTKTSSTTSKASSTTTTKVTTTVTTTKATTTKATTTAVGTGTATYSGNPFVGVTQWANSFYKSEVSASAVPTLGTKAAAVADVPNFMWLDTLSKVQDNLADTLTDIRAANKAGGNHLGLFVVYDLPDRDCAAAASNGEYSIANNGVANYKAYIDAIRKILVQFSDVRVALVVEPDSLANLVTNLSVAKCSNAQAAYLECTNYAVMQLNLPNVAMYLDAGHAGWLGWPANLQPAANLFYQVYSDAGKPAALRGLATNVANYNAWTISTCPSYTQGNSVCDESSYINELAPLLTAKGWNAHFITDTGRNGVQPTKQQAWGDWCNVIGTGFGIRPSSNTGSDLLDAFTWIKPGGECDGTSDTSAARYDFHCGLADALQPAPEAGSWFEAYFEQLYKNANPAFT

SEQ ID NO: 5827 - DNA, 2093 bp, Muscodor strobelii
  misc_feature: SGI EST ID NO. CUFF.14742.0
  misc_feature: Variant of the nucleotide sequence at SEQ ID NO 5825
cggatttttctctagcttgccacgagacgctgtgatgttccggagtcactagcttgggaacttaacgttgtgatcatttacgcttatatgactattgctctcaaaatgcatggttttgtatgtcttgaggctgcagtgtgcgcgcctgcgtgggctgatcacgcttcggaagcccaaccgcgtttccgtccacgtccacaatcctcggcgttacgcgccagctctcatgggcgtgctctcccgtatccccgttagtcattcatagagaatcattcgcgactaagttataaggtccgcgatcgacgtttgatgccgtgcaagacatctcttgaccacggacaaacaaacagccatcgagcccaaaagcgacgccatcggtcaatatgtctaccacgaagcttctgcttgctgcacttagcagtgtggctctggccgtccctgtagttgaggaacgacaaacgtgcgcgtcgttgtacgggcaatgtggcggcataggctggacgggcgcgacctgttgtgtgtccggcgcgacttgccaagtcggcaatgattactacagccagtgtcttgctggcgctggtggtactacgactggggcgggaacaacgactaccaagacaagcagtacaacatcaaaggcttcgagtactactacgactaaggtcacaactacggtgacgactactaaggccacaaccactaaggctacaactacagcggtcggcacagggactgctacttacagtggcaaccccttcgtaggggttacgcaatgggcaaattctttctacaagtcggaagtgtctgcatcggctgtcccaactcttggaaccaaggccgcggccgttgctgacgtacccaattttatgtggctggataccctctctaaagtccaagacaacctagcagataccttgaccgatatccgggcggccaacaaggctggcggcaatcaccttggtctctttgtcgtctatgatcttcctgatcgtgattgtgctgcggccgcctccaatggagagtactcgattgccaacaatggcgtagcaaactacaaggcgtacatcgatgcaatccggaaaattctggtccaattctccgatgttcgtgtcgcattggtcgttgaacctgactcgcttgccaacttggtgactaacctcagcgtggcgaagtgctctaatgcacaggctgcctatcttgaatgcacaaactatgcagtcatgcaactgaaccttcccaacgttgcgatgtatcttgatgcaggacatgccggctggctgggatggcccgccaaccttcaacccgctgcgaatctgttttaccaagtttattcggacgccggaaagccagcggcactccgaggccttgctaccaacgttgccaattataatgcctggacgatcagcacttgcccgtcatacacgcaaggcaactctgtttgcgacgagtccagctacatcaacgagcttgctcctctccttactgctaagggttggaatgcacacttcatcactgataccggccgcaatggtgttcagcctaccaaacaacaagcgtggggtgattggtgtaatgtcatcggtactggttttggtatccgcccatcatctaacactggtagtgaccttctcgatgcgttcacgtggatcaagcctggtggcgagtgcgatggtaccagcgacacttctgctgctcggtacgacttccactgcggtttggcagatgctcttcagcctgctcccgaggctggatcctggttcgaggcgtactttgagcagctttacaagaacgccaatcctgcatttacttaagtgactttttagacagtgaatagagcggggatgcttctagtagatggattaagaacgatacactctgcgaattcttgtacatatctcagcttcaatgactatacagattcatgacacgcgttatttatgctacccgcgattggactcggatttaataacttagtctatgctcggtcacacagtatgatcataagtatgattgttacaagggcaatcattgctgcaaatcacttcctgagctatgaatccacgcgaaagggtgtcacgattcctctgaggttg

SEQ ID NO: 5828 - DNA, 1443 bp, Muscodor strobelii
  misc_feature: SGI cDNA ID NO. 561668
  misc_feature: Encodes the peptide sequence at SEQ ID NO 5829
atgtctaccacgaagcttctgcttgctgcacttagcagtgtggctctggccgtccctgtagttgaggaacgacaaacgtgcgcgtcgttgtacgggcaatgtggcggcataggctggacgggcgcgacctgttgtgtgtccggcgcgacttgccaagtcggcaatgattactacagccagtgtcttgctggcgctggtggtactacgactggggcgggaacaacgactaccaagacaagcagtacaacatcaaaggcttcgagtactactacgactaaggtcacaactacggtggtaagtatcctaagtacgactactaaggccacaaccactaaggctacaactacagcggtcggcacagggactgctacttacagtggcaaccccttcgtaggggttacgcaatgggcaaattctttctacaagtcggaagtgtctgcatcggctgtcccaactcttggaaccaaggccgcggccgttgctgacgtacccaattttatgtggctggataccctctctaaagtccaagacaacctagcagataccttgaccgatatccgggcggccaacaaggctggcggcaatcaccttggtctctttgtcgtctatgatcttcctgatcgtgattgtgctgcggccgcctccaatggagagtactcgattgccaacaatggcgtagcaaactacaaggcgtacatcgatgcaatccggaaaattctggtccaattctccgatgttcgtgtcgcattggtcgttgaacctgactcgcttgccaacttggtgactaacctcagcgtggcgaagtgctctaatgcacaggctgcctatcttgaatgcacaaactatgcagtcatgcaactgaaccttcccaacgttgcgatgtatcttgatgcaggacatgccggctggctgggatggcccgccaaccttcaacccgctgcgaatctgttttaccaagtttattcggacgccggaaagccagcggcactccgaggccttgctaccaacgttgccaattataatgcctggacgatcagcacttgcccgtcatacacgcaaggcaactctgtttgcgacgagtccagctacatcaacgagcttgctcctctccttactgctaagggttggaatgcacacttcatcactgataccggccgcaatggtgttcagcctaccaaacaacaagcgtggggtgattggtgtaatgtcatcggtactggttttggtatccgcccatcatctaacactggtagtgaccttctcgatgcgttcacgtggatcaagcctggtggcgagtgcgatggtaccagcgacacttctgctgctcggtacgacttccactgcggtttggcagatgctcttcagcctgctcccgaggctggatcctggttcgaggcgtactttgagcagctttacaagaacgccaatcctgcatttacttaa

SEQ ID NO: 5829 - protein, 480 aa, Muscodor strobelii
  misc_feature: SGI Peptide ID NO. 561668
  misc_feature (30)..(58): Pfam Id: PF00734 Pfam Desc: Fungal cellulose binding domain
  misc_feature (137)..(446): Pfam Id: PF01341 Pfam Desc: Glycosyl hydrolases family 6
  misc_feature (21)..(479): NCBI GI: 121855 Blast Desc: GUX2_TRIRE RecName: Full=Exoglucanase 2; AltName: Full=Exoglucanase II; AltName: Full=Exocellobiohydrolase II; Short=CBHII; AltName: Full=1,4-beta-cellobiohydrolase; Flags: II
  misc_feature (21)..(479): NCBI GI: 34582636 Blast Desc: cellobiohydrolase II [Trichoderma viride]
  misc_feature (17)..(479): NCBI GI: 11692747 Blast Desc: cellobiohydrolase II [Hypocrea jecorina] gi|12667268|gb|AAK01367.1| cellobiohydrolase II [Hypocrea koningii]
  misc_feature (17)..(479): NCBI GI: 170543 Blast Desc: [Hypocrea jecorina]
  misc_feature (21)..(479): NCBI GI: 52547947 Blast Desc: cellobiohydrolase II precursor [Trichoderma parceramosum] gi|54145386|gb|AAV31052.1| cellobiohydrolase II [Trichoderma parceramosum]
  misc_feature (17)..(479): NCBI GI: 269308682 Blast Desc: cellobiohydrolase II [Trichoderma longibrachiatum]
  misc_feature (17)..(479): NCBI GI: 95115828 Blast Desc: cellobiohydrolase II [Hypocrea koningii]
  misc_feature (17)..(479): NCBI GI: 202072836 Blast Desc: cellubiohydrolase II [Trichoderma sp. XST1]
  misc_feature (17)..(479): NCBI GI: 110006643 Blast Desc: cbh2 [Hypocrea koningii]
  misc_feature (19)..(479): NCBI GI: 85074607 Blast Desc: exoglucanase 2 precursor [Neurospora crassa OR74A] gi|28922292|gb|EAA31534.1| exoglucanase 2 precursor [Neurospora crassa OR74A] gi|28949972|emb|CAD70733.1| cellulose 1, II crassa]
  misc_feature (125)..(479): SWISSPROT Homolog: EC 3.2.1.91 Cellulose 1,4-beta-cellobiosidase
MSTTKLLLAALSSVALAVPVVEERQTCASLYGQCGGIGWTGATCCVSGATCQVGNDYYSQCLAGAGGTTTGAGTTTTKTSSTTSKASSTTTTKVTTTVVSILSTTTKATTTKATTTAVGTGTATYSGNPFVGVTQWANSFYKSEVSASAVPTLGTKAAAVADVPNFMWLDTLSKVQDNLADTLTDIRAANKAGGNHLGLFVVYDLPDRDCAAAASNGEYSIANNGVANYKAYIDAIRKILVQFSDVRVALVVEPDSLANLVTNLSVAKCSNAQAAYLECTNYAVMQLNLPNVAMYLDAGHAGWLGWPANLQPAANLFYQVYSDAGKPAALRGLATNVANYNAWTISTCPSYTQGNSVCDESSYINELAPLLTAKGWNAHFITDTGRNGVQPTKQQAWGDWCNVIGTGFGIRPSSNTGSDLLDAFTWIKPGGECDGTSDTSAARYDFHCGLADALQPAPEAGSWFEAYFEQLYKNANPAFT

SEQ ID NO: 5830 - DNA, 2093 bp, Muscodor strobelii; identical to SEQ ID NO: 5827
  misc_feature: SGI EST ID NO. CUFF.14742.0
  misc_feature: Variant of the nucleotide sequence at SEQ ID NO 5828

SEQ ID NO: 5831 - DNA, 2934 bp, Muscodor strobelii
  misc_feature: SGI cDNA ID NO. 561669
  misc_feature: Encodes the peptide sequence at SEQ ID NO 5832
atgattccccgaagtaggatcggtgcgccagaatatgagaaatttaagtacgataccatcgagctgtttgacagctcagacggagaagaagattcgagtggggacgaatctatagaccaagaaccggccgagaggacgatgaagagaactcttaccagagctcagaaggagcaaaattttcccgacgctatggatcaaaagctgcagcgatggaacgaccggaataatagacgggtcgcaaatatgcaaaggcggctcgaccgtcaaatcctccgtcaccaagctcgtacgatacacgaagatcagaccgctatcaacaaaattgtagacgaactcggacaaactcataatacgtcacgtaaccttgtattgtcagctcttggtttgaagaacttcatgatgacctttgaaaattggagaaagtcaggattgacacgaaatctttacaacgactctcacttccagttagacaggagagactttattttgctagaatactgccagcttggcgacttacattcgtttataatccgggttatagccgaaggcgaaacaatacccaataaagtgctatggagcttctggctttgtctgattcgagcagtcattgcaatgtactacccaccacgcaaatttcatcctgcgcgaaagaatgcacaggtagacgggaacggtagaccgactaccgatcccggggtgccagtagccacaggagcatatctaacaagaggaaagcgagttggagcggatctgtatgaagacattccgccacaaaagaagcaacttggtgactttgggttggcccataagataaagccacacaaacgaaacggatactatcatcaatatcggaaactttgtaagattcgttatgcgacaccagaacatttcacacatgaatgggaggaattgcatgacacggttttgggacctgatgttaagatggacccagacggtggagaagtcgcagagtctgcggttgctggcaattttacatacaaaaccaatttgtaccagattgctttgaccatgtggaaccttatcactctgcgaatttatgatccgcctgccatacttgaagtagaaagtggccaaaatgccctgccgccacattatggcggatggatcaggggagtcgaagctgatagacgttacccacacatcgacggacagctcagaaggacgatagctcaatgtcttgctcatagaccagatgaccgccctgacttggacatcctccttgcagaggctagaattgcaattgaaagatttttcccaggcgagaacgatcatcagatctctgcttggattcaaaaaattttcaacacgccatacgacccatctgcgaatacaaatccaccgggaggaggcggaggcggaggtggaggaggaggtggaggaggtggaggaggaggaggaggtggtggtggtggcgaaggccttcgtccacctccaggatttaccccaagagcctcgcagtctgcaccaccacggccagctaatcctactccgaatcaaggggctgggcccccaccagcgcctcgtcctcgacaagcacggcctgcccgtactgatagccaacaagcacgcgatgatctcatcaagttgctcatacagaagggtggacgtgtgccaacaacagagtttaagcctccgccaaatgcatttacgcagcagcttttaggtgatacacaagggcaatccggacttgcgcaaggactctcatccacaagagcggaagcagcagacagctcacggtatcagtctcaagtcatgagctcaaatctgactgatcgccagcttgcctcgaccagtagcccctacgatccgcccgcaagtcgtgccactgtacctgatcctacaacaacagcaacgatcccacaggtgaccaggcgagctcctggcaatcgggttccgctagaagacgatgatgacgatctttatgacgccacgcctgagactgcttcacagcgcgagcgacgacttgcacgtgaacaagcacgctcgcctcccaatactgtgacgcagtcacaaccggcgagaccccaacttttccctggcactcggcgcgccgactctccttatggttcggatggcttttggatctcggaagagccaactacaggtccgcctagagttccttcccgtcctcagaactcagatggctcagggggttcggttgtgaaaacgcaacctgtgggcgagcaacccgatgcttttggagaatcttctttaaggaatctattcagtaggccatcagatgacttgcctactggcgtgaatccatttgccggtccattggggggatttcaacctggcttgcctgccggtacaaacgctgttggtggcccatcaggtgaagttcaacctgggccacctgctggcaccgctaacctcggtggcacattgagtggctttcagcctggtttgcctgctggcactcatagtcttggtggtccattagggggatttcaatctcagcgtcgaggagttcgtttcgcatcgcctttgtccgcggggggcccccaacctcagcaacaaccgccgcgagtggtgcgtccaatcgagtcttcaggtggaacagccagcagaagcacattttatacaattcaagaagaggggagccggcaactaccccatatgggtcgcgtgccagcaggccagactgggctcgctggaccatccaatatccctggtgcggcaaacccttctgccgttaccggaataacaggtggctcgacaaggaccgaccatagcagccctgccgtagtatcggatgtttctcccgcattctcggagtccttagatagtgagatgggtgacgtgtacgtaccatcgcagcagccatcgcctgcgctagttggtgctttgaatgtcccgggcgccttttctatgggctatcagaacaatggatggttcggcccggctctctga

SEQ ID NO: 5832 - protein, 977 aa, Muscodor strobelii
  misc_feature: SGI Peptide ID NO. 561669
  misc_feature (160)..(444): NCBI GI: 85111903 Blast Desc: NCU00763 [Neurospora crassa OR74A] gi|28925929|gb|EAA34924.1| [Neurospora crassa OR74A] gi|38636417|emb|CAE81954.1| [Neurospora crassa]
  misc_feature (162)..(444): NCBI GI: 171695774 Blast Desc: protein product [Podospora anserina] gi|170948129|emb|CAP60293.1| protein product [Podospora anserina]
  misc_feature (162)..(441): NCBI GI: 85109420 Blast Desc: NCU05722 [Neurospora crassa OR74A] gi|28924551|gb|EAA33672.1| [Neurospora crassa OR74A]
  misc_feature (161)..(452): NCBI GI: 116201425 Blast Desc: [Chaetomium globosum CBS 148.51] gi|88177115|gb|EAQ84583.1| [Chaetomium globosum CBS 148.51]
  misc_feature (104)..(413): NCBI GI: 145601223 Blast Desc: [Magnaporthe grisea 70-15] gi|145009254|gb|EDJ93965.1| [Magnaporthe grisea 70-15]
  misc_feature (143)..(442): NCBI GI: 85092153 Blast Desc: NCU06906 [Neurospora crassa OR74A] gi|28920656|gb|EAA30017.1| [Neurospora crassa OR74A]
  misc_feature (162)..(422): NCBI GI: 85081014 Blast Desc: NCU05146 [Neurospora crassa OR74A] gi|28881434|emb|CAD70551.1| [Neurospora crassa] gi|28917716|gb|EAA27408.1| [Neurospora crassa OR74A]
  misc_feature (157)..(372): NCBI GI: 116201421 Blast Desc: [Chaetomium globosum CBS 148.51] gi|88177113|gb|EAQ84581.1| [Chaetomium globosum CBS 148.51]
  misc_feature (160)..(417): NCBI GI: 145602223 Blast Desc: [Magnaporthe grisea 70-15] gi|145010659|gb|EDJ95315.1| [Magnaporthe grisea 70-15]
MIPRSRIGAPEYEKFKYDTIELFDSSDGEEDSSGDESIDQEPAERTMKRTLTRAQKEQNFPDAMDQKLQRWNDRNNRRVANMQRRLDRQILRHQARTIHEDQTAINKIVDELGQTHNTSRNLVLSALGLKNFMMTFENWRKSGLTRNLYNDSHFQLDRRDFILLEYCQLGDLHSFIIRVIAEGETIPNKVLWSFWLCLIRAVIAMYYPPRKFHPARKNAQVDGNGRPTTDPGVPVATGAYLTRGKRVGADLYEDIPPQKKQLGDFGLAHKIKPHKRNGYYHQYRKLCKIRYATPEHFTHEWEELHDTVLGPDVKMDPDGGEVAESAVAGNFTYKTNLYQIALTMWNLITLRIYDPPAILEVESGQNALPPHYGGWIRGVEADRRYPHIDGQLRRTIAQCLAHRPDDRPDLDILLAEARIAIERFFPGENDHQISAWIQKIFNTPYDPSANTNPPGGGGGGGGGGGGGGGGGGGGGGGGEGLRPPPGFTPRASQSAPPRPANPTPNQGAGPPPAPRPRQARPARTDSQQARDDLIKLLIQKGGRVPTTEFKPPPNAFTQQLLGDTQGQSGLAQGLSSTRAEAADSSRYQSQVMSSNLTDRQLASTSSPYDPPASRATVPDPTTTATIPQVTRRAPGNRVPLEDDDDDLYDATPETASQRERRLAREQARSPPNTVTQSQPARPQLFPGTRRADSPYGSDGFWISEEPTTGPPRVPSRPQNSDGSGGSVVKTQPVGEQPDAFGESSLRNLFSRPSDDLPTGVNPFAGPLGGFQPGLPAGTNAVGGPSGEVQPGPPAGTANLGGTLSGFQPGLPAGTHSLGGPLGGFQSQRRGVRFASPLSAGGPQPQQQPPRVVRPIESSGGTASRSTFYTIQEEGSRQLPHMGRVPAGQTGLAGPSNIPGAANPSAVTGITGGSTRTDHSSPAVVSDVSPAFSESLDSEMGDVYVPSQQPSPALVGALNVPGAFSMGYQNNGWFGPAL

SEQ ID NO: 5833 - DNA, 1602 bp, Muscodor strobelii
  misc_feature: SGI cDNA ID NO. 561670
  misc_feature: Reduced expression when VOC is produced
  misc_feature: Encodes the peptide sequence at SEQ ID NO 5834
atgccaaacgatgagaatatcccagccggagcgaatggatattcgcgtgctgggcctaacgatgagcagacccctttgctaagtaactcgaccatccccagcgaggaacatgcacaagatcacaacggcgacgagagagtcgttcttgtcgagaacgtcaccggcttaaagctttggactatattaggagcctgttggataggcgtgttcctcggcgctatcgactctaccatcattgcgactttgtcggctcctatctccagcgaattccaatccctgagtctgttgtcgtggctggcgactgcttacctcatttcgaatgccgcatgtcaacctctatctggacggatgaccgacatcttcggcagagggccaggactcatcttttcaaacgtcttcttcgccgcaggtaatctcatctgcggcctagcacagaatgccaacgtcatgatcctcggccgcgtcgtggcgggtatcggtggcggcggccttatggccattagcacgttcctgtctactgacttggtgcctcttcgtcgtcgtggaatcatccaaggcttaggaaatatctgttacgggagtggtgccatggtacctcctgtcctcgtcagtgcgtgcctggtagcttatcttgttcggatcccacccaaagtttcggagaagtcatatctcgcccgcatcgacttcacaggcgccatctcccttgttgtcttcctcgttcttcttctgctcggcctgaactccggtggcaatctggtgccgtggagtcatcctcttccgcttacaactttgccacttgctttggttgcattgatattcttcgtcatctttgaatctcgagcaaagcagcccgtgataccggtccgcctgttactcaataggaccgttgtctctgcctgcatgactaacatgttatgttgtatggttcaattcttggccttattctatgttcccctctaccttcaaacacttggtgttagtgcttctcgcgctggaatggtcatcttattctcccccttgggtatttttatctgctctgtaggtgctggattcatcatgcagaagacaggccgctacttgtacccggcaatagtggctgtttcgttacagcttgctggttcgatgatattggcctttctgcatcctaattccccttcctggcctttagacgtcgccttcttcttattcggctccggacaaggcgccatgcttactacaactctcttggcgtgtctggctgcagttgaacattcgaatcaagccacaataacgtcagcaacatatgctttccgatctgtgggcagtactcttggtattactataggctcagcgatctaccaaaacgtcctcaagacaaagctgtgggagcgcttcggcgatctgccgggtgctgctgaggagatcaaacgaatcagagacgacctcgatgaactgaaccaccttcctgaaggatggtacgacggtgtcatggcgtcattcatggaagcgttcgatagcgtttggtttacgatggtcggaatcgcatgcgctgcgttgatttcagtctcgctgataaaacaacataagcttcattcgacactggctcggaacgatgaggagtaa

SEQ ID NO: 5834 - protein, 533 aa, Muscodor strobelii
  misc_feature: SGI Peptide ID NO. 561670
  misc_feature (65)..(439): Pfam Id: PF07690 Pfam Desc: Major Facilitator Superfamily
  misc_feature (65)..(202): Pfam Id: PF07690 Pfam Desc: Major Facilitator Superfamily
  misc_feature (230)..(439): Pfam Id: PF07690 Pfam Desc: Major Facilitator Superfamily
  misc_feature (94)..(163): Pfam Id: PF00083 Pfam Desc: Sugar (and other) transporter
  misc_feature (20)..(530): NCBI GI: 256731454 Blast Desc: NECHADRAFT_63698 [Nectria haematococca mpVI 77-13-4]
  misc_feature (2)..(532): NCBI GI: 171692665 Blast Desc: protein product [Podospora anserina] gi|170946281|emb|CAP73082.1| protein product [Podospora anserina]
  misc_feature (20)..(484): NCBI GI: 46121497 Blast Desc: FG05127.1 [Gibberella zeae PH-1]
  misc_feature (2)..(532): NCBI GI: 85091168 Blast Desc: NCU09551 [Neurospora crassa OR74A] gi|28920154|gb|EAA29534.1| conserved [Neurospora crassa OR74A] gi|38566852|emb|CAE76158.1| related to multidrug resistance fnx1
  misc_feature (15)..(530): NCBI GI: 145609239 Blast Desc: MGG_07444 [Magnaporthe grisea 70-15] gi|145016630|gb|EDK01060.1| MGG_07444 [Magnaporthe grisea 70-15]
  misc_feature (2)..(532): NCBI GI: 116206264 Blast Desc: CHGG_02425 [Chaetomium globosum CBS 148.51] gi|88183022|gb|EAQ90490.1| CHGG_02425 [Chaetomium globosum CBS 148.51]
  misc_feature (19)..(530): NCBI GI: 258578265 Blast Desc: conserved [Uncinocarpus reesii 1704] gi|237903580|gb|EEP77981.1| conserved [Uncinocarpus reesii 1704]
  misc_feature (15)..(428): NCBI GI: 261351689 Blast Desc: multidrug resistance protein fnx1 [Verticillium albo-atrum VaMs.102]
  misc_feature (10)..(532): NCBI GI: 145244743 Blast Desc: An11g06860 [Aspergillus niger] gi|134079354|emb|CAK96983.1| protein product [Aspergillus niger]
  misc_feature (21)..(530): NCBI GI: 154322457 Blast Desc: BC1G_00571 [Botryotinia fuckeliana B05.10] gi|150847905|gb|EDN23098.1| BC1G_00571 [Botryotinia fuckeliana B05.10]
  misc_feature: Useful for introducing or modulating the production of volatile compounds
MPNDENIPAGANGYSRAGPNDEQTPLLSNSTIPSEEHAQDHNGDERVVLVENVTGLKLWTILGACWIGVFLGAIDSTIIATLSAPISSEFQSLSLLSWLATAYLISNAACQPLSGRMTDIFGRGPGLIFSNVFFAAGNLICGLAQNANVMILGRVVAGIGGGGLMAISTFLSTDLVPLRRRGIIQGLGNICYGSGAMVPPVLVSACLVAYLVRIPPKVSEKSYLARIDFTGAISLVVFLVLLLLGLNSGGNLVPWSHPLPLTTLPLALVALIFFVIFESRAKQPVIPVRLLLNRTVVSACMTNMLCCMVQFLALFYVPLYLQTLGVSASRAGMVILFSPLGIFICSVGAGFIMQKTGRYLYPAIVAVSLQLAGSMILAFLHPNSPSWPLDVAFFLFGSGQGAMLTTTLLACLAAVEHSNQATITSATYAFRSVGSTLGITIGSAIYQNVLKTKLWERFGDLPGAAEEIKRIRDDLDELNHLPEGWYDGVMASFMEAFDSVWFTMVGIACAALISVSLIKQHKLHSTLARNDEE

SEQ ID NO: 5835 - DNA, 900 bp, Muscodor strobelii
  misc_feature: SGI cDNA ID NO. 561671
  misc_feature: Reduced expression when VOC is produced
  misc_feature: Encodes the peptide sequence at SEQ ID NO 5836
atggcactttccgaaaagctcgacatcaacccggacaagatccccgtcatcaagctcagcctgcacatcgcccaggccgtcctcggcttgatcatcttcattctcgagatcatcatatttaccaagaaggactcgaccataaacggcaacaatggctggccatttggtctgtgcttcttgaacatccccgccttgctttacctcgccttgacccctaggtacgagcgcacgcgtagggccgcgcagccgcatgtcatggtggtcgttgatactctcttcaccatcttctggctgtcagccttcgccagccaagcagcctacaacaccgcaaacagctgtggccaagcctgcgccgtgagcaaagctgtggtcggcgtcggcttcttctcgacgctggcatgggctttctcaacagcggtcagcgtcttcacgctgcgctactaccaggccaacggcgagctaccaggctacgagagaatcggatcgttcacccagaacatcgaccccgacaaggctgctttctccatggcgccgcacgatgaggaggcctacgcgccgatcaacatggacgatcaccacgatgaccacaatgacaacgaccaccacagcaaccagccgtacgatccagattccttcggcgccaacaacgtgtacgagaccgagtcctcgtatcagccacagcacaccgcgtctccggcgccgcacgacaacccttttgctggcagcaacaactaccgaacacagggctcacccgctcctcagcacgaccccttctctgacccttatgcagcgccctcgggcggacctcagatttatgctccgccagctgctgaggaccactacgacgacgggcggcctgttcagttcccgagcgcgaattacgacaggactttgcactag

SEQ ID NO: 5836 - protein, 299 aa, Muscodor strobelii
  misc_feature: SGI Peptide ID NO. 561671
  misc_feature (7)..(299): NCBI GI: 261351674 Blast Desc: conserved [Verticillium albo-atrum VaMs.102]
  misc_feature (5)..(299): NCBI GI: 39972281 Blast Desc: MGG_07442 [Magnaporthe grisea 70-15] gi|145016628|gb|EDK01058.1| MGG_07442 [Magnaporthe grisea 70-15]
  misc_feature (7)..(297): NCBI GI: 256731451 Blast Desc: NECHADRAFT_63695 [Nectria haematococca mpVI 77-13-4]
  misc_feature (3)..(295): NCBI GI: 171693461 Blast Desc: protein product [Podospora anserina] gi|170946679|emb|CAP73482.1| protein product [Podospora anserina]
  misc_feature (5)..(197): NCBI GI: 85089664 Blast Desc: NCU09527 [Neurospora crassa OR74A] gi|28919367|gb|EAA28816.1| conserved [Neurospora crassa OR74A]
  misc_feature (6)..(296): NCBI GI: 46121493 Blast Desc: FG05125.1 [Gibberella zeae PH-1]
  misc_feature (28)..(256): NCBI GI: 154322451 Blast Desc: BC1G_00568 [Botryotinia fuckeliana B05.10] gi|150847902|gb|EDN23095.1| BC1G_00568 [Botryotinia fuckeliana B05.10]
  misc_feature (28)..(247): NCBI GI: 156065417 Blast Desc: SS1G_00719 [Sclerotinia sclerotiorum 1980] gi|154691578|gb|EDN91316.1| SS1G_00719 [Sclerotinia sclerotiorum 1980]
  misc_feature (3)..(296): NCBI GI: 116206284 Blast Desc: CHGG_02435 [Chaetomium globosum CBS 148.51] gi|88183032|gb|EAQ90500.1| CHGG_02435 [Chaetomium globosum CBS 148.51]
  misc_feature (17)..(229): NCBI GI: 242818064 Blast Desc: conserved [Talaromyces stipitatus ATCC 10500] gi|218713517|gb|EED12941.1| conserved [Talaromyces stipitatus ATCC 10500]
  misc_feature: Useful for introducing or modulating the production of volatile compounds
MALSEKLDINPDKIPVIKLSLHIAQAVLGLIIFILEIIIFTKKDSTINGNNGWPFGLCFLNIPALLYLALTPRYERTRRAAQPHVMVVVDTLFTIFWLSAFASQAAYNTANSCGQACAVSKAVVGVGFFSTLAWAFSTAVSVFTLRYYQANGELPGYERIGSFTQNIDPDKAAFSMAPHDEEAYAPINMDDHHDDHNDNDHHSNQPYDPDSFGANNVYETESSYQPQHTASPAPHDNPFAGSNNYRTQGSPAPQHDPFSDPYAAPSGGPQIYAPPAAEDHYDDGRPVQFPSANYDRTLH

SEQ ID NO: 5837 - DNA, 1989 bp, Muscodor strobelii
  misc_feature: SGI EST ID NO. CUFF.14841.2
  misc_feature: Variant of the nucleotide sequence at SEQ ID NO 5835
cgcgcgttcccctgtctcccgtcagcccaactcagcccacgagtggatggcagtggaacgtgggcaggcaagcgcatcgtcaggtaaccaaataataaaaaactggacaacttatctgaccagcgactcccttacctcacaaggtctctatattcctcccgaatgcgaggcgccgtgcagcgaatcattgttctatcgcactctcgttctcaaatcctctaagcgcttctccttctctacgcaacaacataaacacaacatcgacttcgtcaacagcgactgcgacccaccgacgacgaccccgacgacgacttcccgaacatttcgaggcgacacagcactatccgactccatcgatctatcagaccttttctcgcccgtcaactcgcatctcgatcctgcatctcgcgaacagcaatccatctcgtggtctatctgccaggactgtgtcggcagaccacgacagtcgctgggtttctcccctcgtgcacctaggtataaacacgtacacatctatccacatccatacggaagtactctacacaaataagtcaagaccgagaccgacaccaagatggcactttccgaaaagctcgacatcaacccggacaagatccccgtcatcaagctcagcctgcacatcgcccaggccgtcctcggcttgatcatcttcattctcgagatcatcatatttaccaagaaggactcgaccataaacggcaacaatggctggccatttggtctgtgcttcttgaacatccccgccttgctttacctcgccttgacccctaggtacgagcgcacgcgtagggccgcgcagccgcatgtcatggtggtcgttgatactctcttcaccatcttctggctgtcagccttcgccagccaagcagcctacaacaccgcaaacagctgtggccaagcctgcgccgtgagcaaagctgtggtcggcgtcggcttcttctcgacgctggcatgggctttctcaacagcggtcagcgtcttcacgctgcgctactaccaggccaacggcgagctaccaggctacgagagaatcggatcgttcacccagaacatcgaccccgacaaggctgctttctccatggcgccgcacgatgaggaggcctacgcgccgatcaacatggacgatcaccacgatgaccacaatgacaacgaccaccacagcaaccagccgtacgatccagattccttcggcgccaacaacgtgtacgagaccgagtcctcgtatcagccacagcacaccgcgtctccggcgccgcacgacaacccttttgctggcagcaacaactaccgaacacagggctcacccgctcctcagcacgaccccttctctgacccttatgcagcgccctcgggcggacctcagatttatgctccgccagctgctgaggaccactacgacgacgggcggcctgttcagttcccgagcgcgaattacgacaggactttgcactagaaggtaactggttgtcgtccgagttcataaatcgggattttgcattgctctaccagacactgggccacgctcagggttctgactgttgccgcactccgacatcgtccgagagctactggctggaaggaagcgcacttagttgcattgctgccttatttgcgttactcgattcacaggcataaacagcctcgctctcctagcgccaatccatgacgaaacggtgaaatgcacgagagaaggagctgaagacttggcgagtaatttgtataaacagtgtgaagagcttgaggccagggtcgtgggttatgatgtgttttgaggtactacttgggaagctttgggttggtgttccggatatactcatcatgacctagtgatacccgagtgatatcgtgtatccatgaataagaatcgtttcgattttacttgcttgtttcgatgagtgagaggatggcgtgagatgtactggaagccggtgaaatgttgtaaagtgatgcaaaggaagtcttgcgaag

SEQ ID NO: 5838 - DNA, 690 bp, Muscodor strobelii
  misc_feature: SGI cDNA ID NO. 561672
  misc_feature: Encodes the peptide sequence at SEQ ID NO 5839
atgggccgcgaacttcaaaagcgcaaacggcgctcatcccgccccgccactcgccagccctcttccaccagatccaagctcacgaaccccctgggcaacaacatcgtcgcaaagaactggaacaaaaaagaaacaacaacccaaaactaccgccgtctcggcctagtaaaccgcctgcgcgcaccaacaggcggcgtggaacccatctccaagtccaagcactccaagaccaaaaccacatcttcatcaaccgcgcccaccgaccccttcgccctctcctcagtctccagaccactcacatcagaaacccgcgtcgagcgtgacgccaccggcaagattctgcgtgtaatatcctcttccaaaccacccaaagccaacccactaaacgatcccctcttgcatctcgacaccgactccgaagcctctgcctccgacgccgaagaagcagaggaatggggtggcttcgacggggagcagaacgagatcgtgaaacagctggagaacgaggcgaatagaccgattgcgaagaaaccccgtgttgccagcgagagggaggtcgagtggttggagagtctagtcgcgagacatggggatgatacgaaggcgatgagtagggatagaaagctgaatcctatgcagcagactgagggcgatattaagaagagattaagaaagtggagaggtgaatag

SEQ ID NO: 5839 - protein, 229 aa, Muscodor strobelii
  misc_feature: SGI Peptide ID NO. 561672
  misc_feature (4)..(228): Pfam Id: PF09420 Pfam Desc: Ribosome biogenesis protein Nop16
  misc_feature (1)..(229): NCBI GI: 46121491 Blast Desc: FG05124.1 [Gibberella zeae PH-1]
  misc_feature (1)..(225): NCBI GI: 256731061 Blast Desc: NECHADRAFT_84918 [Nectria haematococca mpVI 77-13-4]
  misc_feature (1)..(227): NCBI GI: 261351675 Blast Desc: Nop16-like protein [Verticillium albo-atrum VaMs.102]
  misc_feature (1)..(225): NCBI GI: 171693463 Blast Desc: protein product [Podospora anserina] gi|170946680|emb|CAP73483.1| protein product [Podospora anserina]
  misc_feature (1)..(219): NCBI GI: 145609241 Blast Desc: MGG_07449 [Magnaporthe grisea 70-15] gi|189031613|sp|A4R9U5.1|NOP16_MAGGR RecName: Full=Nucleolar protein 16 gi|145016635|gb|EDK01065.1| MGG_07449 [Magnaporthe
  misc_feature (1)..(228): NCBI GI: 172046084 Blast Desc: MGG_07449 [Magnaporthe grisea 70-15] gi|189031613|sp|A4R9U5.1|NOP16_MAGGR RecName: Full=Nucleolar protein 16 gi|145016635|gb|EDK01065.1| MGG_07449 [Magnaporthe
  misc_feature (1)..(225): NCBI GI: 85089666 Blast Desc: NCU09528 [Neurospora crassa OR74A] gi|74614591|sp|Q7S0I1.1|NOP16_NEUCR RecName: Full=Nucleolar protein 16 gi|28919368|gb|EAA28817.1| [Neurospora crassa OR74A]
  misc_feature (1)..(227): NCBI GI: 154320211 Blast Desc: BC1G_02086 [Botryotinia fuckeliana B05.10] gi|206558268|sp|A6RNR4.1|NOP16_BOTFB RecName: Full=Nucleolar protein 16 gi|150854825|gb|EDN30017.1| BC1G_02086 [Botryotinia
  misc_feature (1)..(227): NCBI GI: 156065557 Blast Desc: SS1G_00789 [Sclerotinia sclerotiorum 1980] gi|206558293|sp|A7E664.1|NOP16_SCLS1 RecName: Full=Nucleolar protein 16 gi|154691648|gb|EDN91386.1| SS1G_00789 [Sclerotinia
  misc_feature (1)..(227): NCBI GI: 115433350 Blast Desc: conserved [Aspergillus terreus NIH2624] gi|121735203|sp|Q0CDP3.1|NOP16_ASPTN RecName: Full=Nucleolar protein 16 gi|114189664|gb|EAU31364.1| conserved [Aspergillus
MGRELQKRKRRSSRPATRQPSSTRSKLTNPLGNNIVAKNWNKKETTTQNYRRLGLVNRLRAPTGGVEPISKSKHSKTKTTSSSTAPTDPFALSSVSRPLTSETRVERDATGKILRVISSSKPPKANPLNDPLLHLDTDSEASASDAEEAEEWGGFDGEQNEIVKQLENEANRPIAKKPRVASEREVEWLESLVARHGDDTKAMSRDRKLNPMQQTEGDIKKRLRKWRGE

SEQ ID NO: 5840 - DNA, 1319 bp, Muscodor strobelii
  misc_feature: SGI EST ID NO. CUFF.14845.0
  misc_feature: Variant of the nucleotide sequence at SEQ ID NO 5838
ttgggcaatcgcgagcaacactccagcccgccttcccattcagcagaccaattcgtgatctcagctgacatttttgacgacaccccgaacttgaaactacaaatttgcagtcaaatacatctacacaccaggacttagtcataccgcatatcccatagacccacgatgggccgcgaacttcaaaagcgcaaacggcgctcatcccgccccgccactcgccagccctcttccaccagatccaagctcacgaaccccctgggcaacaacatcgtcgcaaagaactggaacaaaaaagaaacaacaacccaaaactaccgccgtctcggcctagtaaaccgcctgcgcgcaccaacaggcggcgtggaacccatctccaagtccaagcactccaagaccaaaaccacatcttcatcaaccgcgcccaccgaccccttcgccctctcctcagtctccagaccactcacatcagaaacccgcgtcgagcgtgacgccaccggcaagattctgcgtgtaatatcctcttccaaaccacccaaagccaacccactaaacgatcccctcttgcatctcgacaccgactccgaagcctctgcctccgacgccgaagaagcagaggaatggggtggcttcgacggggagcagaacgagatcgtgaaacagctggagaacgaggcgaatagaccgattgcgaagaaaccccgtgttgccagcgagagggaggtcgagtggttggagagtctagtcgcgagacatggggatgatacgaaggcgatgagtagggatagaaagctgaatcctatgcagcagactgagggcgatattaagaagagattaagaaagtggagaggtgaataggggagacactcgctcatgcgaatacctcctcgcagtcgatgccgctgctttcgggaattctacgctctttcaccacagactcattcatccgcttcaagaacaagaaccggcctaccacgcgcaccatgctccgcgcccaaatggagactacgagttgttgtcaaggttcgcgtgttgcttgacgaagtggcatgtagacgtaatggagaagtgtctggcgtgagtgccccgttcatggctgtacactcggtagcattactctcgatcttggtagggaacgagctgtagggaggatgcgtgggacccagaaggacggggcagagcaggcagaagggggttgcctgtggacaaagcttgcattgggaggcgtttagttggggtttgttgtttctatatcgagataccatattatatgatctcttttacttcacaacctcacgacctccgtcttattaagcttgaag

SEQ ID NO: 5841 - DNA, 2505 bp, Muscodor strobelii
  misc_feature: SGI cDNA ID NO. 561673
  misc_feature: Encodes the peptide sequence at SEQ ID NO 5842
atgacggtctccggtcctcctccttccaacaaccagtccaaggacgcacaggcggcccgcaagcgcaggagaagggcaccggccggcggagctgcagacgactgcttcacttgcatcaagaggaataccaaatgcgataggcggagaccttactgctcacaatgtttggaaattgggaatgagtgttcaggttacaagacgcagctcacctggggtgtaggagtggcaagtcgaggcaagcttcgaggtctttctttgcccattgcaaaagcaccacctgttgcgcctgtgacaaaaaagcaggcaactcgagcaagagcagcttcagccgcaacttcaaaccaatggagcgatacggaagaggctccacggagaaatcatcgccgggacgacgtcgatctcggagttcatcatgcttccgtgccacccactccctacggctcctacccagaatatcctagatactcgcatggcgagccgacgacaacggtatcacacacaccatggggcagcctgccggcctacgccgggcacatgagcgctcatgaacctcccaaattccataagctcaatacttccatgggtcatttccccattatgaacgaaccactctcttcctcggtggactcactcagcgatgttgactacacattgtctccgatggctcactcatttcccagagaggagatgccctttatgcacagccctaccttgatatatgagcagtatccggcccagagctcaccggtaccaccgagtcccgtgtccgccatcatgattgatcagcgggcgccaacgtcctgcccaagcctcgtgtatgcgcagtctgagcatagctctagccttggttcacaccatgacggtttcgagcctcatatggctcctaggctgatctcggacagcgacacaatgagcgttccggagctggattcatatagtaccagccctcactcaaccagcgggccgtactggcctccgtcccacgctcgagacgacgatatggctcaccatcacacgatggaacactcggccatgtcccacctctcttacgagagcccagccctccaggttagccctgatctcattgctaaaatgccattcttcatggattattacgagaacatcatgtgcccatccttggttctcatagacgggccggaaaacccctacagagatcacatcctgcgactagcgtcgaacagccgaagcctccaacacgccatctgtgccctatccgcgtgtaacctgaggatgaagagaagactaagtctgggtcaacacaccagggactccccattatcgacagccgaaaatggtgctactgaacacctgtcggaagctcatcgggacgaccgctctatggcggaagagcacgatcaccgcaacctcgccgtgcatctgctcaacgtgcagctcaacgacccatcgaagtcctgtcacgattccgtattggccacaattctcctgctgtgtcactaccgcatggtcgaatccggtgtggcgaaatttcaaacgcagttcgcaggtgtcaagaagattctgagcatgcgtaagtctgtgcatttccagggatccgcccaatctgcatggatggaggccgtcttcacctatttcgactccgtctcggccagcatcaacgaccgggaggctcaactgacgacttcattctttggaatgtcctcggaagccaatctccttcctcccggtgccgaaaatctcgtcggatgtgatcgtgaactcttcaagacaatcaacaagctcggccgactgaacctcatgtctcaaaaccgatccgtccagaacccacccagccgcagtgagactcccacaggcttctctcctctgggctcaccactgggcaacgccttcaagcaagaaaacggctttttcggcaatggcattgttggcaagattgaggaagaggagatactggcttccggtctcgtatctccccaaccttttgacgaccacccccgatcaggcttctggcgtgagtggaaggatgcgcacatggctctgcagacatgggagttcgagcctcagcgtctgattgccactcttcctaatggagcttcacagaacctcgttcgcgatgtcaactttctctctgaagcattccgatatgcagccctgctttaccttgagcgtctcgcagcaccgaccatgtcttccaaccaaaaccagttccgcaatctcgttagccagattgtgtactacgcgacgtccctcgaagcaggcagcagcgccgagaagttcctcctctggcccctttttgttgctggcagcgagtgcgtcaacgagctccagcaaaacatcgtgcgcaacaaatgccgcgacatcatgggtcgcagtggttacatgaacaacatggccgccatcgacgtcttggagcgtctctggcgcagcccaattcccaacgacaagcagcagcttcgtcgtggacctttcaactggacacgctgcattggtggacctggctgcgacgtcgagtggatcatgttttaa

SEQ ID NO: 5842 - protein, 834 aa, Muscodor strobelii
  misc_feature: SGI Peptide ID NO. 561673
  misc_feature (33)..(72): Pfam Id: PF00172 Pfam Desc: Fungal Zn(2)-Cys(6) binuclear cluster domain
  misc_feature (35)..(72): Pfam Id: PF00172 Pfam Desc: Fungal Zn(2)-Cys(6) binuclear cluster domain
  misc_feature (1)..(834): NCBI GI: 145609253 Blast Desc: MGG_07458 [Magnaporthe grisea 70-15] gi|145016644|gb|EDK01074.1| MGG_07458 [Magnaporthe grisea 70-15]
  misc_feature (29)..(834): NCBI GI: 85089668 Blast Desc: NCU09529 [Neurospora crassa OR74A] gi|28919369|gb|EAA28818.1| conserved [Neurospora crassa OR74A] gi|38566875|emb|CAE76181.1| [Neurospora crassa]
  misc_feature (15)..(834): NCBI GI: 256731448 Blast Desc: NECHADRAFT_858 [Nectria haematococca mpVI 77-13-4]
  misc_feature (1)..(834): NCBI GI: 171693465 Blast Desc: protein product [Podospora anserina] gi|170946681|emb|CAP73484.1| protein product [Podospora anserina]
  misc_feature (156)..(834): NCBI GI: 261351687 Blast Desc: conserved [Verticillium albo-atrum VaMs.102]
  misc_feature (8)..(756): NCBI GI: 116206278 Blast Desc: CHGG_02432 [Chaetomium globosum CBS 148.51] gi|88183029|gb|EAQ90497.1| CHGG_02432 [Chaetomium globosum CBS 148.51]
  misc_feature (18)..(833): NCBI GI: 154320207 Blast Desc: BC1G_02084 [Botryotinia fuckeliana B05.10] gi|150854823|gb|EDN30015.1| BC1G_02084 [Botryotinia fuckeliana B05.10]
  misc_feature (18)..(833): NCBI GI: 156065553 Blast Desc: SS1G_00787 [Sclerotinia sclerotiorum 1980] gi|154691646|gb|EDN91384.1| SS1G_00787 [Sclerotinia sclerotiorum 1980]
  misc_feature (30)..(834): NCBI GI: 189200070 Blast Desc: conserved [Pyrenophora tritici-repentis Pt-1C-BFP] gi|187983471|gb|EDU48959.1| conserved [Pyrenophora tritici-repentis Pt-1C-BFP]
  misc_feature (30)..(816): NCBI GI: 240108804 Blast Desc: CPC735_023090 [Coccidioides posadasii C735 delta SOWgp]
MTVSGPPPSNNQSKDAQAARKRRRRAPAGGAADDCFTCIKRNTKCDRRRPYCSQCLEIGNECSGYKTQLTWGVGVASRGKLRGLSLPIAKAPPVAPVTKKQATRARAASAATSNQWSDTEEAPRRNHRRDDVDLGVHHASVPPTPYGSYPEYPRYSHGEPTTTVSHTPWGSLPAYAGHMSAHEPPKFHKLNTSMGHFPIMNEPLSSSVDSLSDVDYTLSPMAHSFPREEMPFMHSPTLIYEQYPAQSSPVPPSPVSAIMIDQRAPTSCPSLVYAQSEHSSSLGSHHDGFEPHMAPRLISDSDTMSVPELDSYSTSPHSTSGPYWPPSHARDDDMAHHHTMEHSAMSHLSYESPALQVSPDLIAKMPFFMDYYENIMCPSLVLIDGPENPYRDHILRLASNSRSLQHAICALSACNLRMKRRLSLGQHTRDSPLSTAENGATEHLSEAHRDDRSMAEEHDHRNLAVHLLNVQLNDPSKSCHDSVLATILLLCHYRMVESGVAKFQTQFAGVKKILSMRKSVHFQGSAQSAWMEAVFTYFDSVSASINDREAQLTTSFFGMSSEANLLPPGAENLVGCDRELFKTINKLGRLNLMSQNRSVQNPPSRSETPTGFSPLGSPLGNAFKQENGFFGNGIVGKIEEEEILASGLVSPQPFDDHPRSGFWREWKDAHMALQTWEFEPQRLIATLPNGASQNLVRDVNFLSEAFRYAALLYLERLAAPTMSSNQNQFRNLVSQIVYYATSLEAGSSAEKFLLWPLFVAGSECVNELQQNIVRNKCRDIMGRSGYMNNMAAIDVLERLWRSPIPNDKQQLRRGPFNWTRCIGGPGCDVEWIMF

SEQ ID NO: 5843 - DNA, 3967 bp, Muscodor strobelii
  misc_feature: SGI EST ID NO. CUFF.15211.0
  misc_feature: Variant of the nucleotide sequence at SEQ ID NO 5841
cccatcctgatctcacaagctcaaatgcccaacccaccaccagaacccacccgttgtctggctcgacagattggtacatgatgacttgtacccgtgaagcttgttgcaagccaccaagaccatcagagacgagggacccctgctatctctgttccctgctcatctggtggatcccatggaggttggacgatggagcgagggtcctcgggtcttgcatgggatatggcgttgtaccttttctgttccctgcactagacctagtcggcctaggagttctctgatgggatcatggctgctttgtctctgagtggttctattgtacttgtattagtgatgttgtaggggcaagaaggtacaacatggatgaggtgagagtagagatcttgacttatatctaaaagccgtcactcatcccgcctctgcactcccctccccatgcagtgtcatatatgacctcttgcttctcgaaactcccgaaccaagtttttccatattaatgacatttacccacaccagtcaatttgcttgttgttgatagcccagacttgttcgtacttacaacagctctgagagacagcagttgacggcatagacagcatcctgtaccaatttttgcctcctttcaaatttagccacatgcgagtctgagtttagagcacgttacattatacactctaacagaaacacttatagtggttaagtgaaaatgacggtctccggtcctcctccttccaacaaccagtccaaggacgcacaggcggcccgcaagcgcaggagaagggcaccggccggcggagctgcagacgactgcttcacttgcatcaagaggaataccaaatgcgataggcggagaccttactgctcacaatgtttggaaattgggaatgagtgttcaggttacaagacgcagctcacctggggtgtaggagtggcaagtcgaggcaagcttcgaggtctttctttgcccattgcaaaagcaccacctgttgcgcctgtgacaaaaaagcaggcaactcgagcaagagcagcttcagccgcaacttcaaaccaatggagcgatacggaagaggctccacggagaaatcatcgccgggacgacgtcgatctcggagttcatcatgcttccgtgccacccactccctacggctcctacccagaatatcctagatactcgcatggcgagccgacgacaacggtatcacacacaccatggggcagcctgccggcctacgccgggcacatgagcgctcatgaacctcccaaattccataagctcaatacttccatgggtcatttccccattatgaacgaaccactctcttcctcggtggactcactcagcgatgttgactacacattgtctccgatggctcactcatttcccagagaggagatgccctttatgcacagccctaccttgatatatgagcagtatccggcccagagctcaccggtaccaccgagtcccgtgtccgccatcatgattgatcagcgggcgccaacgtcctgcccaagcctcgtgtatgcgcagtctgagcatagctctagccttggttcacaccatgacggtttcgagcctcatatggctcctaggctgatctcggacagcgacacaatgagcgttccggagctggattcatatagtaccagccctcactcaaccagcgggccgtactggcctccgtcccacgctcgagacgacgatatggctcaccatcacacgatggaacactcggccatgtcccacctctcttacgagagcccagccctccaggttagccctgatctcattgctaaaatgccattcttcatggattattacgagaacatcatgtgcccatccttggttctcatagacgggccggaaaacccctacagagatcacatcctgcgactagcgtcgaacagccgaagcctccaacacgccatctgtgccctatccgcgtgtaacctgaggatgaagagaagactaagtctgggtcaacacaccagggactccccattatcgacagccgaaaatggtgctactgaacacctgtcggaagctcatcgggacgaccgctctatggcggaagagcacgatcaccgcaacctcgccgtgcatctgctcaacgtgcagctcaacgacccatcgaagtcctgtcacgattccgtattggccacaattctcctgctgtgtcactaccgcatggtcgaatccggtgtggcgaaatttcaaacgcagttcgcaggtgtcaagaagattctgagcatgcgtaagtctgtgcatttccagggatccgcccaatctgcatggatggaggccgtcttcacctatttcgactccgtctcggccagcatcaacgaccgggaggctcaactgacgacttcattctttggaatgtcctcggaagccaatctccttcctcccggtgccgaaaatctcgtcggatgtgatcgtgaactcttcaagacaatcaacaagctcggccgactgaacctcatgtctcaaaaccgatccgtccagaacccacccagccgcagtgagactcccacaggcttctctcctctgggctcaccactgggcaacgccttcaagcaagaaaacggctttttcggcaatggcattgttggcaagattgaggaagaggagatactggcttccggtctcgtatctccccaaccttttgacgaccacccccgatcaggcttctggcgtgagtggaaggatgcgcacatggctctgcagacatgggagttcgagcctcagcgtctgattgccactcttcctaatggagcttcacagaacctcgttcgcgatgtcaactttctctctgaagcattccgatatgcagccctgctttaccttgagcgtctcgcagcaccgaccatgtcttccaaccaaaaccagttccgcaatctcgttagccagattgtgtactacgcgacgtccctcgaagcaggcagcagcgccgagaagttcctcctctggcccctttttgttgctggcagcgagtgcgtcaacgagctccagcaaaacatcgtgcgcaacaaatgccgcgacatcatgggtcgcagtggttacatgaacaacatggccgccatcgacgtcttggagcgtctctggcgcagcccaattcccaacgacaagcagcagcttcgtcgtggacctttcaactggacacgctgcattggtggacctggctgcgacgtcgagtggatcatgttttaagcacgattgtcataccgtatataccccatcaacgttttccgacatcatcatcactatatctgcctatctacccacctcttcctgtcttgatactaaaggggatcacgcggtctatcgagataacgttttggcaatgcacgacatcatggacacggagttactgttttcaaccgcgcttttctattctttgtgctctcgtttcaacacagcgacgttttcatacctaatgtttccgttgcctttgttcattgcttttatttctttgttcatatgatgcgatcaattcatcgtaacgtttccggttacgaatatgtacttatagcgcgctcacacacatttgcatggatgatggatggtattggcggcaggcatttattgtatgtatgggtctcatcatgtcctggttcggaggccttggtcgcagaccgaaaagcgaaccaaacggccgcgcgcatctcggtggaaacaagagcacacaaaaagttccccgccagatgacggattgattcatttattctgtatgtacggtatactatgagacaggttcgtggattcgcacgagacgacgaataccatggtggcacataaaaggatacataggtcggagctcgagaaggggcggataaatgaaatatcatcatcaccatcgacaatcattgtcttcatcgttgtcttgataaaaatgacactcaaatcatcgtgacatgtcttgacttctgtgcatgtactttagattttccatcaactcaacccctg

SEQ ID NO: 5844 - DNA, 2916 bp, Muscodor strobelii
  misc_feature: SGI cDNA ID NO. 561674
  misc_feature: Encodes the peptide sequence at SEQ ID NO 5845
atgcgcagcaattttacttcctgtctcgagacagatgatgagcagcagatgggtagcgaacgccatgatcctgggcctgaccagaagtcaatcaccattctaccgcaagttcgagaatgcaactgggaatccttcatgaatgacttcgaccctgatgggccaaaatatgccatcgacgtgttgttggcaggaccgacactcgacacagacgtaaggaatgagaatagaagaagacatcgtctcaaagtcaaaggctatgaacctgaacttcatgatcttgtcactaagcaggacggatccgaaagctggattgaatatgtaagaatccgttcaatgccactgttgaacgtcttcagccaagtgacgggatacgactggggtcagaagcctcgaacgttcgagccgccgttcaaaggcatgatacacttccataatgcatttcttgacgagtacaagaagttgcaaaggactttgatggagcaaaaagttccgacatgtgaagcagacaggctatgttctcccgctaacaatgacgaagaaacaacatcggaatttgagaaagcgcaatggtctaacgaagtttccgacggacagagtatcttgctcgaaacccgccgggctttggaccatctccaatgctatatcgagtttgttgaaaaacgtatcatatctcgagtcgaatcaattcgtaaggcaaatttttcgaactcggtaaaggttcaattcgcagaattatggcacattttcaaaccaggggacttgatatatataccgccaaaaacattggaggattggatgagacttatcgccctgggggtcgaccttcgatacgagaatgatccaagccatgaatcttctatgcaacaagccgtgtggagattatactccgtttatagcaacattgatgttcatacgcagacaataacgtcgttctctgcctattgctactatctagactacaatgggacctcatacggagctgtgtcttgcaccttcgacattccctttttttatggacgaaaagaagtgaagaacctcgatttctatcctctgcgcttctctcctgattcgaaggatattctgcgagagtcgaagcgcactggcgaattattcactgagtatatctcgagcgatcatctgtcgtacgagggttggtctatgatcacaaacccagttggtataccgataccggatttctcggcccggagtgggcgacttagacaagtacatccgaagtacattgattctgaggtgattgtcgatttcaaagaagcattcaatgatagcccctggtattatcaaaagttcaatgactacgagccataccatagcgggtttgcaacagcccatgggcacatattgttcgacaagttcttgacctggtcagaaagcaaagtcatatcgtccaggccagaggttgtctacagtatgaataacgttgaccagctagaacaggatgacttcctcaagaatgaactttatctgaagcgaacatcctcaagcaagccgatacccactggtgatgacttagcattactacccaggcgagtattcgtacaagtccttaacatgcgagagtttctccctgttgatgtgaggtatctcagacgacatcgcgtagagccggatgcgtttgataacgtacagcttccgagtgtacacaaagagatgattcaagccgctattcatgctcatttgcgaaaacaagacatggaatctcagtttaagcaaaagggaattactgaaaccaaggctcaagatttcatacagaggaaggggcatggtcttatcataatgctccacggagaacctggcgtagggaagacggccacagcagaggctgtagctcggttcactggccgtcctttgtgttccatcgcttgtggctctttagtcgataatagcaatttggaaggtgaacttgacgaaatcttccgtctggcacataaatacgggtgcattctgctcctagacgaggccgatgtgttactcacggccaggagctctacgggtgacttgcctagaaacgcaatggtgtcgatttttttgcaaaaagtcgaatactatagtggcattctctttttgactactaataggattggtaaactcgatcaagccgtttcatccaggatacatttgatacttcattataaacgtctcggcctagacaggatacaaaaagtatttaagctgaatatcaagagactccaagacattgagcaacaacaacaatctgtgaacacagatcatccattgttcgtagtcgaaccggatatcatgcggttcgccgaggaccattgccaaaaacacccaaacggaaagggagcatggaacggacgtcaaatccgcaacgcgttcacgatggccgcatctctagcccgatatgaagcgaaggcgataaacgacaaaaactatcagcctcagctgagatattcccattttgaagaggtcgaaaaaatcatgacagattttgatcagtttcgcgccaatgttctcggtggcgatgatgcacggagagctcggctgaacgaggagcgagatgatgattatgagcccgacgaggctgatcgtcaaagcccaggtccaatcatgtccatcatgcaatacccctctttcagcaacaggaacacacacgtcaagaaccgagtcaaaactcatcagaccatgaacccagccagttcaccatcataccaccagctcttacaagtgcatcccgggactaaatctagaggtacagatcgcctccaggtcgccactccaaacatacaatcggagtacgacagaacctctataccagggactggtggtcaaggagcacagcagtgggcacaacgaacacaaagtctgagtctcagtagctcgccgagttcagatggcatggagcaagacggtcaaacgtcactctcagaaggatag

SEQ ID NO: 5845 - protein, 971 aa, Muscodor strobelii
  misc_feature: SGI Peptide ID NO. 561674
  misc_feature (597)..(772): Pfam Id: PF00004 Pfam Desc: ATPase family associated with various cellular activities (AAA)
  misc_feature (597)..(711): Pfam Id: PF00004 Pfam Desc: ATPase family associated with various cellular activities (AAA)
  misc_feature (24)..(905): NCBI GI: 116203341 Blast Desc: CHGG_09555 [Chaetomium globosum CBS 148.51] gi|88178073|gb|EAQ85541.1| CHGG_09555 [Chaetomium globosum CBS 148.51]
  misc_feature (31)..(851): NCBI GI: 171681389 Blast Desc: protein product [Podospora anserina] gi|170940653|emb|CAP65881.1| protein product [Podospora anserina]
  misc_feature (31)..(846): NCBI GI: 256725321 Blast Desc: NECHADRAFT_45867 [Nectria haematococca mpVI 77-13-4]
  misc_feature (34)..(793): NCBI GI: 46114954 Blast Desc: FG03319.1 [Gibberella zeae PH-1]
  misc_feature (34)..(837): NCBI GI: 256724231 Blast Desc: [Nectria haematococca mpVI 77-13-4]
  misc_feature (46)..(851): NCBI GI: 256726318 Blast Desc: NECHADRAFT_43342 [Nectria haematococca mpVI 77-13-4]
  misc_feature (25)..(849): NCBI GI: 116201997 Blast Desc: CHGG_08883 [Chaetomium globosum CBS 148.51] gi|88177401|gb|EAQ84869.1| CHGG_08883 [Chaetomium globosum CBS 148.51]
  misc_feature (23)..(848): NCBI GI: 67526315 Blast Desc: AN3615.2 [Aspergillus nidulans FGSC A4] gi|40740633|gb|EAA59823.1| AN3615.2 [Aspergillus nidulans FGSC A4] gi|259481858|tpe|CBF75772.1| TPA: conserved [Aspergillus FGSC
  misc_feature (36)..(867): NCBI GI: 119467011 Blast Desc: AAA family ATPase, [Neosartorya fischeri NRRL 181] gi|119405464|gb|EAW15415.1| AAA family ATPase, [Neosartorya fischeri NRRL 181]
  misc_feature (37)..(895): NCBI GI: 145237766 Blast Desc: An07g04480 [Aspergillus niger] gi|134076004|emb|CAK48198.1| protein product [Aspergillus niger]
MRSNFTSCLETDDEQQMGSERHDPGPDQKSITILPQVRECNWESFMNDFDPDGPKYAIDVLLAGPTLDTDVRNENRRRHRLKVKGYEPELHDLVTKQDGSESWIEYVRIRSMPLLNVFSQVTGYDWGQKPRTFEPPFKGMIHFHNAFLDEYKKLQRTLMEQKVPTCEADRLCSPANNDEETTSEFEKAQWSNEVSDGQSILLETRRALDHLQCYIEFVEKRIISRVESIRKANFSNSVKVQFAELWHIFKPGDLIYIPPKTLEDWMRLIALGVDLRYENDPSHESSMQQAVWRLYSVYSNIDVHTQTITSFSAYCYYLDYNGTSYGAVSCTFDIPFFYGRKEVKNLDFYPLRFSPDSKDILRESKRTGELFTEYISSDHLSYEGWSMITNPVGIPIPDFSARSGRLRQVHPKYIDSEVIVDFKEAFNDSPWYYQKFNDYEPYHSGFATAHGHILFDKFLTWSESKVISSRPEVVYSMNNVDQLEQDDFLKNELYLKRTSSSKPIPTGDDLALLPRRVFVQVLNMREFLPVDVRYLRRHRVEPDAFDNVQLPSVHKEMIQAAIHAHLRKQDMESQFKQKGITETKAQDFIQRKGHGLIIMLHGEPGVGKTATAEAVARFTGRPLCSIACGSLVDNSNLEGELDEIFRLAHKYGCILLLDEADVLLTARSSTGDLPRNAMVSIFLQKVEYYSGILFLTTNRIGKLDQAVSSRIHLILHYKRLGLDRIQKVFKLNIKRLQDIEQQQQSVNTDHPLFVVEPDIMRFAEDHCQKHPNGKGAWNGRQIRNAFTMAASLARYEAKAINDKNYQPQLRYSHFEEVEKIMTDFDQFRANVLGGDDARRARLNEERDDDYEPDEADRQSPGPIMSIMQYPSFSNRNTHVKNRVKTHQTMNPASSPSYHQLLQVHPGTKSRGTDRLQVATPNIQSEYDRTSIPGTGGQGAQQWAQRTQSLSLSSSPSSDGMEQDGQTSLSEG

SEQ ID NO: 5846 - DNA, 1726 bp, Muscodor strobelii
  misc_feature: SGI EST ID NO. CUFF.14808.1
  misc_feature: Variant of the nucleotide sequence at SEQ ID NO 5844
ttcacatcctactcaatgctgatatgttgagctcaaaatcaaaagttatacaagcttaagaaatgaccgacacaaaagatgtcgctacgcagactcacgatgaaattcgcactgatgctccacgtcgaacaatgcgcagcaattttacttcctgtctcgagacagatgatgagcagcagatgggtagcgaacgccatgatcctgggcctgaccagaagtcaatcaccattctaccgcaagttcgagaatgcaactgggaatccttcatgaatgacttcgaccctgatgggccaaaatatgccatcgacgtgttgttggcaggaccgacactcgacacagacgtaaggaatgagaatagaagaagacatcgtctcaaagtcaaaggctatgaacctgaacttcatgatcttgtcactaagcaggacggatccgaaagctggattgaatataaacaacatcggaatttgagaaagcgcaatggtctaacgaagtttccgacggacagagtatcttgctcgaaacccgccgggctttggaccatctccaatgctatatcgagtttgttgaaaaacgtatcatatctcgagtcgaatcaattcgtaaggcaaatttttcgaactcggtaaaggttcaattcgcagaattatggcacattttcaaaccaggggacttgatatatataccgccaaaaacattggaggattggatgagacttatcgccctgggggtcgaccttcgatacgagaatgatccaagccatgaatcttctatgcaacaagccgtgtggagattatactccgtttatagcaacattgatgttcatacgcagacaataacgtcgttctctgcctattgctactatctagactacaatgggacctcatacggagctgtgtcttgcaccttcgacattccctttttttatggacgaaaagaagtgaagaacctcgatttctatcctctgcgcttctctcctgattcgaaggatattctgcgagagtcgaagcgcactggcgaattattcactgagtatatctcgagcgatcatctgtcgtacgagggttggtctatgatcacaaacccagttggtataccgataccggatttctcggcccggagtgggcgacttagacaagtacatccgaagtacattgattctgaggtgattgtcgatttcaaagaagcattcaatgatagcccctggtattatcaaaagttcaatgactacgagccataccatagcgggtttgcaacagcccatgggcacatattgttcgacaagttcttgacctggtcagaaagcaaagtcatatcgtccaggccagaggttgtctacagtatgaataacgttgaccagctagaacaggatgacttcctcaagaatgaactttatctgaagcgaacatcctcaagcaagccgatacccactggtgatgacttagcattactacccaggcgagtattcgtacaagtccttaacatgcgagagtttctccctgttgatgtgaggtatctcagacgacatcgcgtagagccggatgcgtttgataacgtacagcttccgagtgtacacaaagagatgattcaagccgctattcatgctcatttgcgaaaacaagacatggaatctcagtttaagcaaaagggaattactgaaaccaaggctcaagatttcatacagaggaaggggcatggtcttatcataatgctccacggagaacctggc

SEQ ID NO: 5847 - DNA, 1617 bp, Muscodor strobelii
  misc_feature: SGI cDNA ID NO. 561675
  misc_feature: Encodes the peptide sequence at SEQ ID NO 5848
atggaagtagcaaaaaccgaatgtgaagcaaggactaagaactcgaaactccgagcattgccaaggaaccgtgctaccgtagagacgttgtactcgctcgcagatacaattcccgaccagtatggtctcagcattgtcagaggaagtatgaagactatttttgagctactcaaaaagcgaatagacaatcgcgagaagatactgcagacctttgaagacatcccgtcaatgttcttgaaggcttgcgaagctttcagtatacatccaggcgatcccattcttcgcaatcacgtggaaaacctatgcgcgacaatcagaaatgaagcttctaaactaacggctttactcaaccctgagaggaagagtttctcaccattgcggatgatcaagcatcacccagtagaagtgtcaagcaccattgacacgtgtctaagccacatcaacagagcagctcagcaggtatctgatagagctagtttcttgaaagatgagatggcagtcaaaaacttacaggcgacacagagaatagactcacgagtcagcgagactcatgtccaagtcacaggattgtatgccgggcttcaggaaattcaggatcggcaaatagagggtgagagatggcatatagcagatcgcgaaagccgagatcaggatctccagcggttctcatatgtcatcgaccggaagctagatcatatggcagacagcttcaggaaagaagtattgcatcttcatcaagatatctcacggcgtttggaacaaattcccttgcccttttatagcttccaatatgagccgcaacaaacaccagtccgatatttggcccaaccccaatctcagcctctcctgatcaccaacgatgatcacagtacggaccactttgcttatatcgcctcgatcaatgatgacctcgaggaagtagccagaaaacgacatcagttcaacgaacaagcaatggcacgggcgagctggcttctcgtggctgagagattccaaacttggatgcagttctccgagagtcaatccgacctgatgttagtagacgcgtacctcggtgaccatacgataggcaaagtctccccgttgtctctaatcacggtggccctccagactttagtaaaccatcagccgcacctggtgatcctctatttcttctgcggtcttcatctacgcgacgagagcatcccaatgggtccccagggcatgctacagagtctgatcgcgcagcttaccttccgactacagctcttagatccggcgattatgcactatgtcgaagacatatatgctagagtcggcatcaacgaccacgccgacatttcgcaactctgcgccctatttgctgcactgatcaatctctttccctctgatacgacgatctactgtattctgaacgacatctccgagtttgaaacgtccttgcacggctgggaagacgagctgtgtgccattttcgactattttcgccatctaatacacaatcgggcaatcaatgtcaccttgaaattactgatgaccgtcgctcacaagagcatcacgatttgccggcgcgttcatccgagtgaatatatcacgctcgaggcgggaaatgcgagatctgacgatgccgtgttttag

SEQ ID NO: 5848 - protein, 538 aa, Muscodor strobelii
  misc_feature: SGI Peptide ID NO. 561675
  misc_feature (1)..(518): NCBI GI: 116203339 Blast Desc: CHGG_09554 [Chaetomium globosum CBS 148.51] gi|88178072|gb|EAQ85540.1| CHGG_09554 [Chaetomium globosum CBS 148.51]
  misc_feature (1)..(482): NCBI GI: 171681387 Blast Desc: protein product [Podospora anserina] gi|170940652|emb|CAP65880.1| protein product [Podospora anserina]
  misc_feature (10)..(530): NCBI GI: 256725449 Blast Desc: NECHADRAFT_83084 [Nectria haematococca mpVI 77-13-4]
  misc_feature (30)..(530): NCBI GI: 145237768 Blast Desc: An07g04490 [Aspergillus niger] gi|134076005|emb|CAK48199.1| protein product [Aspergillus niger]
  misc_feature (26)..(506): NCBI GI: 119467009 Blast Desc: NFIA_047490 [Neosartorya fischeri NRRL 181] gi|119405463|gb|EAW15414.1| NFIA_047490 [Neosartorya fischeri NRRL 181]
  misc_feature (27)..(529): NCBI GI: 242816998 Blast Desc: TSTA_052730 [Talaromyces stipitatus ATCC 10500] gi|218713328|gb|EED12752.1| TSTA_052730 [Talaromyces stipitatus ATCC 10500]
  misc_feature (35)..(472): NCBI GI: 116201999 Blast Desc: CHGG_08884 [Chaetomium globosum CBS 148.51] gi|88177402|gb|EAQ84870.1| CHGG_08884 [Chaetomium globosum CBS 148.51]
  misc_feature (22)..(519): NCBI GI: 67522266 Blast Desc: AN1590.2 [Aspergillus nidulans FGSC A4] gi|40745141|gb|EAA64297.1| AN1590.2 [Aspergillus nidulans FGSC A4] gi|259486921|tpe|CBF85173.1| TPA: conserved [Aspergillus FGSC
  misc_feature (13)..(538): NCBI GI: 145228711 Blast Desc: An01g02260 [Aspergillus niger] gi|134054756|emb|CAK43596.1| protein product [Aspergillus niger]
  misc_feature (301)..(511): NCBI GI: 159122744 Blast Desc: AFUB_097190 [Aspergillus fumigatus A1163]
MEVAKTECEARTKNSKLRALPRNRATVETLYSLADTIPDQYGLSIVRGSMKTIFELLKKRIDNREKILQTFEDIPSMFLKACEAFSIHPGDPILRNHVENLCATIRNEASKLTALLNPERKSFSPLRMIKHHPVEVSSTIDTCLSHINRAAQQVSDRASFLKDEMAVKNLQATQRIDSRVSETHVQVTGLYAGLQEIQDRQIEGERWHIADRESRDQDLQRFSYVIDRKLDHMADSFRKEVLHLHQDISRRLEQIPLPFYSFQYEPQQTPVRYLAQPQSQPLLITNDDHSTDHFAYIASINDDLEEVARKRHQFNEQAMARASWLLVAERFQTWMQFSESQSDLMLVDAYLGDHTIGKVSPLSLITVALQTLVNHQPHLVILYFFCGLHLRDESIPMGPQGMLQSLIAQLTFRLQLLDPAIMHYVEDIYARVGINDHADISQLCALFAALINLFPSDTTIYCILNDISEFETSLHGWEDELCAIFDYFRHLIHNRAINVTLKLLMTVAHKSITICRRVHPSEYITLEAGNARSDDAVF

SEQ ID NO: 5849 - DNA, 1461 bp, Muscodor strobelii
  misc_feature: SGI EST ID NO. CUFF.14807.2
  misc_feature: Variant of the nucleotide sequence at SEQ ID NO 5847
tgcttagtgacaagatcatgaagttcaggttcatagcctttgactttgagacgatgtcttcttctattctcattccttacgtctgtgtcgagtgtcggtcctgccaacaacacgtcgatggcatattttggcccatcagggtcgaagtcattcatgaaggattcccagttgcattctcgaacttgcggtagaatggtgattgacttctggtcaggcccaggatcatggcgttcgctacccatctgctgctcatcatctgtctcgagacaggaagtaaaattgctgcgcattgttcgacgtggagcatcagtgcgaatttcatcgtgagtctgcgtagcgacatcttttgtgtcggtcatttcttaagcttgtataacttttgctaattgatcgtcagctacgtgctctatgaggtgatactgcccttcacgctaatcggacgacttggtaattctggagcacacccacattttgagctcaacatatcagcattgagtaggatgtgaaattttgttgttttaatactattgaaggacaatgcaatagtgcatcattcctaaaaagccttggacgaaaatggctgggggccaaaaagcgcctaacgaagcgagcgggggttagctattgcagcagcagaacatagccccgaatcttagctgaagtagggttccatcagacgcatcatgaactacgtagagatatcgatcatggcggttgattggctcttggatgttgtcgattgccaccacgtatctaagaggatttgtggctaagtgatgtggaaggcgctgccacctggtgaagctcctcagactagcccagaactgccggttttaattcgagatgttgcgaaaggagctctccttatttcaatttcttgcgacattgaaaacaagctacgcatataatgaactcgttggtgataagcggcatgttagctggtgagagtgagtccacggtttcgagttggaggggcattgagaggtccgtacgccaaatccgggatctgagctgtgcacctgtttttcttacaatagtacccagcaatacccaggacaacgtcccgtcgagtgctttagagcatacgccaatctttcaagactgttcttgggatcaagttttggattctatggaagtagcaaaaaccgaatgtgaagcaaggactaagaactcgaaactccgagcattgccaaggaaccgtgctaccgtagagacgttgtactcgctcgcagatacaattcccgaccagtatggtctcagcattgtcagaggaagtatgaagactatttttgagctactcaaaaagcgaatagacaatcgcgagaagatactgcagacctttgaagacatcccgtcaatgttcttgaaggcttgcgaagctttcagtatacatccaggcgatcccattcttcgcaatcacgtggaaaacctatgcgcgacaatcagaaatgaagcttctaa

SEQ ID NO: 5850 - DNA, 3992 bp, Muscodor strobelii
  misc_feature: SGI cDNA ID NO. 561676
  misc_feature: Reduced expression when VOC is produced
  misc_feature: Encodes the peptide sequence at SEQ ID NO 5851
atggactcgcacagattcctcgcgacagcaatgggaagagaggatggcaggggccaagatgatcgagaaaatgaagcgcattactatacctcccaccatcgagatggcgaggagaggaaccgcagccagtatggcggtagtagagcagaagctgactcgctgcgtggcccatcaacgtcgctagcaggattggggggaggtggagggcgacactcgcaagcgccgacacctccgatgttgaaatctccacccgcgacagcggcagggtttggagacagcagcagcagcatcagggttgggactgggactgggaggacgagttcagctacggcagcaaatgaaaagagaggtgcatcttggcttgatggaaatcaagcggaagaaaggaaagtagatgcaacaatagaagcgcggtcgcaagcagctggagctgaggcggaagcggcagggccaaacccaaagcatcgctactccagccgtcgtcagcaatcaacgcagcagcggtgggaggaacagcagcagcatcagcagcatcagcagcaatcgccgcccgggcatcacagtcctgcccatgtcggtgctgctcatcatccccatctagatgctgcccatgcatcatcgatacttgcatccatcaatgaccatctgcctcatgagcgcccacctcattcatccacgtcgatactaaacaccacgaccccagacgcggtacacgcacatgggcgacagggtagtgacaacaacgagtatactacgtccaccacgtccactagccataaccatagccataaccataaccaccatggcagcggcggcggcgacggcctagatgagaaccgtgcccatgcccatgcccatgcccatgcccatgcccactcttttcaccctcaccctcacattcaatcccatcgtccatcgcaggtggtgcacggccaggcccatcgcggcgacggtgttcctagcatgacatctccgacggcaaaggcttcgacgcagcatttagattttcgtcagcccgcaccagccgccgcagcaggcactaaccatcaggataatgctcacttaatcacggccaacaccaacaatccgagtaacattggcagcgacatccgtagtagcagtagtaataaccaaccaccattcccagtattcccccaactcagcccgtcgtcaccaccagacttcttctccctttctctctccatcacccaccaaactctccgccaccatcgcccacccgcacccgcacccgcactcggcgatctcgtccatcctcgcgtcaccctcatccgccacgccaccatcgtcgtcgtcgcgacttcatcaccacccgcaccctcatccaccgcatccaccgccgctgcacacgacgtcggcgctgtcgcaccccttcaaccaccattatcaacagcagcactcgggcatcctggcgtcgccgtcgggctcgtcgtcgctccctcccctggcgcctccgccgggggccctgagctccatgatggcgtcgtcgtcggcgctgtcgtcgaccaacggcaacggcccgtcgagtgcatcgccgctgcagccgcccaaggccgactaccccgcgcccccgtgcacggcgagaagacgtctggcagcttctacgatccgctgacagactcgacgaagccgcgcaggacgtcggacggctggcctaagcagtcgcggtcggatgcctacgactaccctccgtccaagaacgagtcctctgcatactacaatgggtacggtccctcctccaccagctccagctccagcaccgccgcggccatgaatgcaaagagtgcaaactttgtcctgcgacacccacctgcacaccaccctcttcttgacaaagagactgacacgcccagtccctcgagcagcttcaggatgacctcgcccgcctcgcgtcatcactcccacaacccctccgacgcctacccctccgctcgccacactcccactccgggcgcctccatgtcgtccctcttgaatccggagcctgctcccaagactccggctgcctctacaagcacaccgagccgcgccgccgaactcatgtccttctccaacatcctctccagcgccgagccgctgcctaagccccgaccccccgtcatacccgagcccaaacgggaaaaggcaccacgcaagagcaagacccgcgactctatcctccgagactccgatagcaacgccaagaaggactctcgcaggtcctcttcggcccgcggcgagagagaggtgctcgccaagccagccaagcgactggccaacggcaatcccaagcccaagcccgccatctccgcagacaaagagaagaagatcctcgctaagctcgaggagctcgaggctaaagccgaccatgtggacctggccgagctcgacatggaggaggaccacttccggaagcagcagaagaggcgcaggctgaaccaggaacgctcgtactacgacgagcacctggcccgtcgccgcgagttgacaacccttttgggacgtaagatggcccaagacgcgtccttcgcgcgagaacgcttcgagcagctgaactacgacgaggcactgcacgaggtccgggaacgcgagatctacgccgagaaggagcgcaagaaggacatgcagcgcaaacgcagacgcgagaagtcgatgcaggtcaccatcgagcagaaggaggcggctctcgccagagccctcgccgccgaggacgaagccgaacgggccaaacacctgcgtgaggctgagcgtgctaataaaaaggctcagcaaaccaagttgatcctcgacagaggcatcaagggccccgcccgcgggctgcaggccctcgagctcaacttggatggcggtaccatgtcctcgatccaaggcaccgatcaggagtccaacgccggcggcaacgagaagagcagcaagacgaggagcaagaagtccgggagccgacctaagaagtccaaggagcagaaacaggccgagaaagacgctgccgaggctgcacaggccgccttggatgccggcgaggagctgcctgcgccgcgcgaagaacgcgacaccaagattcgtatcaagatcgcgaagaaagacaaggagcccagggataaggacaaggactccaaagacgccgccaaggaagtcaaggagaaggagaaagctgtggacgagcctcctcctaatccactggagaccaagttccaatccaagggcttcaaccagatctacgaccagatctggagagacatggcgcggaaggacgtactcaagacgttcaagttggccagcgactcatacaccacgaaggcgtccaacctcaagaagacggcgattcttgcgtccaaagaagccaaacgatggcagctgcgtaccaacaaaggcactaaggatctccaggcccgtgccaagcgttgcatgcgtgacatgatgggcttctggaagcgcaacgaacgtgaagagcgagatctgcgcaagcaagccgaacggcaagagctggagaacgcccgcaaggaagaagccgaccgcgaagccgcccgccagaagaggaagctgaacttcttgatctcccagaccgagctgtactctcatttcatcggtaagaagatcaagacggacgaagtcgagcgcagtaccgacaacccagacatcgctcccgacgccaacgccccctccgcttcgaaccacgtcgatgttgccgagtctacgggacctgtgggcgccaaggtgaccgacttcaattctctcaacttcgaggaggaagacgaagagactttgaaacaggcggccatggccaatgcacagaatgctattgccgaggcccaagccaaggcacgcgccttcaacaagaatgacgatgacatggatgaggatggcgagatgaacttccagaaccctaccggtctgggcgaagtgactgtcgagcaacctaagctgctgaactgccagctgaaagagtaccaaatcaagggtctcaactggcttgccaacttgtacgaacaaggtat

SEQ ID NO: 5851 - protein, 1330 aa, Muscodor strobelii
  misc_feature: SGI Peptide ID NO. 561676
  misc_feature (528)..(1330): NCBI GI: 116198517 Blast Desc: CHGG_07414 [Chaetomium globosum CBS 148.51] gi|88178693|gb|EAQ86161.1| CHGG_07414 [Chaetomium globosum CBS 148.51]
  misc_feature (564)..(1330): NCBI GI: 171692537 Blast Desc: protein product [Podospora anserina] gi|170946217|emb|CAP73018.1| protein product [Podospora anserina]
  misc_feature (537)..(1330): NCBI GI: 46110288 Blast Desc: FG02026.1 [Gibberella zeae PH-1] gi|84029313|sp|Q4IL82.1|INO80_GIBZE RecName: Full= DNA helicase INO80
  misc_feature (679)..(1330): NCBI GI: 256728552 Blast Desc: NECHADRAFT_72504 [Nectria haematococca mpVI 77-13-4]
  misc_feature (703)..(1330): NCBI GI: 39977783 Blast Desc: MGG_06776 [Magnaporthe grisea 70-15] gi|206558153|sp|A4R227.1|INO80_MAGGR RecName: Full= DNA helicase INO80 gi|145013701|gb|EDJ98342.1| MGG_06776 [Magnaporthe grisea
  misc_feature (487)..(1330): NCBI GI: 154312826 Blast Desc: BC1G_05114 [Botryotinia fuckeliana B05.10] gi|150849816|gb|EDN25009.1| BC1G_05114 [Botryotinia fuckeliana B05.10]
  misc_feature (534)..(1330): NCBI GI: 156052200 Blast Desc: SS1G_07509 [Sclerotinia sclerotiorum 1980] gi|206557750|sp|A7EQA8.1|INO80_SCLS1 RecName: Full= DNA helicase INO80 gi|154705285|gb|EDO05024.1| SS1G_07509 [Sclerotinia 1980]
  misc_feature (638)..(1330): NCBI GI: 242793727 Blast Desc: SNF2 family helicase/ATPase (Ino80), [Talaromyces stipitatus ATCC 10500] gi|218718813|gb|EED18233.1| SNF2 family helicase/ATPase (Ino80), [Talaromyces stipitatus ATCC 10500]
  misc_feature (638)..(1330): NCBI GI: 212535682 Blast Desc: SNF2 family helicase/ATPase (Ino80), [Penicillium marneffei ATCC 18224] gi|210070396|gb|EEA24486.1| SNF2 family helicase/ATPase (Ino80), [Penicillium marneffei ATCC 18224]
  misc_feature (550)..(1330): NCBI GI: 238844427 Blast Desc: SNF2 family ATP-dependent chromatin-remodeling factor snf21 [Microsporum canis CBS 113480]
  misc_feature: Useful for introducing or modulating the production of volatile compounds
MDSHRFLATAMGREDGRGQDDRENEAHYYTSHHRDGEERNRSQYGGSRAEADSLRGPSTSLAGLGGGGGRHSQAPTPPMLKSPPATAAGFGDSSSSIRVGTGTGRTSSATAANEKRGASWLDGNQAEERKVDATIEARSQAAGAEAEAAGPNPKHRYSSRRQQSTQQRWEEQQQHQQHQQQSPPGHHSPAHVGAAHHPHLDAAHASSILASINDHLPHERPPHSSTSILNTTTPDAVHAHGRQGSDNNEYTTSTTSTSHNHSHNHNHHGSGGGDGLDENRAHAHAHAHAHAHSFHPHPHIQSHRPSQVVHGQAHRGDGVPSMTSPTAKASTQHLDFRQPAPAAAAGTNHQDNAHLITANTNNPSNIGSDIRSSSSNNQPPFPVFPQLSPSSPPDFFSLSLSITHQTLRHHRPPAPAPALGDLVHPRVTLIRHATIVVVATSSPPAPSSTASTAAAHDVGAVAPLQPPLSTAALGHPGVAVGLVVAPSPGASAGGPELHDGVVVGAVVDQRQRPVECIAAAAAQGRLPRAPVHGEKTSGSFYDPLTDSTKPRRTSDGWPKQSRSDAYDYPPSKNESSAYYNGYGPSSTSSSSSTAAAMNAKSANFVLRHPPAHHPLLDKETDTPSPSSSFRMTSPASRHHSHNPSDAYPSARHTPTPGASMSSLLNPEPAPKTPAASTSTPSRAAELMSFSNILSSAEPLPKPRPPVIPEPKREKAPRKSKTRDSILRDSDSNAKKDSRRSSSARGEREVLAKPAKRLANGNPKPKPAISADKEKKILAKLEELEAKADHVDLAELDMEEDHFRKQQKRRRLNQERSYYDEHLARRRELTTLLGRKMAQDASFARERFEQLNYDEALHEVREREIYAEKERKKDMQRKRRREKSMQVTIEQKEAALARALAAEDEAERAKHLREAERANKKAQQTKLILDRGIKGPARGLQALELNLDGGTMSSIQGTDQESNAGGNEKSSKTRSKKSGSRPKKSKEQKQAEKDAAEAAQAALDAGEELPAPREERDTKIRIKIAKKDKEPRDKDKDSKDAAKEVKEKEKAVDEPPPNPLETKFQSKGFNQIYDQIWRDMARKDVLKTFKLASDSYTTKASNLKKTAILASKEAKRWQLRTNKGTKDLQARAKRCMRDMMGFWKRNEREERDLRKQAERQELENARKEEADREAARQKRKLNFLISQTELYSHFIGKKIKTDEVERSTDNPDIAPDANAPSASNHVDVAESTGPVGAKVTDFNSLNFEEEDEETLKQAAMANAQNAIAEAQAKARAFNKNDDDMDEDGEMNFQNPTGLGEVTVEQPKLLNCQLKEYQIKGLNWLANLYEQG

SEQ ID NO: 5852 - DNA, 8124 bp, Muscodor strobelii
  misc_feature: SGI EST ID NO. CUFF.14994.1
  misc_feature: Variant of the nucleotide sequence at SEQ ID NO 5850
aaacttacaggcgacacagagaatagactcacgagtcagcgagactcatgtccaagtcacaggattgtatgccgggcttcaggaaattcaggatcggcaaatagagggtgagagatggcatatagcagatcgcgaaagccgagatcaggatctccagcggttctcatatgtcatcgaccggaagctagatcatatggcagacagcttcaggaaagaagtattgcatcttcatcaagatatctcacggcgtttggaacaaattcccttgcccttttatagcttccaatatgagccgcaacaaacaccagtccgatatttggcccaaccccaatctcagcctctcctgatcaccaacgatgatcacagtacggaccactttgcttatatcgcctcgatcaatgatgacctcgaggaagtagccagaaaacgacatcagttcaacgaacaagcaatggcacgggcgagctggcttctcgtggctgagagattccaaacttggatgcagttctccgagagtcaatccgacctgatgttagtagacgcgtacctcggtgaccatacgataggcaaagtctccccgttgtctctaatcacggtggccctccagactttagtaaaccatcagccgcacctggtgatcctctatttcttctgcggtcttcatctacgcgacgagagcatcccaatgggtccccagggcatgctacagagtctgatcgcgcagcttaccttccgactacagctcttagatccggcgattatgcactatgtcgaagacatatatgctagagtcggcatcaacgaccacgccgacatttcgcaactctgcgccctatttgctgcactgatcaatctctttccctctgatacgacgatctactgtattctgaacgacatctccgagtttgaaacgtccttgcacggctgggaagacgagctgtgtgccattttcgactattttcgccatctaatacacaatcgggcaatcaatgtcaccttgaaattactgatgaccgtcgctcacaagagcatcacgatttgccggcgcgttcatccgagtgaatatatcacgctcgaggcgggaaatgcgagatctgacgatgccgtgttttagcatcggaagaggaaatgttcatcgcagtgaacccttgacttagagccaatattgctctcgtcggctcttcacaacatctctgctcgattgcccttcgccaaaaagtgcaaaacgtgtcacgtactcactgagcaatgtacgcccgctcaaggtctccacgacggccacgcatgacataagcgtcaagtaataaccgatgagctcactgccagatgaatggtactcataagcagacgccgcttgtcttggtgggaatctataaacaactttgatctcgtcgctttacaatgttggtgacatcggctcccgaagcaattgctgccaaatggtaatcctgcgccgctccatccagcgtattacgcgctgaatagaagactagcattcgtgaacacaaagagaagcggcgagtcactgttggaaagttcagacactgcgagatggaaatattcgtgatcaaaacctggagatgcgaccgtccggacgcctatgatcaagcaatgccgtaatcacacgtagcaatcgctcattccatcttggtttcatcgggtctgactatagggacttgatggaagatatgaatcgtgaatctatgcgaagcatgctcttcctgatgctacgtagatggcttgctggttccttgtcctgctccgtgatgtcgaaatggcgaattcatgaaggtcaatcacgatgatggaattgcatgagtgacccaaagttgtttaataataccagatactatacgagatctctatcgaatcgaacattcgacgcgacgtgttcacgcgtaaggggaaatgaaatactggaattttgggacacacgttttctgattctatacacggtgccagagatggcccatgattggctagtcgatgccaagctggggttttggtggcataggattttctagtacattgtttggagtcttgggacccggggcgtggagacattgcggctggaccggaaatgccaccttttgttctttctatgcagtaacccgtttgatgcgttgcagcagaagacggccacatagctctaagtcgatcatgtcgacgcacttctatctcgagttatcacaacaaccatcccttgcgtatcatcctcatttgattgctctctacctctgaggtttttccgactgttggtgtcacgcagagacgcgtcactggccgttaccaaactcttacctcacctctctgcccttgggaccaggcagtgcaatccccagactctgtttcgggctgcgagcaacatgacgccgaggctataattggatggatcgaggcagggaccaggggttagaggcgtgtggaggcatggcaatggcacaggacgtgattggcgtcgggggtttaatgtagtgggggggctctgggtgtacttatctagcctccattcagactcgtcagatttccacatgccggttggttcgtctccaaagcatccgtcaaggctggctgttgtgctcctcagttgtctgcggcctctcgcgtcttgactggcgagcctgacaaaatggggtttgagtacgccttcctctccttatctacagctgtctgctttttatcctgtcgacttccacaatcatgacgggcggaaagcagactgtcaggacctgattgggagagcgatctgatcacggcatcagccgaatcgtgggacgctgcatcacgatcctccctcccaccttttgagtcaaaaaccacgggtgaaagagggttgcataagcttgcatgggtgactataacaaagtgcccaacaagagagaaagagagacacacagcgagaggcaaaaaggaaccgtgggcggctgcatcttgatgcatccccgtctatccgcctacatgatgcacctttccccttccacatgcaaaacaacagttgaacaaagtcgtaatcctgaaatagtcgtcatctctaatgaatttgcccgggcctgcttttgatcctgctcgttttgggccacatgttccttatacaccagctagtttttccacgtctttgaccctcttggagaagtcgcggagtcctagttgttctattttctcatctttacattccagcaggagcttcccgttttttggaccattgtggccgttgactttattcaagtgctatctgtacctgatcttcaagttctcattaagctgttgagcacggcaattttagtcatcctttgtcatctccactttgatcctatctgccctatgcagctcaatgtatcgcgaaaccgtagaaagtgacgagccagaccagccaatcctccaccaaattgagcgcttctaaaatctattggaactcaaactgtcgatgctgtcagattccaccagcacggaacctccaaattgcattctcgcttgcgcgtatagcttcaaggcaaacccttgcagcaggtcgatatatctgtacattgatcctgactccatactttgcggtctccatcgcatactgggaagagctcttacagactagaaccgcccgcacgacaatcaaagctcgcgatagctcgtctagaaaccgccagccatattctcatactgcgtacaaccagtcactgtgactgcagagttgcgcaatcagttttggtctacaggcgctgactctaccggagcgctggggctctgcttgcgccgtaggacgagcattgcgaacaatccagatctctaatggatgattaagcctatattttattgtgccgcgacgcatatcgaatactttgccccgacgtcaataatagtacctacaaccgtgttggaatagacgaaaatcgtcgagaagattaagaaaagacaacaacgaaaaggaagaagaggtggaactcggtcttggttggacgaaaggaggtgggggagacgaggcacgcgagaaacgttgaagactgggacaccggacaaaatggactcgcacagattcctcgcgacagcaatgggaagagaggatggcaggggccaagatgatcgagaaaatgaagcgcattactatacctcccaccatcgagatggcgaggagaggaaccgcagccagtatggcggtagtagagcagaagctgactcgctgcgtggcccatcaacgtcgctagcaggattggggggaggtggagggcgacactcgcaagcgccgacacctccgatgttgaaatctccacccgcgacagcggcagggtttggagacagcagcagcagcatcagggttgggactgggactgggaggacgagttcagctacggcagcaaatgaaaagagaggtgcatcttggcttgatggaaatcaagcggaagaaaggaaagtagatgcaacaataggtaagacggtgagctcgaggcggttagattcgtggccatcgggcgacacatcgccatgcacagaagcgcggtcgcaagcagctggagctgaggcggaagcggcagggccaaacccaaagcatcgctactccagccgtcgtcagcaatcaacgcagcagcggtgggaggaacagcagcagcatcagcagcatcagcagcaatcgccgcccgggcatcacagtcctgcccatgtcggtgctgctcatcatccccatctagatgctgcccatgcatcatcgatacttgcatccatcaatgaccatctgcctcatgagcgcccacctcattcatccacgtcgatactaaacaccacgaccccagacgcggtacacgcacatgggcgacagggtagtgacaacaacgagtatactacgtccaccacgtccactagccataaccatagccataaccataaccaccatggcagcggcggcggcgacggcctagatgagaaccgtgcccatgcccatgcccatgcccatgcccatgcccactcttttcaccctcaccctcacattcaatcccatcgtccatcgcaggtggtgcacggccaggcccatcgcggcgacggtgttcctagcatgacatctccgacggcaaaggcttcgacgcagcatttagattttcgtcagcccgcaccagccgccgcagcaggcactaaccatcaggataatgctcacttaatcacggccaacaccaacaatccgagtaacattggcagcgacatccgtagtagcagtagtaataaccagtcgccgccgcaatccgcggtgctggccgcgcccgctaaccaccacgctgcacatcatctagaccaccattcccagtattcccccaactcagcccgtcgtcaccaccagacttcttctccctttctctctccatcacccaccaaactctccgccaccatcgcccacccgcacccgcacccgcactcggcgatctcgtccatcctcgcgtcaccctcatccgccacgccaccatcgtcgtcgtcgcgacttcatcaccacccgcaccctcatccaccgcatccaccgccgctgcacacgacgtcggcgctgtcgcaccccttcaaccaccattatcaacagcagcactcgggcatcctggcgtcgccgtcgggctcgtcgtcgctccctcccctggcgcctccgccgggggccctgagctccatgatggcgtcgtcgtcggcgctgtcgtcgaccaacggcaacggcccgtcgagtgcatcgccgctgcagccgcccaaggccgactaccccgcgcccccgtgcacggcgagaagacgtctggcagcttctacgatccgctgacagactcgacgaagccgcgcaggacgtcggacggctggcctaagcagtcgcggtcggatgcctacgactaccctccgtccaagaacgagtcctctgcatactacaatgggtacggtccctcctccaccagctccagctccagcaccgccgcggccatgaatgcaaagagtgcaaactttgtcctgcgacacccacctgcacaccaccctcttcttgacaaagagactgacacgcccagtccctcgagcagcttcaggatgacctcgcccgcctcgcgtcatcactcccacaacccctccgacgcctacccctccgctcgccacactcccactccgggcgcctccatgtcgtccctcttgaatccggagcctgctcccaagactccggctgcctctacaagcacaccgagccgcgccgccgaactcatgtccttctccaacatcctctccagcgccgagccgctgcctaagccccgaccccccgtcatacccgagcccaaacgggaaaaggcaccacgcaagagcaagacccgcgactctatcctccgagactccgatagcaacgccaagaaggactctcgcaggtcctcttcggcccgcggcgagagagaggtgctcgccaagccagccaagcgactggccaacggcaatcccaagcccaagcccgccatctccgcagacaaagagaagaagatcctcgctaagctcgaggagctcgaggctaaagccgaccatgtggacctggccgagctcgacatggaggaggaccacttccggaagcagcagaagaggcgcaggctgaaccaggaacgctcgtactacgacgagcacctggcccgtcgccgcgagttgacaacccttttgggacgtaagatggcccaagacgcgtccttcgcgcgagaacgcttcgagcagctgaactacgacgaggcactgcacgaggtccgggaacgcgagatctacgccgagaaggagcgcaagaaggacatgcagcgcaaacgcagacgcgagaagtcgatgcaggtcaccatcgagcagaaggaggcggctctcgccagagccctcgccgccgaggacgaagccgaacgggccaaacacctgcgtgaggctgagcgtgctaataaaaaggctcagcaaaccaagttgatcctcgacagaggcatcaagggccccgcccgcgggctgcaggccctcgagctcaacttggatggcggtaccatgtcctcgatccaaggcaccgatcaggagtccaacgccggcggcaacgagaagagcagcaagacgaggagcaagaagtccgggagccgacctaagaagtccaaggagcagaaacaggccgagaaagacgctgccgaggctgcacaggccgccttggatgccggcgaggagctgcctgcgccgcgcgaagaacgcgacaccaagattcgtatcaagatcgcgaagaaagacaaggagcccagggataaggacaaggactccaaagacgccgccaaggaagtcaaggagaaggagaaagctgtggacgagcctcctcctaatccactggagaccaagttccaatccaagggcttcaaccagatctacgaccagatctggagagacatggcgcggaaggacgtactcaagacgttcaagttggccagcgactcatacaccacgaaggcgtccaacctcaagaagacggcgattcttgcgtccaaagaagccaaacgatggcagctgcgtaccaacaaaggcactaaggatctccaggcccgtgccaagcgttgcatgcgtgacatgatgggcttctggaagcgcaacgaacgtgaagagcgagatctgcgcaagcaagccgaacggcaagagctggagaacgcccgcaaggaagaagccgaccgcgaagccgcccgccagaagaggaagctgaacttcttgatctcccagaccgagctgtactctcatttcatcggtaagaagatcaagacggacgaagtcgagcgcagtaccgacaacccagacatcgctcccgacgccaacgccccctccgcttcgaaccacgtcgatgttgccgagtctacgggacctgtgggcgccaaggtgaccgacttcaattctctcaacttcgaggaggaagacgaagagactttgaaacaggcggccatggccaatgcacagaatgctattgccgaggcccaagccaaggcacgcgccttcaacaagaatgacgatgacatggatgaggatggcgagatgaacttccagaaccctaccggtctgggcgaagtgactgtcgagcaacctaagctgctgaactgccagctgaaagagtaccaaatcaagggtctcaactggcttgccaacttgtacgaacaaggt

SEQ ID NO: 5853 - DNA, 2268 bp, Muscodor strobelii
  misc_feature: SGI cDNA ID NO. 561677
  misc_feature: Encodes the peptide sequence at SEQ ID NO 5854
gccctcgacctcgaccgccccgccgccgaggacccctccaagaaccccgaggccgacaccttcgcctacctcggcctgctcgtcgaggccctcaacaagctcggccgcctcgaggccgccgtcgacaccctcaagcagcgcctgcccgtcgagctgttcgccgtcgtcaacgaggccatcaacgacgtcgaccagcgccacccgagctccctgcgcggcggctccgctaacgcccagggcctgcacatctacagcggcagagagacgcagatgcgcgccgacgtcatctacgacctgctctggaccctctacggcaagttcgaggccatcgccgagggccatcgcgtcttccacgaggcggtgaaggccctggtccggcgagagggcgccgggaacaactcctcgctgctcggcaccttcagggagctatggaatctgtatcaaaacgaaatacggtcgctcctgcataactacgtgacgaccgacgccgatgtctaccaatcggcatcgtctccgaggtacggggccgtgaacgggcacaaggacacgtcgagagagagtctcttccgcttctcagaggccgatcaaaagtccgtcgagatggccaccgagtatgaggctctcgacggcatcatccaggctgctgtgccaggtctcacgtccaactcccgcaagacccagacctctgataagaaaaccatcggtagggagtctagaagaggcccagcgggccggggatttgagaacaggaacgctccgggctcctataaatctcttgtggagcctagcgtgttcaacatgagtttgctcttgccaccaactctgctcttcatccagagattaagagccatcgtaccgccgggctctgacttggcagccagcgcactgacgtctttccttgataacttcttggtcaacgtgttccagcctcaactggatgagacgttgggcaaactgagcgatggcgttttgagcgagatcgattctttccagcaagactccgaatggcggttggtagcgcggcggcctgtgttcaagggcacaacggcatttttcaccgtcatcacggccttttgccgtatgcttggcaccattcctcatgaccaggctcttagctctctcataatatcccaaatgatgcgatattacgataggtgtttttcctggtttaaatcattggtgtccaaggctcaagataatgctgctaccccacagtctctgcgtttctcggcagagctggcgaccaccgagggtgaaatccaagagactatgcaaaagctgtggacatccgataacttagaccgcgacctcgtagaaaaagaggtcggccttttaatcatgcgcaccgacgaacgcgcgctggaccccagcgatgtcattcaagatcgcgatgttatttcatcgttatgtctcctctatactagcatgaaatggcttgctactaaggttgcagggctgagacacatcacgcggcacgatacagattcgtcccaacataccatgccaaaggatcaaaaccgtcgttggactttgctcaatgattccaggcaagccaatggagaacagcagggccccgtgtatctaccgatgacgcaggataccgttcagtcatttgacaagattgtctcttcatacgaagaattggccggcacggtactcctcacacttcacatggaaattcgttgtagaattatccagtcattacgagtagccttgtcgcccgagacggccccctacgttcttggggaccgcgaaatcaaggaacccgatccacccataatatcgctcaactccgagctaattgcctatgatgagacggctgtgcggttcctgcgtgaccgtgagattgcgttcatgagaactggcctcgctttccttatgaactcttacttagtgtccaatgcgctgtcaacgcagcccatgaataagcgtggctgtgagcggatgcagctcaatattctcgtcctgcagcagaatctcaagaatatcgaggctggcgtgagcctcgcaagagcagctaattattacgggttattcgagaaagggcccgacgccatcgtagagagagcgaagaacgacaggcaacgcgagacagatgagggctcgataccaccggcagagaggttcagctatgatgagctcaaagcacttctggagctgtgttatagcgaacagcttgcagatccggaacgcggcgtcaacgccgctgccaagaggcaattggacgagaagggactggctcttagcgaggtgatgtggcagacttga

SEQ ID NO: 5854 - protein, 755 aa, Muscodor strobelii
  misc_feature: SGI Peptide ID NO. 561677
  misc_feature (1)..(748): NCBI GI: 46125243 Blast Desc: FG06999.1 [Gibberella zeae PH-1]
  misc_feature (2)..(755): NCBI GI: 24418675 Blast Desc: SEC8_NEUCR RecName: Full= exocyst complex component sec8 gi|11595727|emb|CAC18205.1| related to secretion protein rsec8 [Neurospora crassa]
  misc_feature (2)..(755): NCBI GI: 39943948 Blast Desc: MGG_03985 [Magnaporthe grisea 70-15] gi|145014704|gb|EDJ99272.1| MGG_03985 [Magnaporthe grisea 70-15]
  misc_feature (2)..(755): NCBI GI: 164426495 Blast Desc: NCU04190 [Neurospora crassa OR74A] gi|157071358|gb|EAA31914.2| conserved [Neurospora crassa OR74A]
  misc_feature (1)..(754): NCBI GI: 171693965 Blast Desc: protein product [Podospora anserina] gi|170946931|emb|CAP73735.1| protein product [Podospora anserina]
  misc_feature (2)..(755): NCBI GI: 116198029 Blast Desc: CHGG_07170 [Chaetomium globosum CBS 148.51] gi|88178449|gb|EAQ85917.1| CHGG_07170 [Chaetomium globosum CBS 148.51]
  misc_feature (1)..(695): NCBI GI: 261351611 Blast Desc: Sec8 exocyst complex component specific domain-containing protein [Verticillium albo-atrum VaMs.102]
  misc_feature (2)..(754): NCBI GI: 154305930 Blast Desc: BC1G_08196 [Botryotinia fuckeliana B05.10] gi|150853081|gb|EDN28273.1| BC1G_08196 [Botryotinia fuckeliana B05.10]
  misc_feature (127)..(755): NCBI GI: 156048002 Blast Desc: SS1G_08732 [Sclerotinia sclerotiorum 1980] gi|154693129|gb|EDN92867.1| SS1G_08732 [Sclerotinia sclerotiorum 1980]
  misc_feature (2)..(755): NCBI GI: 70998212 Blast Desc: Exocyst complex component Sec8 [Aspergillus fumigatus Af293] gi|66851468|gb|EAL91794.1| Exocyst complex component Sec8, [Aspergillus fumigatus Af293] gi|159126431|gb|EDP51547.1| Exocyst
ALDLDRPAAEDPSKNPEADTFAYLGLLVEALNKLGRLEAAVDTLKQRLPVELFAVVNEAINDVDQRHPSSLRGGSANAQGLHIYSGRETQMRADVIYDLLWTLYGKFEAIAEGHRVFHEAVKALVRREGAGNNSSLLGTFRELWNLYQNEIRSLLHNYVTTDADVYQSASSPRYGAVNGHKDTSRESLFRFSEADQKSVEMATEYEALDGIIQAAVPGLTSNSRKTQTSDKKTIGRESRRGPAGRGFENRNAPGSYKSLVEPSVFNMSLLLPPTLLFIQRLRAIVPPGSDLAASALTSFLDNFLVNVFQPQLDETLGKLSDGVLSEIDSFQQDSEWRLVARRPVFKGTTAFFTVITAFCRMLGTIPHDQALSSLIISQMMRYYDRCFSWFKSLVSKAQDNAATPQSLRFSAELATTEGEIQETMQKLWTSDNLDRDLVEKEVGLLIMRTDERALDPSDVIQDRDVISSLCLLYTSMKWLATKVAGLRHITRHDTDSSQHTMPKDQNRRWTLLNDSRQANGEQQGPVYLPMTQDTVQSFDKIVSSYEELAGTVLLTLHMEIRCRIIQSLRVALSPETAPYVLGDREIKEPDPPIISLNSELIAYDETAVRFLRDREIAFMRTGLAFLMNSYLVSNALSTQPMNKRGCERMQLNILVLQQNLKNIEAGVSLARAANYYGLFEKGPDAIVERAKNDRQRETDEGSIPPAERFSYDELKALLELCYSEQLADPERGVNAAAKRQLDEKGLALSEVMWQT

SEQ ID NO: 5855 - DNA, 2883 bp, Muscodor strobelii
  misc_feature: SGI EST ID NO. CUFF.14954.1
  misc_feature: Variant of the nucleotide sequence at SEQ ID NO 5853
cgaccgccccgccgccgaggacccctccaagaaccccgaggccgacaccttcgcctacctcggcctgctcgtcgaggccctcaacaagctcggccgcctcgaggccgccgtcgacaccctcaagcagcgcctgcccgtcgagctgttcgccgtcgtcaacgaggccatcaacgacgtcgaccagcgccacccgagctccctgcgcggcggctccgctaacgcccagggcctgcacatctacagcggcagagagacgcagatgcgcgccgacgtcatctacgacctgctctggaccctctacggcaagttcgaggccatcgccgagggccatcgcgtcttccacgaggcggtgaaggccctggtccggcgagagggcgccgggaacaactcctcgctgctcggcaccttcagggagctatggaatctgtatcaaaacgaaatacggtcgctcctgcataactacgtgacgaccgacgccgatgtctaccaatcggcatcgtctccgaggtacggggccgtgaacgggcacaaggacacgtcgagagagagtctcttccgcttctcagaggccgatcaaaagtccgtcgagatggccaccgagtatgaggctctcgacggcatcatccaggctgctgtgccaggtctcacgtccaactcccgcaagacccagacctctgataagaaaaccatcggtagggagtctagaagaggcccagcgggccggggatttgagaacaggaacgctccgggctcctataaatctcttgtggagcctagcgtgttcaacatgagtttgctcttgccaccaactctgctcttcatccagagattaagagccatcgtaccgccgggctctgacttggcagccagcgcactgacgtctttccttgataacttcttggtcaacgtgttccagcctcaactggatgagacgttgggcaaactgagcgatggcgttttgagcgagatcgattctttccagcaagactccgaatggcggttggtagcgcggcggcctgtgttcaagggcacaacggcatttttcaccgtcatcacggccttttgccgtatgcttggcaccattcctcatgaccaggctcttagctctctcataatatcccaaatgatgcgatattacgataggtgtttttcctggtttaaatcattggtgtccaaggctcaagataatgctgctaccccacagtctctgcgtttctcggcagagctggcgaccaccgagggtgaaatccaagagactatgcaaaagctgtggacatccgataacttagaccgcgacctcgtagaaaaagaggtcggccttttaatcatgcgcaccgacgaacgcgcgctggaccccagcgatgtcattcaagatcgcgatgttatttcatcgttatgtctcctctatactagcatgaaatggcttgctactaaggttgcagggctgagacacatcacgcggcacgatacagattcgtcccaacataccatgccaaaggatcaaaaccgtcgttggactttgctcaatgattccaggcaagccaatggagaacagcagggccccgtgtatctaccgatgacgcaggataccgttcagtcatttgacaagattgtctcttcatacgaagaattggccggcacggtactcctcacacttcacatggaaattcgttgtagaattatccagtcattacgagtagccttgtcgcccgagacggccccctacgttcttggggaccgcgaaatcaaggaacccgatccacccataatatcgctcaactccgagctaattgcctatgatgagacggctgtgcggttcctgcgtgaccgtgagattgcgttcatgagaactggcctcgctttccttatgaactcttacttagtgtccaatgcgctgtcaacgcagcccatgaataagcgtggctgtgagcggatgcagctcaatattctcgtcctgcagcagaatctcaagaatatcgaggctggcgtgagcctcgcaagagcagctaattattacgggttattcgagaaagggcccgacgccatcgtagagagagcgaagaacgacaggcaacgcgagacagatgagggctcgataccaccggcagagaggttcagctatgatgagctcaaagcacttctggagctgtgttatagcgaacagcttgcagatccggaacgcggcgtcaacgccgctgccaagaggcaattggacgagaagggactggctcttagcgaggtgatgtggcagacttgagaccactataaagatactgagttgtaatatatcgatgggcatacgtgagcccattgtacatagcgtaactgttatgccgcgatgtagacatgatcaaagagatttcacgattgcaaatatcgccggccgaatagaatgagttctattcatctcccggcgacctcatggcctgccccgggatttctctgatcacgaaacatcgctccatgaacccaccatggaatcgaataagacatcagccacctataatttcggaggagtatgggcttaacaatggcactggtccattgctacgttatgactatcgtgagtatgaagggaaatggtgaaaatcgaacaaaacatcttatgtgcatttgattatcatccattgcagaatcaccttgcttgttctgatcgttagtaaggctccaacggcattcttctatagcatgaggctgacctgctatgagaagcccgggttggtaactgctaggtagacttatggcataacatgctgtccagtaggactgcaccctgcgactactttggaggttgcccggaagctgaagtgcgttcatccgatcagccatgagaaatagtggtactggccaaatgcgcccatacattactgacgatcactgctg

SEQ ID NO: 5856 - DNA, 846 bp, Muscodor strobelii
  misc_feature: SGI cDNA ID NO. 561678
  misc_feature: Encodes the peptide sequence at SEQ ID NO 5857
atggacaaagcaaaggaagccgttcgcgaatttctgcacaaggctggcgggaaacacacaactgtccatcaacaaaccgctgatactgtccagcatgagactgtgaagccaacacagcacgaggaagtgactacagccgttgatcgagagattcaccaggatcatcaccacaccaccgtgcagcccgtgcatgacaaagaggtgttaccagaacagcacgaggcgcgtaccgcggatatcgaacaccgaactatcgaccaccgcgacgatagcaagaccaagaaactacttgctaaagaagcaggcaagtatcgtgatgagcgaaccgttgatgatactgcccacacccaagaattctctcctactgccgagggagaacacgttcaccatcatgtctacgagacagtgcaacccgttatccataaggagactgtgcagccaaagatagtgcatactaccaagccgatccacgagacgcatctgcacgaggcccagcatcatcccacgagcgtcatgcagtcgatctccatggccgagttcaaggaaggagcgaacaaagccaaacccgggaatgccgctcctggcttgtctcctggcgcaagtggtccgagtgcaggccacggcacaggttccggaactgggttgcactcctcggatactgctgactatggtcaacaagatatgaaaaagcaatccgccatggataaggggcgaagggactctgggaaagagatggatgaacacggtgacatgccaactaatctctaccagagtacagggttaatggacaagctgaacccgatgactgacacaaccggggacggaaagaagggttttatgaaatga

SEQ ID NO: 5857 - protein, 281 aa, Muscodor strobelii
  misc_feature: SGI Peptide ID NO. 561678
  misc_feature (1)..(281): NCBI GI: 171676684 Blast Desc: protein product [Podospora anserina] gi|170936409|emb|CAP61066.1| protein product [Podospora anserina]
  misc_feature (1)..(281): NCBI GI: 169607999 Blast Desc: SNOG_07065 [Phaeosphaeria nodorum SN15] gi|111064596|gb|EAT85716.1| SNOG_07065 [Phaeosphaeria nodorum SN15]
  misc_feature (1)..(281): NCBI GI: 156032700 Blast Desc: SS1G_13755 [Sclerotinia sclerotiorum 1980] gi|154699158|gb|EDN98896.1| SS1G_13755 [Sclerotinia sclerotiorum 1980]
  misc_feature (1)..(281): NCBI GI: 154301572 Blast Desc: BC1G_10113 [Botryotinia fuckeliana B05.10] gi|150855775|gb|EDN30967.1| BC1G_10113 [Botryotinia fuckeliana B05.10]
  misc_feature (1)..(181): NCBI GI: 189189536 Blast Desc: PTRG_00774 [Pyrenophora tritici-repentis Pt-1C-BFP] gi|187972713|gb|EDU40212.1| PTRG_00774 [Pyrenophora tritici-repentis Pt-1C-BFP]
  misc_feature (1)..(180): NCBI GI: 46135907 Blast Desc: FG09469.1 [Gibberella zeae PH-1]
  misc_feature (1)..(180): NCBI GI: 256727678 Blast Desc: NECHADRAFT_91258 [Nectria haematococca mpVI 77-13-4]
  misc_feature (1)..(187): NCBI GI: 261354437 Blast Desc: allergen [Verticillium albo-atrum VaMs.102]
  misc_feature (21)..(183): NCBI GI: 46126671 Blast Desc: FG07713.1 [Gibberella zeae PH-1]
  misc_feature (1)..(234): NCBI GI: 58268496 Blast Desc: allergen [Cryptococcus neoformans var. neoformans JEC21] gi|134112680|ref|XP_774883.1| CNBF0480 [Cryptococcus neoformans var. neoformans B-3501A] gi|50257531|gb|EAL20236.1|
MDKAKEAVREFLHKAGGKHTTVHQQTADTVQHETVKPTQHEEVTTAVDREIHQDHHHTTVQPVHDKEVLPEQHEARTADIEHRTIDHRDDSKTKKLLAKEAGKYRDERTVDDTAHTQEFSPTAEGEHVHHHVYETVQPVIHKETVQPKIVHTTKPIHETHLHEAQHHPTSVMQSISMAEFKEGANKAKPGNAAPGLSPGASGPSAGHGTGSGTGLHSSDTADYGQQDMKKQSAMDKGRRDSGKEMDEHGDMPTNLYQSTGLMDKLNPMTDTTGDGKKGFMK

SEQ ID NO: 5858 - DNA, 1529 bp, Muscodor strobelii
  misc_feature: SGI EST ID NO. CUFF.14916.0
  misc_feature: Variant of the nucleotide sequence at SEQ ID NO 5856
gtagaaaaacggggctatctgtgatccaaggccgtattcaggctctgactggagaatcattttaatggcgagacgctggtcacttcaactatgaagacgcaaaagacaaggaaacctcagagtttatcgcagtgcaactatgcacgagggttcttgtcgcgaataagaaatcggggctcggttcgcatcatcggcatgctcaaagctccatgtcaatctgatgcaagaatgacacaatgatcaactcgggatgttgacgtacgaaacagtaatatgacgagtcgagctcctctattcaagtataattcctggctttcatcgaagaccatttgatctcaaactcgaactagacgacgacctcaatcaacccccactagacagcatcatggacaaagcaaaggaagccgttcgcgaatttctgcacaaggctggcgggaaacacacaactgtccatcaacaaaccgctgatactgtccagcatgagactgtgaagccaacacagcacgaggaagtgactacagccgttgatcgagagattcaccaggatcatcaccacaccaccgtgcagcccgtgcatgacaaagaggtgttaccagaacagcacgaggcgcgtaccgcggatatcgaacaccgaactatcgaccaccgcgacgatagcaagaccaagaaactacttgctaaagaagcaggcaagtatcgtgatgagcgaaccgttgatgatactgcccacacccaagaattctctcctactgccgagggagaacacgttcaccatcatgtctacgagacagtgcaacccgttatccataaggagactgtgcagccaaagatagtgcatactaccaagccgatccacgagacgcatctgcacgaggcccagcatcatcccacgagcgtcatgcagtcgatctccatggccgagttcaaggaaggagcgaacaaagccaaacccgggaatgccgctcctggcttgtctcctggcgcaagtggtccgagtgcaggccacggcacaggttccggaactgggttgcactcctcggatactgctgactatggtcaacaagatatgaaaaagcaatccgccatggataaggggcgaagggactctgggaaagagatggatgaacacggtgacatgccaactaatctctaccagagtacagggttaatggacaagctgaacccgatgactgacacaaccggggacggaaagaagggttttatgaaatgaatggtcgggtcgtcgggatgtgctctcatcaatgagcatttatgctcctagtcgtgcttcaaaatgtcgaagggtaatgtaatacttgaatatgtcagacgtttgacttgtatattgagagactatcattggatcaacctagtcaccgcgcttcaacatgatctcgtatgaggaagggcatatgcattatcattacagagtaatgatagtctctagcacgtccaacgcaggcttggcggtatggagggtcatcaacgatgttctctctatgttttctgagtataacccgagactgttc

SEQ ID NO: 5859 - DNA, 1269 bp, Muscodor strobelii
  misc_feature: SGI cDNA ID NO. 561679
  misc_feature: Reduced expression when VOC is produced
  misc_feature: Encodes the peptide sequence at SEQ ID NO 5860
atggcgtcctcctctgcttcgatgcagtgccttcgagcgccattgcgacgggccctatcatcgtccgtccgcacgaccagccgatcatacgccacaatccccaacccgcccgagacgccatcgtcaacggcagcgaattcgtcgacatcacgccgtccgacatacttcaaagacagcaccgtaggagcctttgaggatttcctgccgacatcatctactgcatcccctctggcacccacagacgcttacacccttcgaacggccgaagtcggaccagcgtcaaacagacgaaccatcacaagattgcccgagtggctaaagacacctatcccggccggaaatgagaactacaagaagatcaagaaagacctgagagggctgaaactaagcactgtttgtgaggaagcgaggtgtccgaatatctccgactgctggggcggaagcgacaaaaatgccgccaccgcgaccattatgttgatgggagacacatgcacacgcggctgtcgattctgcagcgtcaagacgaaccgcacgccagcgcctctcgacccccacgagcctgaacacacagccgaagcccttgcgagatggggcctaggctacgttgtccttacaactgtcgaccgcgacgacctggtagacggtggcgcgaggcactttgctgagacgatacgaaagatcaaagcaaagaagccgagtcttcttgtcgaggcactcactggtgacttccaaggcgacttggacatggttgagatcatggccacgagcggtctcgatgtgtatgctcacaacatcgagactgtagagggacttactccgtatgtacgagacaggagggctactttcagacagagtctgaatgttttggaacacgtcaagaaggtcaagggtgccgagaatgtcatcaccaagacgagtctcatgttagggttaggagagcaggaacacgagctcatggatgcgctcaaagaactacggaagatcaacgtcgacgtcgtgacattcggtcagtacatgagaccgacgaagcgacatctcaaggtcgagaagtatgtcacgccagacgagttcgagatgtggcgccagcgtgctatggacatgggctttctgtatgttgccagtggtccactcgtgaggagcagttacaaggctggtgaggcattcatcgagaacgtgcttcggaagagagcgggccagaagagccccgtgagtgggaagctggaagatgcagctgtggtcgaagacttactcaaggctggggctccttga

SEQ ID NO: 5860 - protein, 422 aa, Muscodor strobelii
  misc_feature: SGI Peptide ID NO. 561679
  misc_feature (158)..(325): Pfam Id: PF04055 Pfam Desc: Radical SAM superfamily
  misc_feature (3)..(407): NCBI GI: 46135857 Blast Desc: FG09444.1 [Gibberella zeae PH-1]
  misc_feature (3)..(415): NCBI GI: 171683907 Blast Desc: protein product [Podospora anserina] gi|170941914|emb|CAP67566.1| protein product [Podospora anserina]
  misc_feature (3)..(415): NCBI GI: 85114604 Blast Desc: lipoic acid synthetase, mitochondrial precursor [Neurospora crassa OR74A] gi|28926518|gb|EAA35490.1| lipoic acid synthetase, mitochondrial precursor [Neurospora crassa OR74A]
  misc_feature (6)..(400): NCBI GI: 149209891 Blast Desc: MGCH7_ch7g427 [Magnaporthe grisea 70-15] gi|86196382|gb|EAQ71020.1| MGCH7_ch7g427 [Magnaporthe grisea 70-15]
  misc_feature (53)..(415): NCBI GI: 116193017 Blast Desc: CHGG_06226 [Chaetomium globosum CBS 148.51] gi|88182139|gb|EAQ89607.1| CHGG_06226 [Chaetomium globosum CBS 148.51]
  misc_feature (1)..(398): NCBI GI: 156045806 Blast Desc: lipoic acid synthase [Sclerotinia sclerotiorum 1980] gi|154693575|gb|EDN93313.1| lipoic acid synthase [Sclerotinia sclerotiorum 1980]
  misc_feature (1)..(396): NCBI GI: 121704822 Blast Desc: lipoic acid synthetase precursor [Aspergillus clavatus NRRL 1] gi|119398820|gb|EAW09248.1| lipoic acid synthetase precursor [Aspergillus clavatus NRRL 1]
  misc_feature (17)..(396): NCBI GI: 238505430 Blast Desc: lipoic acid synthetase precursor [Aspergillus flavus NRRL3357] gi|220690057|gb|EED46407.1| lipoic acid synthetase precursor [Aspergillus flavus NRRL3357]
  misc_feature (17)..(396): NCBI GI: 169780424 Blast Desc: [Aspergillus oryzae RIB40] gi|83773416|dbj|BAE63543.1| protein product [Aspergillus oryzae]
  misc_feature (1)..(396): NCBI GI: 255944209 Blast Desc: Pc20g03200 [Penicillium chrysogenum Wisconsin 54-1255] gi|211587607|emb|CAP85649.1| Pc20g03200 [Penicillium chrysogenum Wisconsin 54-1255]
  misc_feature (56)..(396): SWISSPROT Homolog: EC 2.8.1.8 Lipoyl synthase
  misc_feature: Useful for introducing or modulating the production of volatile compounds
MASSSASMQCLRAPLRRALSSSVRTTSRSYATIPNPPETPSSTAANSSTSRRPTYFKDSTVGAFEDFLPTSSTASPLAPTDAYTLRTAEVGPASNRRTITRLPEWLKTPIPAGNENYKKIKKDLRGLKLSTVCEEARCPNISDCWGGSDKNAATATIMLMGDTCTRGCRFCSVKTNRTPAPLDPHEPEHTAEALARWGLGYVVLTTVDRDDLVDGGARHFAETIRKIKAKKPSLLVEALTGDFQGDLDMVEIMATSGLDVYAHNIETVEGLTPYVRDRRATFRQSLNVLEHVKKVKGAENVITKTSLMLGLGEQEHELMDALKELRKINVDVVTFGQYMRPTKRHLKVEKYVTPDEFEMWRQRAMDMGFLYVASGPLVRSSYKAGEAFIENVLRKRAGQKSPVSGKLEDAAVVEDLLKAGAP

SEQ ID NO: 5861 - DNA, 1690 bp, Muscodor strobelii
  misc_feature: SGI EST ID NO. CUFF.14920.0
  misc_feature: Variant of the nucleotide sequence at SEQ ID NO 5859
gcggcactgaactgaccaatcaagaaactgcgaatagctggttggcccagaatttatggctgcgattattgtatcggaatctccagggacctgttgctcactgtcgccattgaagaattgcaaccactgcaagttctttgtgttcccttctccgcctcaccacctctgcgacctcgtcaattgtcatggcgtcctcctctgcttcgatgcagtgccttcgagcgccattgcgacgggccctatcatcgtccgtccgcacgaccagccgatcatacgccacaatccccaacccgcccgagacgccatcgtcaacggcagcgaattcgtcgacatcacgccgtccgacatacttcaaagacagcaccgtaggagcctttgaggatttcctgccgacatcatctactgcatcccctctggcacccacagacgcttacacccttcgaacggccgaagtcggaccagcgtcaaacagacgaaccatcacaagattgcccgagtggctaaagacacctatcccggccggaaatgagaactacaagaagatcaagaaagacctgagagggctgaaactaagcactgtttgtgaggaagcgaggtgtccgaatatctccgactgctggggcggaagcgacaaaaatgccgccaccgcgaccattatgttgatgggagacacatgcacacgcggctgtcgattctgcagcgtcaagacgaaccgcacgccagcgcctctcgacccccacgagcctgaacacacagccgaagcccttgcgagatggggcctaggctacgttgtccttacaactgtcgaccgcgacgacctggtagacggtggcgcgaggcactttgctgagacgatacgaaagatcaaagcaaagaagccgagtcttcttgtcgaggcactcactggtgacttccaaggcgacttggacatggttgagatcatggccacgagcggtctcgatgtgtatgctcacaacatcgagactgtagagggacttactccgtatgtacgagacaggagggctactttcagacagagtctgaatgttttggaacacgtcaagaaggtcaagggtgccgagaatgtcatcaccaagacgagtctcatgttagggttaggagagcaggaacacgagctcatggatgcgctcaaagaactacggaagatcaacgtcgacgtcgtgacattcggtcagtacatgagaccgacgaagcgacatctcaaggtcgagaagtatgtcacgccagacgagttcgagatgtggcgccagcgtgctatggacatgggctttctgtatgttgccagtggtccactcgtgaggagcagttacaaggctggtgaggcattcatcgagaacgtgcttcggaagagagcgggccagaagagccccgtgagtgggaagctggaagatgcagctgtggtcgaagacttactcaaggctggggctccttgaaagcccggccagcgggacaatgactctgcagaaccttcaacttgtatatcttaaccttacatccgaatttttgagtatttgcataggcttggcgcatctagactactagcaaaaacagggttggcttggagatcggtgttgacgctcaccctttcaacgagggcatcatcaagaggctatatacatatcacaatcaataattgtataaatcattctaagcaattcatgacctcgga

SEQ ID NO: 5862 - DNA, 1290 bp, Muscodor strobelii
  misc_feature: SGI cDNA ID NO. 561680
  misc_feature: Encodes the peptide sequence at SEQ ID NO 5863
atgacgacaccaaccttcccgttcccacgcgaaaccccaaatcaaccaccagaggcatatgtaaaactccgccgccattgcccaatttccaaagtgttcctgccggacgggagcgaagcatggctattgacgaaacacgacgatattcaagccgcactatcctctcccaatctctccgctgatcggtcaacaccgggctaccccgagctgagccaacactccaacgcgaacaaaagcgtaaaaacactcgtgacgctcgatggtgcagaacacgaccgtctccgaaaagtcctagatgaattgttctcccccgaagcagtcgagaagctgagaggtctagtccacggcgtagtagacaaaacactcgacgaaatataccactccttcctcaagcaaaggaaatccttcgatctaatcgaggaattcgcagtcccactaccgacgaaggttatttgcaaaatcgtcgggattccggagccggacgtggagtggctttgtcaagatacaagtctcgtcactgattcttcccgcgatgcggcggaggacgaggatcaacgcctgctagcgtatgttgggcggcttgtcgatgaggcggttgctgggaagagtaggagggatagtgggattggggatgggaaaggcaagggagaggaagaggaggtgttgattgagagattggttagggaacagtataaaaaggggactttggaacgggatgagatcgtgcagttggcgtacttggtcctgacggcggggaacgcggcgctgatcaatagcattggacttgcggtcgtcacgctcttcgagaacgaagagcagtgggcggctgtacgacgaaatccccttgcgtttgccccgaggttggcgatggagtgtttgaggtataacactacatccgcactcgactgtcggagagccgttatcagcaatctcacaattgccggccagacaatgaggataggagagggcgtgatatgtgcggtgcagagcgcggatagagatgaaggggcgacgcataggccgcatgtctttgatttgcataggaagtatgaggcgagggatttacttgtgtttggatatggaagtcatagatgtgttggggaatatcttgccaggatggaacttgaagttacgctgggtacgctttttgcgaggtttccgacgttgaagatggatgggagtatcggggatctggagtttgctcctgagagccagaatatgggcgtgttgaggttgccggtgcgtgttgatgttgagagtgagttgcatagtattatcacgcctgactaa

SEQ ID NO: 5863 - protein, 429 aa, Muscodor strobelii
  misc_feature: SGI Peptide ID NO. 561680
  misc_feature (4)..(418): Pfam Id: PF00067 Pfam Desc: Cytochrome P450
  misc_feature (358)..(386): Pfam Id: PF00067 Pfam Desc: Cytochrome P450
  misc_feature (4)..(414): NCBI GI: 156064797 Blast Desc: cytochrome P450 [Sclerotinia sclerotiorum 1980] gi|154691268|gb|EDN91006.1| cytochrome P450 [Sclerotinia sclerotiorum 1980]
  misc_feature (4)..(414): NCBI GI: 171678885 Blast Desc: protein product [Podospora anserina] gi|170937513|emb|CAP62171.1| protein product [Podospora anserina]
  misc_feature (2)..(414): NCBI GI: 226294161 Blast Desc: cytochrome P450 55A1 [Paracoccidioides brasiliensis Pb18]
  misc_feature (4)..(414): NCBI GI: 11513453 Blast Desc: cytochrome P450 55A1 [Paracoccidioides brasiliensis Pb18]
  misc_feature (4)..(414): NCBI GI: 225684503 Blast Desc: cytochrome P450 55A2 [Paracoccidioides brasiliensis Pb03]
  misc_feature (4)..(414): NCBI GI: 117179 Blast Desc: NOR_FUSOX RecName: Full=Cytochrome P450 55A1; AltName: Full=CYPLVA1; AltName: Full=Cytochrome P450 DNIR; AltName: Full=Nitric oxide reductase; AltName: Full=Cytochrome P450nor A,
  misc_feature (4)..(414): NCBI GI: 18158928 Blast Desc: NOR_FUSOX RecName: Full=Cytochrome P450 55A1; AltName: Full=CYPLVA1; AltName: Full=Cytochrome P450 DNIR; AltName: Full=Nitric oxide reductase; AltName: Full=Cytochrome P450nor A,
  misc_feature (4)..(414): NCBI GI: 7546424 Blast Desc: NOR_FUSOX RecName: Full=Cytochrome P450 55A1; AltName: Full=CYPLVA1; AltName: Full=Cytochrome P450 DNIR; AltName: Full=Nitric oxide reductase; AltName: Full=Cytochrome P450nor A,
  misc_feature (4)..(414): NCBI GI: 11513457 Blast Desc: NOR_FUSOX RecName: Full=Cytochrome P450 55A1; AltName: Full=CYPLVA1; AltName: Full=Cytochrome P450 DNIR; AltName: Full=Nitric oxide reductase; AltName: Full=Cytochrome P450nor A,
  misc_feature (2)..(414): NCBI GI: 226284894 Blast Desc: cytochrome P450 55A1 [Paracoccidioides brasiliensis Pb01]
  misc_feature (14)..(414): SWISSPROT Homolog: EC 1.14.13.15 Cholestanetriol 26-monooxygenase
MTTPTFPFPRETPNQPPEAYVKLRRHCPISKVFLPDGSEAWLLTKHDDIQAALSSPNLSADRSTPGYPELSQHSNANKSVKTLVTLDGAEHDRLRKVLDELFSPEAVEKLRGLVHGVVDKTLDEIYHSFLKQRKSFDLIEEFAVPLPTKVICKIVGIPEPDVEWLCQDTSLVTDSSRDAAEDEDQRLLAYVGRLVDEAVAGKSRRDSGIGDGKGKGEEEEVLIERLVREQYKKGTLERDEIVQLAYLVLTAGNAALINSIGLAVVTLFENEEQWAAVRRNPLAFAPRLAMECLRYNTTSALDCRRAVISNLTIAGQTMRIGEGVICAVQSADRDEGATHRPHVFDLHRKYEARDLLVFGYGSHRCVGEYLARMELEVTLGTLFARFPTLKMDGSIGDLEFAPESQNMGVLRLPVRVDVESELHSIITPD

SEQ ID NO: 5864 - DNA, 180 bp, Muscodor strobelii
  misc_feature: SGI EST ID NO. CUFF.14923.0
  misc_feature: Variant of the nucleotide sequence at SEQ ID NO 5862
gccggggtgatccatgagaactctatcacggcggacttgttgcctcatacataatgatgatcacgttgccgacatcacgaaaacggatgccccgaagagcatcacgatctccttacttgtatgctcaatcaccatacattttgaggatacccaagatgacgacaccaaccttcccgttcc

SEQ ID NO: 5865 - DNA, 627 bp, Muscodor strobelii
  misc_feature: SGI cDNA ID NO. 561681
  misc_feature: Encodes the peptide sequence at SEQ ID NO 5866
atgtcggcctcggtagcaaaagtcatatccacggagctcctcgagaacaaggatgcgagatggattaacctcgtcaagatcacctatgaagaccagaatggccaaatccgcacctgggagggcacgagacgcccaactcgtcccaagaccagtgctgtagatgcagtacagatgctagctgttcgtaagatgcccatgggcgcggagctcttattagaaaaacagttcagaccacccgcaggtaagctcgtcgtcgagtttcctgcaggtctagtcgatgagggcgagactgttgaagaggctgctctccgtgaactcagagaagagacgggatacagtggtgagattgtgcaagaaccagttggacaacgtcccatgttctggagttctcccgcgtcctcaagctcaacgacgtatatgatcaaaatctcagttgacgccgagaaggaggaaaataaagtccctaaggcacaactcgaagacggcgagtttatagagtgcttctgggttgcattcaaagatctccatgccgaattgcgaaaacttgaagcacaaggttacgcagtcgatggcaagctcggtgcctttgccgagggtctcgagtccgctaagcaatggggcgtctga

SEQ ID NO: 5866 - protein, 208 aa, Muscodor strobelii
  misc_feature: SGI Peptide ID NO. 561681
  misc_feature (49)..(193): Pfam Id: PF00293 Pfam Desc: NUDIX domain
  misc_feature (69)..(193): Pfam Id: PF00293 Pfam Desc: NUDIX domain
  misc_feature (7)..(208): NCBI GI: 240109044 Blast Desc: ADP-ribose pyrophosphatase, [Coccidioides posadasii C735 delta SOWgp]
  misc_feature (6)..(205): NCBI GI: 121713226 Blast Desc: MutT/nudix family protein [Aspergillus clavatus NRRL 1] gi|119402377|gb|EAW12798.1| MutT/nudix family protein [Aspergillus clavatus NRRL 1]
  misc_feature (8)..(201): NCBI GI: 225678392 Blast Desc: ADP-ribose pyrophosphatase [Paracoccidioides brasiliensis Pb03] gi|226290549|gb|EEH46033.1| ADP-ribose pyrophosphatase [Paracoccidioides brasiliensis Pb18]
  misc_feature (8)..(208): NCBI GI: 261198573 Blast Desc: ADP-ribose pyrophosphatase [Ajellomyces dermatitidis SLH14081] gi|239594840|gb|EEQ77421.1| ADP-ribose pyrophosphatase [Ajellomyces dermatitidis SLH14081] gi|239610038|gb|EEQ87025.1|
  misc_feature (8)..(205): NCBI GI: 226280612 Blast Desc: ADP-ribose pyrophosphatase [Paracoccidioides brasiliensis Pb01]
  misc_feature (5)..(205): NCBI GI: 115433522 Blast Desc: ADP-ribose pyrophosphatase [Aspergillus terreus NIH2624] gi|114189750|gb|EAU31450.1| ADP-ribose pyrophosphatase [Aspergillus terreus NIH2624]
  misc_feature (6)..(205): NCBI GI: 70998168 Blast Desc: MutT/nudix family protein [Aspergillus fumigatus Af293] gi|66851448|gb|EAL91774.1| MutT/nudix family protein [Aspergillus fumigatus Af293] gi|159126453|gb|EDP51569.1| family
  misc_feature (6)..(205): NCBI GI: 119479665 Blast Desc: MutT/nudix family protein [Neosartorya fischeri NRRL 181] gi|119408015|gb|EAW17964.1| MutT/nudix family protein [Neosartorya fischeri NRRL 181]
  misc_feature (25)..(204): NCBI GI: 171677664 Blast Desc: protein product [Podospora anserina] gi|170936900|emb|CAP61559.1| protein product [Podospora anserina]
  misc_feature (18)..(207): NCBI GI: 225557912 Blast Desc: ADP-ribose pyrophosphatase [Ajellomyces capsulatus G186AR]
  misc_feature (6)..(208): SWISSPROT Homolog: EC 3.6.1.13 ADP-ribose diphosphatase
MSASVAKVISTELLENKDARWINLVKITYEDQNGQIRTWEGTRRPTRPKTSAVDAVQMLAVRKMPMGAELLLEKQFRPPAGKLVVEFPAGLVDEGETVEEAALRELREETGYSGEIVQEPVGQRPMFWSSPASSSSTTYMIKISVDAEKEENKVPKAQLEDGEFIECFWVAFKDLHAELRKLEAQGYAVDGKLGAFAEGLESAKQWGV

SEQ ID NO: 5867 - DNA, 4943 bp, Muscodor strobelii
  misc_feature: SGI EST ID NO. CUFF.14930.0
  misc_feature: Variant of the nucleotide sequence at SEQ ID NO 5865
cagacacctgttgcgacatgagattagtcatgctcacatgcagctcgtgtgtccatccccattgctttagccagtcggagaggcggggttgcgtcatactgttcggcagttgttgtaaagaacgcgatttcagcttcaattccacgcccaagtcattctcgaatgatcaaataggctttcagaagactgattgcgatttatctatctttggtacctactaaactgagttttttctatagtattgcattctccctagatcaaagcgttatggaagaggataacaccggacgacaaatcgacggtacgtagtaatctgtatggcagcaaaatcactatatgttttctcacagtcgttgctttacagtaatagttgtaggcgccggcctcggcggatgcgcgtgcgccttagctttgaaacatcacggccattcagtgacgatatacgagaagttgcgcacgtttagacgccttggagactctctcgggctcggcgagaacgcgctgaagctccttgaacgatggggcggaccggctctacgcacaaaactcacaagcattggaaatcaagcccctgatatgcagatccgacgatggcatgacggaaagatattggctgtgcagccactcatggatatggcaggctacatcgggcaccgcggtgattatcataacgtcttcctggatgctgtcagagatgcaggaataacagtgcacatggggcgcgacgtcgtagattatgaagatgcgaaaggacatcgacctattgctgtgtttgccgatggagcgagagtggaagcggatttgattgtcggcgccgatggtatcaaatcgcgtgcccgagagcttgtgctggggttcgaggatgcgccgaagagtagcggttattcatgttatcgggcatatttccctggtgctcatctcaaagaggacccgctttgtcgcgagtttgtcgatcatgattgtgtgaacatctggatcggggaagatacgcatctggtgcaaaacaccctccgtgatggcgatgaattcaactggattgtaactcgaaagatttcggaagaagccgatatggagattcgagaatcatggttccaagaaggcgatctcgaagacgtggcgcgtgtcactgctacggtcgacccgcggatccgggcagcagtagaaaagacgccatcgtgtcttgactggaagatctgctaccgcgatccgttgtcctcatgggtttcgccccgaagtcattccattgctctgctcggcgatagctgtcatcctcacttacccacgagcgcccaaggtgctagccaagcgacggagagcgctgcagtacttgcggtttgtttgaaattagccggcaaaggcaggataccacttgctgtgagttacccttgtaatcaccaagtgcaaatgactgagcaaagcaaggcccggacatatgagaaacttcgtttcgctcgtacacgtgctagccaaagcaacggggaggacctaagagatcgatggcataatgcactgaaagatgtcgaagaaggtgtagaaatagaccctgaatctctaaagattaggaacaggtggctatatgcatatgacgccgaggccgacactattgagagatgggacgaggtgtcgtctttggttaataaggagctggagacaggaaacatcactcctctgtgttgatcgtatggctcaagaagggctagaggcatagcagtctggttctgatgtgctgatagaagtagtactatatcgaatgatatgtgtgagcggtatatgggatgagagctggtctgtcgaggacaagacagccacagatgcgacgatagttgggccaagcccaattggtcacattatgccgatgtgttcgggttaggcacacatgcttttgatcaatgcaaatagtagaatggaggtagtttgaaagctatgccgtaaaactcacaatgatattggtactgtcttttagccgtggagcggaattctggacgccgcaagtactaggttagctgattcttaacgatgagccgtcgggctggttttcgtgatacaatgacgtcatcacaatacatctagcgtttgccttgatgtctcacgagtgggattcattgcttgaacctcaaatcatcatcataatcagtcacattcttcatttatacaactaccactacattttgaagagtatcaatttctaaaaaggttacctttctaccatcatcatccgacagacggcctcagacagatatcgacgcacctggttccaagatgttgttgaaactcattcacttcgcccaaatcggcatcacggcctatggtgcaatgcaatctcaagcagcgatccaaaatctcctcaagtacgaagatgcgaccgagaaagcagccaagatctccaacgaagcagagaaccaactttaccgtacccgcatgacccaagcttctggagccatcgcgattctcgtctcgttcttctcatcagcactactgttcttctacggttcctcttacggcttccttgtgcgatatttctcctcgcctgtgatagcggccgggattttcgccgcaaggattcatctgcaggatttctggacggggaaaggaggtaaaaagatgtcaccaaaggtcccgctaccaaagatggatgggtataacgaggcattggaccgtacaggaaagctgcttgaggttctgggttggctaacgataagttgggctgcgagtgctgttattgctcttgtggttgggtattgattgagctgcacgatattagcaacagagacgatgtagtttcttacgtgtactcttagctgaaatatcagagtttcttagctcatgagacgaactgggacttagacatcacagtatcgtattttcctacaattcatggctgaagtcgaacgtctcatcatgaaatgccaagtgctggaatgcaggtgtaatacctaagggtgagcctgtcctggcttccagtgctgatctgcgtaagccacaagtggctatgttctccctgttcggacactggatcctcccccagctggaggtccctcaaagacaaaccattaacccagcactcatcccattaccaaaaaaatcttaatctttttgtgtgcatcttttgcgaatctctgaaagtgaagcgaaacctacggtacgcaatgtcggcctcggtagcaaaagtcatatccacggagctcctcgagaacaaggatgcgagatggattaacctcgtcaagatcacctatgaagaccagaatggccaaatccgcacctgggagggcacgagacgcccaactcgtcccaagaccagtgctgtagatgcagtacagatgctagctgttcgtaagatgcccatgggcgcggagctcttattagaaaaacagttcagaccacccgcaggtaagctcgtcgtcgagtttcctgcaggtctagtcgatgagggcgagactgttgaagaggctgctctccgtgaactcagagaagagacgggatacagtggtgagattgtgcaagaaccagttggacaacgtcccatgttctggagttctcccgcgtcctcaagctcaacgacgtatatgatcaaaatctcagttgacgccgagaaggaggaaaataaagtccctaaggcacaactcgaagacggcgagtttatagagtgcttctgggttgcattcaaagatctccatgccgaattgcgaaaacttgaagcacaaggttacgcagtcgatggcaagctcggtgcctttgccgagggtctcgagtccgctaagcaatggggcgtctgatgattaagagactaaacgaaacataccagcgtggattaagagtattgggggctcactcgacttccagagcgcttgatgaagagccaagtacagacagaatgagcatcataaatcaagagtagattgattagatagatagactttcatactaatgacaagaaagcatgcaattctcactattactcattatttgaagctgaacgcaagagcctagaatatcgtcatatatactcgtctcgaaatatcccttactttgtgattcagaaaggcaagaaatatgcaaacaagcgtacatttccccaagccagtttaccaacatccatcctccttcctcgaatcccaatacccctgttcctacttagtcaggcgtgataatactatgcaactcactctcaacatcaacacgcaccggcaacctcaacacgcccatattctggctctcaggagcaaactccagatccccgatactcccatccatcttcaacgtcggaaacctcgcaaaaagcgtacccagcgtaacttcaagttccatcctggcaagatattccccaacacatctatgacttccatatccaaacacaagtaaatccctcgcctcatacttcctatgcaaatcaaagacatgcggcctatgcgtcgccccttcatctctatccgcgctctgcaccgcacatatcacgccctctcctatcctcattgtctggccggcaattgtgagattgctgataacggctctccgacagtcgagtgcggatgtagtgttatacctcaaacactccatcgccaacctcggggcaaacgcaaggggatttcgtcgtacagccgcccactgctcttcgttctcgaagagcgtgacgaccgcaagtccaatgctattgatcagcgccgcgttccccgccgtcaggaccaagtacgccaactgcacgatctcatcccgttccaaagtcccctttttatactgttccctaaccaatctctcaatcaacacctcctcttcctctcccttgcctttcccatccccaatcccactatccctcctactcttcccagcaaccgcctcatcgacaagccgcccaacatacgctagcaggcgttgatcctcgtcctccgccgcatcgcgggaagaatcagtgacgagacttgtatcttgacaaagccactccacgtccg

SEQ ID NO: 5868 - DNA, 483 bp, Muscodor strobelii
  misc_feature: SGI cDNA ID NO. 561682
  misc_feature: Reduced expression when VOC is produced
  misc_feature: Encodes the peptide sequence at SEQ ID NO 5869
atgttgttgaaactcattcacttcgcccaaatcggcatcacggcctatggtgcaatgcaatctcaagcagcgatccaaaatctcctcaagtacgaagatgcgaccgagaaagcagccaagatctccaacgaagcagagaaccaactttaccgtacccgcatgacccaagcttctggagccatcgcgattctcgtctcgttcttctcatcagcactactgttcttctacggttcctcttacggcttccttgtgcgatatttctcctcgcctgtgatagcggccgggattttcgccgcaaggattcatctgcaggatttctggacggggaaaggaggtaaaaagatgtcaccaaaggtcccgctaccaaagatggatgggtataacgaggcattggaccgtacaggaaagctgcttgaggttctgggttggctaacgataagttgggctgcgagtgctgttattgctcttgtggttgggtattga

SEQ ID NO: 5869 - protein, 160 aa, Muscodor strobelii
  misc_feature: SGI Peptide ID NO. 561682
  misc_feature (13)..(153): NCBI GI: 169617007 Blast Desc: SNOG_11678 [Phaeosphaeria nodorum SN15] gi|111059602|gb|EAT80722.1| SNOG_11678 [Phaeosphaeria nodorum SN15]
  misc_feature (21)..(147): NCBI GI: 145603679 Blast Desc: [Magnaporthe grisea 70-15] gi|145011857|gb|EDJ96513.1| [Magnaporthe grisea 70-15]
  misc_feature (14)..(147): NCBI GI: 261352681 Blast Desc: VDBG_01218 [Verticillium albo-atrum VaMs.102]
  misc_feature: Useful for introducing or modulating the production of volatile compounds
MLLKLIHFAQIGITAYGAMQSQAAIQNLLKYEDATEKAAKISNEAENQLYRTRMTQASGAIAILVSFFSSALLFFYGSSYGFLVRYFSSPVIAAGIFAARIHLQDFWTGKGGKKMSPKVPLPKMDGYNEALDRTGKLLEVLGWLTISWAASAVIALVVGY

SEQ ID NO: 5870 - DNA, 4943 bp, Muscodor strobelii; identical to SEQ ID NO: 5867
  misc_feature: SGI EST ID NO. CUFF.14930.0
  misc_feature: Variant of the nucleotide sequence at SEQ ID NO 5868

SEQ ID NO: 5871 - DNA, 1341 bp, Muscodor strobelii
  misc_feature: SGI cDNA ID NO. 561683
  misc_feature: Encodes the peptide sequence at SEQ ID NO 5872
atggaagaggataacaccggacgacaaatcgacgttgtaggcgccggcctcggcggatgcgcgtgcgccttagctttgaaacatcacggccattcagtgacgatatacgagaagttgcgcacgtttagacgccttggagactctctcgggctcggcgagaacgcgctgaagctccttgaacgatggggcggaccggctctacgcacaaaactcacaagcattggaaatcaagcccctgatatgcagatccgacgatggcatgacggaaagatattggctgtgcagccactcatggatatggcaggctacatcgggcaccgcggtgattatcataacgtcttcctggatgctgtcagagatgcaggaataacagtgcacatggggcgcgacgtcgtagattatgaagatgcgaaaggacatcgacctattgctgtgtttgccgatggagcgagagtggaagcggatttgattgtcggcgccgatggtatcaaatcgcgtgcccgagagcttgtgctggggttcgaggatgcgccgaagagtagcggttattcatgttatcgggcatatttccctggtgctcatctcaaagaggacccgctttgtcgcgagtttgtcgatcatgattgtgtgaacatctggatcggggaagatacgcatctggtgcaaaacaccctccgtgatggcgatgaattcaactggattgtaactcgaaagatttcggaagaagccgatatggagattcgagaatcatggttccaagaaggcgatctcgaagacgtggcgcgtgtcactgctacggtcgacccgcggatccgggcagcagtagaaaagacgccatcgtgtcttgactggaagatctgctaccgcgatccgttgtcctcatgggtttcgccccgaagtcattccattgctctgctcggcgatagctgtcatcctcacttacccacgagcgcccaaggtgctagccaagcgacggagagcgctgcagtacttgcggtttgtttgaaattagccggcaaaggcaggataccacttgctgtgagttacccttgtaatcaccaagtgcaaatgactgagcaaagcaaggcccggacatatgagaaacttcgtttcgctcgtacacgtgctagccaaagcaacggggaggacctaagagatcgatggcataatgcactgaaagatgtcgaagaaggtgtagaaatagaccctgaatctctaaagattaggaacaggtggctatatgcatatgacgccgaggccgacactattgagagatgggacgaggtgtcgtctttggttaataaggagctggagacaggaaacatcactcctctgtgttga

SEQ ID NO: 5872 - protein, 446 aa, Muscodor strobelii
  misc_feature: SGI Peptide ID NO. 561683
  misc_feature (12)..(361): Pfam Id: PF01494 Pfam Desc: FAD binding domain
  misc_feature (9)..(38): Pfam Id: PF01266 Pfam Desc: FAD dependent oxidoreductase
  misc_feature (12)..(38): Pfam Id: PF00890 Pfam Desc: FAD binding domain
  misc_feature (9)..(39): Pfam Id: PF07992 Pfam Desc: Pyridine nucleotide-disulphide oxidoreductase
  misc_feature (2)..(445): NCBI GI: 212539744 Blast Desc: monoxygenase, [Penicillium marneffei ATCC 18224] gi|210067326|gb|EEA21418.1| monoxygenase, [Penicillium marneffei ATCC 18224]
  misc_feature (3)..(445): NCBI GI: 242803770 Blast Desc: monooxygenase, [Talaromyces stipitatus ATCC 10500] gi|218717586|gb|EED17007.1| monooxygenase, [Talaromyces stipitatus ATCC 10500]
  misc_feature (81)..(446): NCBI GI: 171684251 Blast Desc: protein product [Podospora anserina] gi|170942086|emb|CAP67738.1| protein product [Podospora anserina]
  misc_feature (5)..(441): NCBI GI: 145608542 Blast Desc: MGG_06552 [Magnaporthe grisea 70-15] gi|145016007|gb|EDK00497.1| MGG_06552 [Magnaporthe grisea 70-15]
  misc_feature (5)..(429): NCBI GI: 212532731 Blast Desc: MAK1-like monooxygenase, [Penicillium marneffei ATCC 18224] gi|210071886|gb|EEA25975.1| MAK1-like monooxygenase, [Penicillium marneffei ATCC 18224]
  misc_feature (1)..(446): NCBI GI: 171682920 Blast Desc: protein product [Podospora anserina] gi|170941419|emb|CAP67070.1| protein product [Podospora anserina]
  misc_feature (6)..(429): NCBI GI: 85095757 Blast Desc: NCU07055 [Neurospora crassa OR74A] gi|28921620|gb|EAA30908.1| conserved [Neurospora crassa OR74A]
  misc_feature (4)..(429): NCBI GI: 242776268 Blast Desc: MAK1-like monooxygenase, [Talaromyces stipitatus ATCC 10500] gi|218722430|gb|EED21848.1| MAK1-like monooxygenase, [Talaromyces stipitatus ATCC 10500]
  misc_feature (1)..(419): NCBI GI: 46115708 Blast Desc: FG03696.1 [Gibberella zeae PH-1]
  misc_feature (1)..(429): NCBI GI: 256725906 Blast Desc: NECHADRAFT_43749 [Nectria haematococca mpVI 77-13-4]
  misc_feature (106)..(379): SWISSPROT Homolog: EC 1.14.13.24 3-hydroxybenzoate 6-monooxygenase
MEEDNTGRQIDVVGAGLGGCACALALKHHGHSVTIYEKLRTFRRLGDSLGLGENALKLLERWGGPALRTKLTSIGNQAPDMQIRRWHDGKILAVQPLMDMAGYIGHRGDYHNVFLDAVRDAGITVHMGRDVVDYEDAKGHRPIAVFADGARVEADLIVGADGIKSRARELVLGFEDAPKSSGYSCYRAYFPGAHLKEDPLCREFVDHDCVNIWIGEDTHLVQNTLRDGDEFNWIVTRKISEEADMEIRESWFQEGDLEDVARVTATVDPRIRAAVEKTPSCLDWKICYRDPLSSWVSPRSHSIALLGDSCHPHLPTSAQGASQATESAAVLAVCLKLAGKGRIPLAVSYPCNHQVQMTEQSKARTYEKLRFARTRASQSNGEDLRDRWHNALKDVEEGVEIDPESLKIRNRWLYAYDAEADTIERWDEVSSLVNKELETGNITPLC

SEQ ID NO: 5873 - DNA, 4943 bp, Muscodor strobelii; identical to SEQ ID NO: 5867
  misc_feature: SGI EST ID NO. CUFF.14930.0
  misc_feature: Variant of the nucleotide sequence at SEQ ID NO 5871

SEQ ID NO: 5874 - DNA, 1464 bp, Muscodor strobelii
  misc_feature: SGI cDNA ID NO. 561684
  misc_feature: Reduced expression when VOC is produced
  misc_feature: Encodes the peptide sequence at SEQ ID NO 5875
atggatgaagatctagaggagaagggcagatcgtccgccgcaattgactctgaggctaacaaatcaactacaaatcccaatgtcgtagactgggagggtccgaatgaccctgctaatcctctcaattggccgacatcaaagaaaaacatacatatcgctattgtcagcttgttctcgctgaacgcaaatctggcggcgacgatgtttgccccgggagccgcccagttagctgtcgaattcggcataaccaatccgatagtcgaagcattaacagtcagcctctacgtccttggcttcgctcttggtcctctagtattggctccgctctctgaatgttacggccggctccccctgtactacttttgtaatacagtctatctcgcattcacgattggatgcgccttcagcacaaacacagccatgttccttgtctttcgctttatatgcggctcggcatcttctggccccttgacaatcggaggtggaacgattgcggattttactcctccagagacaagaggaaaggcaatcgcgttatttgctgtcggaccacttttgggaccggttcttggtccaattattggaggtttcgttgttcaggatgtaggttggcgctggacattccgcatcatcctcattatctctggtatcattctcttaataaccatcctctttatgcgagaaacaaacgccacaaccttgttacagcgcaagacagagactttacgaaaacatacaggcaacgagaaactagtatcaaaattagcccgggaggaaacgcccaaggaaacgctcctgcgggctattgtacgcccgataaaaatgatcattttctttcctattgtccttctcctctcactgtactcaggacttctctttgggatcatcttcctactgttcactaccttcccttccgtgtttcagggcgtctataacttcagcgaagggatcgtcgggctgtcttaccttggactgggcttcgggttcatcactggcctagccctgttctctgtcctcagcgacaagcttctaaatcaaaagggcgacaaagcaccagcaaagccggaacagcgtctgatcctcatgaagtggctgggtcccatcactccgcttggctgcttcttatacggctggacggcctattatcatgtgcactggattgttccgatcattggaacgtacataattggtcttggatctctattcatcgttatcccagcccaaatttacctggtcgactgcttcggagctgaagcatctgcttctgccttagcagccaacatgctcatccgttctccgttcggagcctttcttgatcttgccgcgccgcctttatacgaaaagctaggacttggatggggaaacagtatacttggtttcatatgtgttgcttttacccccgttccttggcttttctaccggtatggcgaagcgctgcggacgcgtttcaagattcacctgtaa

SEQ ID NO: 5875 - protein, 487 aa, Muscodor strobelii
  misc_feature: SGI Peptide ID NO. 561684
  misc_feature (55)..(439): Pfam Id: PF07690 Pfam Desc: Major Facilitator Superfamily
  misc_feature (55)..(437): Pfam Id: PF07690 Pfam Desc: Major Facilitator Superfamily
  misc_feature (6)..(485): NCBI GI: 121701155 Blast Desc: MFS transporter, [Aspergillus clavatus NRRL 1] gi|119396985|gb|EAW07416.1| MFS transporter, [Aspergillus clavatus NRRL 1]
  misc_feature (3)..(486): NCBI GI: 119467446 Blast Desc: MFS transporter, [Neosartorya fischeri NRRL 181] gi|119405681|gb|EAW15632.1| MFS transporter, [Neosartorya fischeri NRRL 181]
  misc_feature (9)..(445): NCBI GI: 256725441 Blast Desc: NECHADRAFT_95146 [Nectria haematococca mpVI 77-13-4]
  misc_feature (18)..(487): NCBI GI: 121701575 Blast Desc: MFS transporter, [Aspergillus clavatus NRRL 1] gi|119397195|gb|EAW07626.1| MFS transporter, [Aspergillus clavatus NRRL 1]
  misc_feature (2)..(487): NCBI GI: 256730036 Blast Desc: [Nectria haematococca mpVI 77-13-4]
  misc_feature (1)..(487): NCBI GI: 119482133 Blast Desc: MFS transporter, [Neosartorya fischeri NRRL 181] gi|119409249|gb|EAW19198.1| MFS transporter, [Neosartorya fischeri NRRL 181]
  misc_feature (6)..(487): NCBI GI: 159130023 Blast Desc: MFS multidrug transporter, [Aspergillus fumigatus A1163]
  misc_feature (1)..(483): NCBI GI: 55823916 Blast Desc: ABC transporter [Fusarium heterosporum]
  misc_feature (6)..(445): NCBI GI: 67901970 Blast Desc: AN7972.2 [Aspergillus nidulans FGSC A4] gi|40740436|gb|EAA59626.1| AN7972.2 [Aspergillus nidulans FGSC A4] gi|259480721|tpe|CBF73623.1| TPA: conserved [Aspergillus FGSC
  misc_feature (1)..(487): NCBI GI: 258574439 Blast Desc: conserved [Uncinocarpus reesii 1704] gi|237901667|gb|EEP76068.1| conserved [Uncinocarpus reesii 1704]
  misc_feature: Useful for introducing or modulating the production of volatile compounds
MDEDLEEKGRSSAAIDSEANKSTTNPNVVDWEGPNDPANPLNWPTSKKNIHIAIVSLFSLNANLAATMFAPGAAQLAVEFGITNPIVEALTVSLYVLGFALGPLVLAPLSECYGRLPLYYFCNTVYLAFTIGCAFSTNTAMFLVFRFICGSASSGPLTIGGGTIADFTPPETRGKAIALFAVGPLLGPVLGPIIGGFVVQDVGWRWTFRIILIISGIILLITILFMRETNATTLLQRKTETLRKHTGNEKLVSKLAREETPKETLLRAIVRPIKMIIFFPIVLLLSLYSGLLFGIIFLLFTTFPSVFQGVYNFSEGIVGLSYLGLGFGFITGLALFSVLSDKLLNQKGDKAPAKPEQRLILMKWLGPITPLGCFLYGWTAYYHVHWIVPIIGTYIIGLGSLFIVIPAQIYLVDCFGAEASASALAANMLIRSPFGAFLDLAAPPLYEKLGLGWGNSILGFICVAFTPVPWLFYRYGEALRTRFKIHL

SEQ ID NO: 5876 - DNA, 2341 bp, Muscodor strobelii
  misc_feature: SGI EST ID NO. CUFF.14850.0
  misc_feature: Variant of the nucleotide sequence at SEQ ID NO 5874
taaaaactcgggatactggagccttctcccagtaaatgttctattgcggccgttctaaaatttgattacaatgtctttaagcctttgcatacatacgtctttgcgcggctttcgagccaggcatagatgatgtccgtgttgatatacgacagagcctatgaacgtcaaggggccggggcatcggacaacagcaaatgaccgacttgctgtaagtaatttcttactcaattatttattgagattttctatgtcttttgagcttgatcaatccatctttcgagacgtagttgtcttattgaagcgacacctgatgcgcatcgtctgcaacaaagctctctatcgttagttaccgcttgacgttactatctgtgcaagtcctactacgttatacccagcatggatgaagatctagaggagaagggcagatcgtccgccgcaattgactctgaggctaacaaatcaactacaaatcccaatgtcgtagactgggagggtccgaatgaccctgctaatcctctcaattggccgacatcaaagaaaaacatacatatcgctattgtcagcttgttctcgctgaacgcaaatctggcggcgacgatgtttgccccgggagccgcccagttagctgtcgaattcggcataaccaatccgatagtcgaagcattaacagtcagcctctacgtccttggcttcgctcttggtcctctagtattggctccgctctctgaatgttacggccggctccccctgtactacttttgtaatacagtctatctcgcattcacgattggatgcgccttcagcacaaacacagccatgttccttgtctttcgctttatatgcggctcggcatcttctggccccttgacaatcggaggtggaacgattgcggattttactcctccagagacaagaggaaaggcaatcgcgttatttgctgtcggaccacttttgggaccggttcttggtccaattattggaggtttcgttgttcaggatgtaggttggcgctggacattccgcatcatcctcattatctctggtatcattctcttaataaccatcctctttatgcgagaaacaaacgccacaaccttgttacagcgcaagacagagactttacgaaaacatacaggcaacgagaaactagtatcaaaattagcccgggaggaaacgcccaaggaaacgctcctgcgggctattgtacgcccgataaaaatgatcattttctttcctattgtccttctcctctcactgtactcaggacttctctttgggatcatcttcctactgttcactaccttcccttccgtgtttcagggcgtctataacttcagcgaagggatcgtcgggctgtcttaccttggactgggcttcgggttcatcactggcctagccctgttctctgtcctcagcgacaagcttctaaatcaaaagggcgacaaagcaccagcaaagccggaacagcgtctgatcctcatgaagtggctgggtcccatcactccgcttggctgcttcttatacggctggacggcctattatcatgtgcactggattgttccgatcattggaacgtacataattggtcttggatctctattcatcgttatcccagcccaaatttacctggtcgactgcttcggagctgaagcatctgcttctgccttagcagccaacatgctcatccgttctccgttcggagcctttcttgatcttgccgcgccgcctttatacgaaaagctaggacttggatggggaaacagtatacttggtttcatatgtgttgcttttacccccgttccttggcttttctaccggtatggcgaagcgctgcggacgcgtttcaagattcacctgtaagactcctagttttaaagcacaactatcgacattctgctatcattaacatacgacgagagtgactatccaactccttcattttctaagtagtgtattattatacagctctagagtatataaattgcatgtaattccactccctcaagtatcgctcagctgctatggatagagaattgcgttccctgataggggatatgagacatgcgaaccgcttgtgccagctgctgcacagacctatgaatcatgtacagcgataacaacctttccgaaatgtgacccatcaatcacatattgcatggcgctcttgacttcgtcaaatccgaatacgcgatcgatgatcgggtgaactaccggcgccgaagaaccatcatacacacactgaatcatttcactcgctctgtcggccggaccaacattgatacccttcaagactgcgttcctttctatgaggagtgcgcttatcgctggcgagttccctttc

SEQ ID NO: 5877 - DNA, 1074 bp, Muscodor strobelii
  misc_feature: SGI cDNA ID NO. 561685
  misc_feature: Encodes the peptide sequence at SEQ ID NO 5878
atgaagcgatggacgtcaatgttagacggtgtcgagaatttgaggcaggagactgtacccgacataactgacttagcagaagatgaggttcttgtgaagatcagctttgtgtcgttgaataatcgcgacgtcaagatggtgggcggtaacaaacttcttagtggcatagatccaacagagcccataattccatgctcagacgcaagtggcattatcgtcaaagtcggaggagctactgccgctaagcagtggaaagagggcgatcgagtctttagcgtcgtgcgcccaaatcacctgacgggtccaacgcgacgggagcataacatcaacgggatcggcattccgttgccaggtgtattggccgagtaccgcatctttccgacaactggactgctcccagtaccagaaagcttatcgctgagagaagcttgcacactcacggccgcatctgtcacggcatggatgtgcctaagctgggatcgtcctatcggatctccacgtcggggtaaggatacagtggtcctgctggagggaactggcggagtcagcatttgtgctctgcaaatggcacattctcttgggatgacgaccatcataacatcttcatcggacgagaagctccaacgagcaaaggaactgggcgcggactatgtcatcaactacaagacgacccctgaatgggatcaagaagtccatcgcctaacaaacggcaaaggtgctgacatagtcatcgacatcggcggaccaggcacgtttagtaagagtgttagctctctcgcgtacggcggcaccgttaacgccgttggaatacttacaggaatgatggagaaagggaactcgccagcgataagcgcactcctcatagaaaggaacgcagtcttgaagggtatcaatgttggtccggccgacagagcgagtgaaatgattcagtgtgtgtatgatggttcttcggcgccggtagttcacccgatcatcgatcgcgtattcggatttgacgaagtcaagagcgccatgcaatatgtgattgatgggtcacatttcggaaaggttgttatcgctgtacatgattcatag

SEQ ID NO: 5878 - protein, 357 aa, Muscodor strobelii
  misc_feature: SGI Peptide ID NO. 561685
  misc_feature (27)..(134): Pfam Id: PF08240 Pfam Desc: Alcohol dehydrogenase GroES-like domain
  misc_feature (170)..(314): Pfam Id: PF00107 Pfam Desc: Zinc-binding dehydrogenase
  misc_feature (1)..(354): NCBI GI: 242768664 Blast Desc: alcohol dehydrogenase, [Talaromyces stipitatus ATCC 10500] gi|218724811|gb|EED24228.1| alcohol dehydrogenase, [Talaromyces stipitatus ATCC 10500]
  misc_feature (1)..(356): NCBI GI: 70988757 Blast Desc: alcohol dehydrogenase, zinc-containing [Aspergillus fumigatus Af293] gi|66846864|gb|EAL87195.1| alcohol dehydrogenase, zinc-containing, [Aspergillus fumigatus Af293]
  misc_feature (3)..(355): NCBI GI: 171678775 Blast Desc: protein product [Podospora anserina] gi|170937457|emb|CAP62115.1| protein product [Podospora anserina]
  misc_feature (1)..(354): NCBI GI: 169777483 Blast Desc: [Aspergillus oryzae RIB40] gi|83771944|dbj|BAE62074.1| protein product [Aspergillus oryzae]
  misc_feature (1)..(354): NCBI GI: 67901298 Blast Desc: AN7636.2 [Aspergillus nidulans FGSC A4] gi|40742632|gb|EAA61822.1| AN7636.2 [Aspergillus nidulans FGSC A4] gi|259483968|tpe|CBF79791.1| TPA: oxidoreductase (Eurofung)
  misc_feature (1)..(357): NCBI GI: 119497803 Blast Desc: alcohol dehydrogenase, zinc-containing [Neosartorya fischeri NRRL 181] gi|119413823|gb|EAW23762.1| alcohol dehydrogenase, zinc-containing [Neosartorya fischeri NRRL 181]
  misc_feature (1)..(354): NCBI GI: 238494630 Blast Desc: alcohol dehydrogenase, zinc-containing, [Aspergillus flavus NRRL3357] gi|220695201|gb|EED51544.1| alcohol dehydrogenase, zinc-containing, [Aspergillus flavus NRRL3357]
  misc_feature (1)..(354): NCBI GI: 39972957 Blast Desc: MGG_07773 [Magnaporthe grisea 70-15] gi|145012545|gb|EDJ97199.1| MGG_07773 [Magnaporthe grisea 70-15]
  misc_feature (3)..(354): NCBI GI: 256728349 Blast Desc: NECHADRAFT_53900 [Nectria haematococca mpVI 77-13-4]
  misc_feature (1)..(354): NCBI GI: 115433232 Blast Desc: conserved [Aspergillus terreus NIH2624] gi|114189605|gb|EAU31305.1| conserved [Aspergillus terreus NIH2624]
  misc_feature (25)..(270): SWISSPROT Homolog: EC 1.1.1.1 Alcohol dehydrogenase
MKRWTSMLDGVENLRQETVPDITDLAEDEVLVKISFVSLNNRDVKMVGGNKLLSGIDPTEPIIPCSDASGIIVKVGGATAAKQWKEGDRVFSVVRPNHLTGPTRREHNINGIGIPLPGVLAEYRIFPTTGLLPVPESLSLREACTLTAASVTAWMCLSWDRPIGSPRRGKDTVVLLEGTGGVSICALQMAHSLGMTTIITSSSDEKLQRAKELGADYVINYKTTPEWDQEVHRLTNGKGADIVIDIGGPGTFSKSVSSLAYGGTVNAVGILTGMMEKGNSPAISALLIERNAVLKGINVGPADRASEMIQCVYDGSSAPVVHPIIDRVFGFDEVKSAMQYVIDGSHFGKVVIAVHDS

SEQ ID NO: 5879 - DNA, 215 bp, Muscodor strobelii
  misc_feature: SGI EST ID NO. CUFF.14857.0
  misc_feature: Variant of the nucleotide sequence at SEQ ID NO 5877
ccgacataactgacttagcagaagatgaggttcttgtgaagatcagctttgtgtcgttgaataatcgcgacgtcaagatggtgggcggtaacaaacttcttagtggcatagatccaacagagcccataattccatgctcagacgcaagtggcattatcgtcaaagtcggaggagctactgccgctaagcagtggaaagagggcgatcgagtcttt

SEQ ID NO: 5880 - DNA, 933 bp, Muscodor strobelii
  misc_feature: SGI cDNA ID NO. 561686
  misc_feature: Elevated expression when VOC is produced
  misc_feature: Encodes the peptide sequence at SEQ ID NO 5881
atggcagaggcagtcggcgtcatcgcagcggcacttcagctttctgcatactgcgtacttctagctgagggcttatatagcggcacgaatgccacccgcacgctcaaagaatacgagagtcatttttatgatctcaaagccatctgtgcctctatacagactactccatcgctacagacatcgcagattcaatcctgtactacgaaaattatctctgcgatcgagcaaagctattttctcacagtcatcaaaaaaccacgcgttattcgctcctttattttcgtcatcagtcgaagaccgctactcgagtttctgcaacatctcgaaagttacaaaaccagtctcaccttgtgcatcacaactatcaactcttccaagctcagtggcattgaaggtgtgattcaagccatggattattccaaagaaacagttcgcgagcagacgacattcgatcaggcaatggacgacaccaatgagcaggacatggcgcttcagcaaacaacggaagactccagtgccctacaaaactacgctaatgatcaatgggatatgccgcatcacaggtctccaatttcggagcagacgggtgctccatcgagatatcactacaacaatcaggacaactccactggcaatatgcgagtaggaccttacattgccctccctaataacacaggcaggcccttggacgccgcattcgggggtgacgactacgccaataattacatgagagatagggaaagtgacttccagcgatctgagaacggatcttccgcacaggggggtagaaagcggcacccacgtcgccgaaggactatggatgttggcccaacctttaccggcacggcacagccagagcatatcagcggaaattgggtgcggaacaagatgtctgccgacggggatatgcaagttggtccctccttcaaatga

SEQ ID NO: 5881 - protein, 310 aa, Muscodor strobelii
  misc_feature: SGI Peptide ID NO. 561686
  misc_feature: Useful for introducing or modulating the production of volatile compounds
MAEAVGVIAAALQLSAYCVLLAEGLYSGTNATRTLKEYESHFYDLKAICASIQTTPSLQTSQIQSCTTKIISAIEQSYFLTVIKKPRVIRSFIFVISRRPLLEFLQHLESYKTSLTLCITTINSSKLSGIEGVIQAMDYSKETVREQTTFDQAMDDTNEQDMALQQTTEDSSALQNYANDQWDMPHHRSPISEQTGAPSRYHYNNQDNSTGNMRVGPYIALPNNTGRPLDAAFGGDDYANNYMRDRESDFQRSENGSSAQGGRKRHPRRRRTMDVGPTFTGTAQPEHISGNWVRNKMSADGDMQVGPSFK

SEQ ID NO: 5882 - DNA, 1339 bp, Muscodor strobelii
  misc_feature: SGI EST ID NO. CUFF.14874.0
  misc_feature: Variant of the nucleotide sequence at SEQ ID NO 5880
ccggcggtgcttccaaatggtcagaaatttcagtaactgtcagcgaatttccctaggttgactagaatcgttttattgggcacagtcttatccaagtagcattgagcaacgacatccgacaacgtgcggggttgggcaccatcctacaatcctcagatacagcttacggtatactaatttatagcttacaagcatggcagaggcagtcggcgtcatcgcagcggcacttcagctttctgcatactgcgtacttctagctgagggcttatatagcggcacgaatgccacccgcacgctcaaagaatacgagagtcatttttatgatctcaaagccatctgtgcctctatacagactactccatcgctacagacatcgcagattcaatcctgtactacgaaaattatctctgcgatcgagcaaagctattttctcacagtcatcaaaaaaccacgcgttattcgctcctttattttcgtcatcagtcgaagaccgctactcgagtttctgcaacatctcgaaagttacaaaaccagtctcaccttgtgcatcacaactatcaactcttccaagctcagtggcattgaaggtgtgattcaagccatggattattccaaagaaacagttcgcgagcagacgacattcgatcaggcaatggacgacaccaatgagcaggacatggcgcttcagcaaacaacggaagactccagtgccctacaaaactacgctaatgatcaatgggatatgccgcatcacaggtctccaatttcggagcagacgggtgctccatcgagatatcactacaacaatcaggacaactccactggcaatatgcgagtaggaccttacattgccctccctaataacacaggcaggcccttggacgccgcattcgggggtgacgactacgccaataattacatgagagatagggaaagtgacttccagcgatctgagaacggatcttccgcacaggggggtagaaagcggcacccacgtcgccgaaggactatggatgttggcccaacctttaccggcacggcacagccagagcatatcagcggaaattgggtgcggaacaagatgtctgccgacggggatatgcaagttggtccctccttcaaatgattgatgcttggctgcctggagaatgatttcgctcagcgaattgggggtttcatgacatggttgcactgctctataattgaaagtcacacgccgtcgctatctttaattagtacttattcgaggctggccagaaaaagacgagacccccacttcgaacaccagtgttggaggtctcgtcttttttggcccagcctcgctagcacatttctcgaa

SEQ ID NO: 5883 - DNA, 2232 bp, Muscodor strobelii
  misc_feature: SGI cDNA ID NO. 561687
  misc_feature: Encodes the peptide sequence at SEQ ID NO 5884
atgtgcgcgcgggtgtgtgaacggattgcatgggagtggtcgggattctgcaaaatctgctacagctgggcgctcgttttgaaattggcagcttatcaataccgtccgctcgacgaccctagcaaagaaatacgaattgcgacaatcattccggggggctacgaggaccctatccgactttatatccatcatgcggcgttagaacccaacttaactcgccacgaacggagacacttagcgcttgatgacattcggaaaacactccccgaaggatggacagcacacgagaccaaagaaggacgatgcatttttgtgtctgagaatgatgtgtcctgggatcacccaaaccccgatattgagcggagtttctatgaattaggcgacaacgcaagctgcacaccagcatcaagtctctcattcgaggctttatcatacggaggcggccaaatgacatggagctgggtcaagattggcgtcaatcttgacttcgttctgcgtgatcttcgcctccaggacaagcctcgcgatatgtgggtagatgccatttgcatcaatcaggctgacattcaagaacggaataagcaagttacacgaatggccgatatctattctcaagcttcgcaagtgcttatttggctcgatattactgttgatgatagtgagcgcgccatcaatgtcctaaaacgcataggccaacataacgagcaattgaccaatggcaatatggttcgctcccctggagaccttacaacatttcatcgctcggacttccagtggcctctaaacggcgaagactggcttgcggtagagcatctcatcagacgcacctggttcaagcgtatgtgggtcgttcaagaagccctactcggcggaccaagaacagctctccaatttggccagtccaagatgtcctggtctgtcttttgccgtgcgattgagtctatacagggaaacagttatgtgccgcccagtgtgctggccaatattagcgaggtctatagtctttgcactgcggaccatgacagagaagcaatcgtgcatattctgataatgggcatgctgcgcaattgcactgatccccgtgactcggtgtatggtcttctggggcttctatcagaatcgatgcggactcagatccatccagactactcggcacctgcgtctaaagccttttctgatttcacgttggcatatataagccatgtcaaacgtcttgagatcctggatctctgcgatcatggcttcaagcgagctactcgtccctcgtgggtatttgacccttctcaggttcaaggtctgggagcatactcggcaatcatgaacccgcgtcaattctgctcacatttctcagaatgtcacgtgaaaagagaccgctcaggtattttagaagttctcgggatccgaatcagtgttgttgccactacatcagaggttgtgcctggtcggagcgaattcccatctgatgaagactgcttaaagtcatgtattcaaacagtcaggagatgggagcctgaaaaccttgccgggaaagactatccaaatggcgagagcctacttgaagcctatgcccagacactgatctccggcaaactagaagagcgtttccctaactcttctcatcccaaattgcatagatggcagggtcagtaccatacaaacgccctatttggggaattggcgaaagaaggggagtttgctctcaatgagcttacaaggcaggaacgagaaccgcttgatgttttggtaggcaggaagctcattaagtgcgataatggatatcttggacttggtccccgacaaaccgccgctggtgacttgatttgcgttctacttggtcatgagaacccagtgatactacgtcagcaagacgcgggcagttatatcctcgtaggtacttgctacctacacggaatatcagatggtgttgccctattggggcctctgccaaagctctggaaagtgcagagattcttagatgcgggaagacagctcgcaatttgcaagttcttcaatgaagacacaaaaacattgcaagatgaagacccaagactggagcccctgagccctgattgggagaggtcagaaagtcgtccgcgagtagccgacgatcctgaaatattccaagagtttcgaaaccgcatcactggggaaattgtcaggtctgacccacggcttagtcccgatgctctcagaagacgaggacttgccttagagaccttctcactcgcgtga

SEQ ID NO: 5884 - protein, 743 aa, Muscodor strobelii
  misc_feature: SGI Peptide ID NO. 561687
  misc_feature (140)..(286): Pfam Id: PF06985 Pfam Desc: Heterokaryon incompatibility protein (HET)
  misc_feature (178)..(286): Pfam Id: PF06985 Pfam Desc: Heterokaryon incompatibility protein (HET)
  misc_feature (29)..(742): NCBI GI: 154311024 Blast Desc: BC1G_06630 [Botryotinia fuckeliana B05.10] gi|150851034|gb|EDN26227.1| BC1G_06630 [Botryotinia fuckeliana B05.10]
  misc_feature (29)..(742): NCBI GI: 256727220 Blast Desc: NECHADRAFT_32743 [Nectria haematococca mpVI 77-13-4]
  misc_feature (29)..(743): NCBI GI: 115492481 Blast Desc: [Aspergillus terreus NIH2624] gi|114197728|gb|EAU39428.1| [Aspergillus terreus NIH2624]
  misc_feature (32)..(742): NCBI GI: 256719970 Blast Desc: NECHADRAFT_98482 [Nectria haematococca mpVI 77-13-4]
  misc_feature (29)..(743): NCBI GI: 169603560 Blast Desc: SNOG_04789 [Phaeosphaeria nodorum SN15] gi|111066060|gb|EAT87180.1| SNOG_04789 [Phaeosphaeria nodorum SN15]
  misc_feature (27)..(726): NCBI GI: 46139411 Blast Desc: FG11220.1 [Gibberella zeae PH-1]
  misc_feature (32)..(742): NCBI GI: 39974569 Blast Desc: MGG_00569 [Magnaporthe grisea 70-15] gi|145018530|gb|EDK02809.1| MGG_00569 [Magnaporthe grisea 70-15]
  misc_feature (182)..(742): NCBI GI: 145609067 Blast Desc: MGG_09107 [Magnaporthe grisea 70-15] gi|145016510|gb|EDK00940.1| MGG_09107 [Magnaporthe grisea 70-15]
  misc_feature (32)..(608): NCBI GI: 261357884 Blast Desc: conserved [Verticillium albo-atrum VaMs.102]
  misc_feature (124)..(687): NCBI GI: 171678935 Blast Desc: protein product [Podospora anserina] gi|170937538|emb|CAP62196.1| protein product [Podospora anserina]
MCARVCERIAWEWSGFCKICYSWALVLKLAAYQYRPLDDPSKEIRIATIIPGGYEDPIRLYIHHAALEPNLTRHERRHLALDDIRKTLPEGWTAHETKEGRCIFVSENDVSWDHPNPDIERSFYELGDNASCTPASSLSFEALSYGGGQMTWSWVKIGVNLDFVLRDLRLQDKPRDMWVDAICINQADIQERNKQVTRMADIYSQASQVLIWLDITVDDSERAINVLKRIGQHNEQLTNGNMVRSPGDLTTFHRSDFQWPLNGEDWLAVEHLIRRTWFKRMWVVQEALLGGPRTALQFGQSKMSWSVFCRAIESIQGNSYVPPSVLANISEVYSLCTADHDREAIVHILIMGMLRNCTDPRDSVYGLLGLLSESMRTQIHPDYSAPASKAFSDFTLAYISHVKRLEILDLCDHGFKRATRPSWVFDPSQVQGLGAYSAIMNPRQFCSHFSECHVKRDRSGILEVLGIRISVVATTSEVVPGRSEFPSDEDCLKSCIQTVRRWEPENLAGKDYPNGESLLEAYAQTLISGKLEERFPNSSHPKLHRWQGQYHTNALFGELAKEGEFALNELTRQEREPLDVLVGRKLIKCDNGYLGLGPRQTAAGDLICVLLGHENPVILRQQDAGSYILVGTCYLHGISDGVALLGPLPKLWKVQRFLDAGRQLAICKFFNEDTKTLQDEDPRLEPLSPDWERSESRPRVADDPEIFQEFRNRITGEIVRSDPRLSPDALRRRGLALETFSLA

SEQ ID NO: 5885 - DNA, 1362 bp, Muscodor strobelii
  misc_feature: SGI cDNA ID NO. 561688
  misc_feature: Encodes the peptide sequence at SEQ ID NO 5886
atggcgcgaaaaaggagccatgccgagtttgcgctcgatgacccgggcgcagtcgctcccgatgaccagacacaggtagcgaagggcgtgcacatgccagaacacaatatggatactaaagatttcctgctccacgccgtcggctcttaccgatgggcaccgatccatgacacgctacattcaatgttggatacaaaagaccgccttgctctatcggctacgtcccaagcacttcgccagggacttcgcgacactgtatggtccatcaataagaagctagctagattcatcaagaaccccgaggctttccgtactcaactcggaaagtccaacgccttaattgcaggcaacttcgcgcttgatttcttggactgcatgactttcaaggattccaaaatcgacatccttgtgcagcaaggacaagactcagacacgatggagcaatacctactctcaattggctatgagaagattgatcaatatgaagtgggagacttttacccaaatcttcatgttgttatggagaatagagtttactcagaactagaaccagaagcaaccaccaaagcttctcggttcaacgtgaacatctggtgtacgaaggacatccccattttcaacatcttgcgcacaagccccagcacttgcatggtcaacttcctcacgtggaacaaggcatattcgatcttccctagagtaacatttctacggcatcgaactatcccccttcaatgcgaagactatcctctcccagacaagtgcagaaatggaaagtttcacgcaagattcagtcagctgggctggcctatgtgggtacatcctatcatacccagtgtcgccgatgaccttctagggcgacatgacgaacatggctttaactatccttactacctcagtggacgggtcggtgatagggcaagttggatcctcaatctcgatacaaaaggcgtcccacgacctgccatgcctgactttgttgtcgaaagctctagtttcggaattatcggcattcaggatgatgccgatgggaccatatctgccggtcattccaatttgctagtccatgcaaaaatgttcgaggggtcggccgtccttcgttatcgttacacttctggatggcttgaccgtctgcttcctattttcgatcgggcaacgcaattgcaactcttcaaagtcgacgaacccgatcgatccttactgtggtcaaaccacgctcgctacgaacttgatcgcagcgccaagtgcgatgtcgagggatgggattatatggatgaagaagtcccaggcctactagatgagtggcttcgcaacccgacaatgttacacgatatgggatacaatagacaatttatcgatcgctag

SEQ ID NO: 5886 - protein, 453 aa, Muscodor strobelii
  misc_feature: SGI Peptide ID NO. 561688
  misc_feature (51)..(434): NCBI GI: 256721412 Blast Desc: NECHADRAFT_88423 [Nectria haematococca mpVI 77-13-4]
  misc_feature (54)..(437): NCBI GI: 154301077 Blast Desc: [Botryotinia fuckeliana B05.10] gi|150856259|gb|EDN31451.1| [Botryotinia fuckeliana B05.10]
  misc_feature (55)..(436): NCBI GI: 170085847 Blast Desc: [Laccaria bicolor S238N-H82] gi|164651699|gb|EDR15939.1| [Laccaria bicolor S238N-H82]
  misc_feature (55)..(317): NCBI GI: 242209890 Blast Desc: [Postia placenta Mad-698-R] gi|220730133|gb|EED83995.1| [Postia placenta Mad-698-R]
  misc_feature (55)..(317): NCBI GI: 242216721 Blast Desc: [Postia placenta Mad-698-R] gi|220726711|gb|EED80652.1| [Postia placenta Mad-698-R]
  misc_feature (54)..(235): NCBI GI: 169845441 Blast Desc: [Coprinopsis cinerea okayama7#130] gi|116509505|gb|EAU92400.1| [Coprinopsis cinerea okayama7#130]
  misc_feature (50)..(235): NCBI GI: 169845439 Blast Desc: [Coprinopsis cinerea okayama7#130] gi|116509504|gb|EAU92399.1| [Coprinopsis cinerea okayama7#130]
  misc_feature (177)..(440): NCBI GI: 46117372 Blast Desc: FG04528.1 [Gibberella zeae PH-1]
  misc_feature (82)..(317): NCBI GI: 169844535 Blast Desc: [Coprinopsis cinerea okayama7#130] gi|116509728|gb|EAU92623.1| [Coprinopsis cinerea okayama7#130]
  misc_feature (195)..(434): NCBI GI: 256730035 Blast Desc: NECHADRAFT_27878 [Nectria haematococca mpVI 77-13-4]
MARKRSHAEFALDDPGAVAPDDQTQVAKGVHMPEHNMDTKDFLLHAVGSYRWAPIHDTLHSMLDTKDRLALSATSQALRQGLRDTVWSINKKLARFIKNPEAFRTQLGKSNALIAGNFALDFLDCMTFKDSKIDILVQQGQDSDTMEQYLLSIGYEKIDQYEVGDFYPNLHVVMENRVYSELEPEATTKASRFNVNIWCTKDIPIFNILRTSPSTCMVNFLTWNKAYSIFPRVTFLRHRTIPLQCEDYPLPDKCRNGKFHARFSQLGWPMWVHPIIPSVADDLLGRHDEHGFNYPYYLSGRVGDRASWILNLDTKGVPRPAMPDFVVESSSFGIIGIQDDADGTISAGHSNLLVHAKMFEGSAVLRYRYTSGWLDRLLPIFDRATQLQLFKVDEPDRSLLWSNHARYELDRSAKCDVEGWDYMDEEVPGLLDEWLRNPTMLHDMGYNRQFIDR

SEQ ID NO: 5887 - DNA, 194 bp, Muscodor strobelii
  misc_feature: SGI EST ID NO. CUFF.14904.0
  misc_feature: Variant of the nucleotide sequence at SEQ ID NO 5885
aatagagtttactcagaactagaaccagaagcaaccaccaaagcttctcggttcaacgtgaacatctggtgtacgaaggacatccccattttcaacatcttgcgcacaagccccagcacttgcatggtcaacttcctcacgtggaacaaggcatattcgatcttccctagagtaacatttctacggcatcgaac

SEQ ID NO: 5888 - DNA, 1026 bp, Muscodor strobelii
  misc_feature: SGI cDNA ID NO. 561689
  misc_feature: Encodes the peptide sequence at SEQ ID NO 5889
atgtcttatgatcaggacagacaaaagaaacggaggctcactagagacggtgactatgtagatacatccaagcccactgcattcttccagcctcatggaggccgagaatggaccgtatcagttgctataccgggcagcgtcatctcaacttgccgtcgagatgaccagcgcacaaacatagtctcccacattgcgcgggctctctcagtcttcagcatagacgaagtagtcatcttcgatgactcgcccccagactcacgggcaaccaacgtcgatcctgctatgtacacgggcgacgttgatccctgtggatatgtcgaccatctgctgcagtatcttgagatgccgcctttcatgcgccgcactctgttaccaattcatccgaatctcaagcaagccggtctaatggctagtttggatattccgtctcacccccatcagacagattggctcccctactgtgagggtgttaccacgtcgggtggaacgaggaccgggtccggcacgctcgttgatgttggacgcaaagctcctgtaacaattgcggaggacgttccgcccaaaacccgcatcacattacgaatggacgagaacgacccttccaaaggcgagcccatagatcccgctacgcctcgcaccgaagggggctactattggggcttcgcagtccgtcggtgtagctccctatccgcagtatttgaagaatgtacttacgagggcggctatgatatgagtatcggtacctcagaacgaggcctcacgattcaagaagcgtttccggcgcggaagaaagagcccgccaccttcaatcatctgctccttgtattcggagggccaagaggtcttgaatacgcagctgagaatgacgcttcgctgaatgagatgggaatcgtgaggggcaagacgaaggagttgttcgatcactggattaacatcctaccgggtcagggaagtcggacgattcgcacggatgaggcgcttttcattgggttatctggtttgagacgggtgtgggagagtcggtga

SEQ ID NO: 5889 - protein, 341 aa, Muscodor strobelii
  misc_feature: SGI Peptide ID NO. 561689
  misc_feature (38)..(335): Pfam Id: PF02598 Pfam Desc: Uncharacterized ACR, COG2106
  misc_feature (3)..(338): NCBI GI: 39970829 Blast Desc: MGG_02881 [Magnaporthe grisea 70-15] gi|149210325|ref|XP_001522537.1| MGCH7_ch7g640 [Magnaporthe grisea 70-15] gi|86196595|gb|EAQ71233.1| MGCH7_ch7g640 grisea
  misc_feature (8)..(340): NCBI GI: 116192931 Blast Desc: CHGG_06183 [Chaetomium globosum CBS 148.51] gi|88182096|gb|EAQ89564.1| CHGG_06183 [Chaetomium globosum CBS 148.51]
  misc_feature (1)..(340): NCBI GI: 46135861 Blast Desc: FG09446.1 [Gibberella zeae PH-1]
  misc_feature (22)..(340): NCBI GI: 85074739 Blast Desc: NCU00597 [Neurospora crassa OR74A] gi|28927550|gb|EAA36501.1| conserved [Neurospora crassa OR74A] gi|38567310|emb|CAE76598.1| conserved [Neurospora crassa]
  misc_feature (6)..(340): NCBI GI: 171684083 Blast Desc: protein product [Podospora anserina] gi|170942002|emb|CAP67654.1| protein product [Podospora anserina]
  misc_feature (55)..(339): NCBI GI: 261353805 Blast Desc: deoxyribose-phosphate aldolase [Verticillium albo-atrum VaMs.102]
  misc_feature (20)..(337): NCBI GI: 156057771 Blast Desc: SS1G_04617 [Sclerotinia sclerotiorum 1980] gi|154702402|gb|EDO02141.1| SS1G_04617 [Sclerotinia sclerotiorum 1980]
  misc_feature (7)..(341): NCBI GI: 258573617 Blast Desc: conserved [Uncinocarpus reesii 1704] gi|237901256|gb|EEP75657.1| conserved [Uncinocarpus reesii 1704]
  misc_feature (18)..(337): NCBI GI: 154323528 Blast Desc: BC1G_00163 [Botryotinia fuckeliana B05.10] gi|150842392|gb|EDN17585.1| BC1G_00163 [Botryotinia fuckeliana B05.10]
  misc_feature (23)..(341): NCBI GI: 119192166 Blast Desc: CIMG_00460 [Coccidioides immitis RS]
MSYDQDRQKKRRLTRDGDYVDTSKPTAFFQPHGGREWTVSVAIPGSVISTCRRDDQRTNIVSHIARALSVFSIDEVVIFDDSPPDSRATNVDPAMYTGDVDPCGYVDHLLQYLEMPPFMRRTLLPIHPNLKQAGLMASLDIPSHPHQTDWLPYCEGVTTSGGTRTGSGTLVDVGRKAPVTIAEDVPPKTRITLRMDENDPSKGEPIDPATPRTEGGYYWGFAVRRCSSLSAVFEECTYEGGYDMSIGTSERGLTIQEAFPARKKEPATFNHLLLVFGGPRGLEYAAENDASLNEMGIVRGKTKELFDHWINILPGQGSRTIRTDEALFIGLSGLRRVWESR

SEQ ID NO: 5890 - DNA, 3133 bp, Muscodor strobelii
  misc_feature: SGI EST ID NO. CUFF.15108.1
  misc_feature: Variant of the nucleotide sequence at SEQ ID NO 5888
ccgcactggccaatcaccaatcgtgtggacgtcttgcgtgcatagtatatgtatgtcaatagaatgaaagatgccagcgaagtagctcaagcaaactagcaaagacgcttgtctttccttcgggaatgccgcccttcgggtgatttacgacttcggtcaacttcgctttttggattgccccgggttgggtgttcgatttgggtcatttccttcttctttttctttattttctctgctttccgcggtctgcattggtttcttacatttacttgaaatttgcggcttagctaagtgttcgatacgtcttaagatttccacttattgtaatgtctgtagtcttatttattatcacgttcctcgtttttaaagtaacatatagctttcgtaataagtcgtcgcaacaaaatcttacggtgtgttttaactaaatggaggagatatgcttcactcgcatgcgacaccagtgttagaattccatctacagtgtaaatacacacattcacatttgcaagtgcacagacatataatatataaattcattgcctataactcggaaacccatattctcataacgccttgcctgccttgatcctcaatacctcgtgaaatacaaacatcagtcactcgtcctaattgtcacagtctctggcatccaccctcgcgatctcgtcgcctagcttccgccaagatcggcgagagtcctaacaccgttaccacgcccggctgcaccagacggtcctgcagcgccaccggctcggatgggcgcgggtggtgctctgggcttgaggaggttgaaatcggacttctcggctgctttgtaagggtcgaactgtgaacacatcagtcagcgatatcccgatcaaagagattatagagacagatatgaatggggaacataccgagaacaacgaggcaaaatacagcccaaagaaagtaagcagagcattaataacattaaagctactaaagctccagggtcgtcccccaagggtctgtccaccacttctcctcttatccccaggaccacccagagtcctcccagagcctccgaaagaagcacccggtgccgccgtcccagccagcttgacagccttctcaacagcacttgtaagagcaggcgggttcgcaccgcgaatcgtctcgatgaccgagccagacttgaagatgaggaacgtaggcatggcggagacgccgtgggattgggcgatggactggtggttgtcgacgtttacttttacgaatgctattttacccggtttggagtatttcgttgagagggactcgaaagcgggcgctatcattttgcaggggccgcaccagtccgcgtaaactatatataataaattagagtggtgtatggctttgggtatggggttcaaagtggacgggacgtacagtctgcgacgacgatggtggaagagccgaggatgcgctgccactcgcctgacgagctgatgttcactgttgcgctcattttggcgggtttgattggagacttgtaaagttgctgcagatacttcgagtcgagggctaagtagagaaagtgatgtgaggctgcgtcggacaagcttaaaggggaggaatgtcaagaggatgtaaatggtcgaggcagcagttgatggcggcgggattggcggggatggcggaagtgaagtaaagctgtcctgatctagaatgatggcccccactgtttcgcctacccggtagacttaccttagtgaatgccgcgcccgctgcttcagtgggttgggggacctgcatccactgtcaagcatagtctcccctctattatggcaggtggtgaagttttgttcactgctattctgccggcacagttttatcagatccataccactcgtcagtgttactcaattgagtcaagatggaatgccgataataactgcatcacgatcggcaaatcaaagtattgagttataatgtcttatgatcaggacagacaaaagaaacggaggctcactagagacggtgactatgtagatacatccaagcccactgcattcttccagcctcatggaggccgagaatggaccgtatcagttgctataccgggcagcgtcatctcaacttgccgtcgagatgaccagcgcacaaacatagtctcccacattgcgcgggctctctcagtcttcagcatagacgaagtagtcatcttcgatgactcgcccccagactcacgggcaaccaacgtcgatcctgctatgtacacgggcgacgttgatccctgtggatatgtcgaccatctgctgcagtatcttgagatgccgcctttcatgcgccgcactctgttaccaattcatccgaatctcaagcaagccggtctaatggctagtttggatattccgtctcacccccatcagacagattggctcccctactgtgagggtgttaccacgtcgggtggaacgaggaccgggtccggcacgctcgttgatgttggacgcaaagctcctgtaacaattgcggaggacgttccgcccaaaacccgcatcacattacgaatggacgagaacgacccttccaaaggcgagcccatagatcccgctacgcctcgcaccgaagggggctactattggggcttcgcagtccgtcggtgtagctccctatccgcagtatttgaagaatgtacttacgagggcggctatgatatgagtatcggtacctcagaacgaggcctcacgattcaagaagcgtttccggcgcggaagaaagagcccgccaccttcaatcatctgctccttgtattcggagggccaagaggtcttgaatacgcagctgagaatgacgcttcgctgaatgagatgggaatcgtgaggggcaagacgaaggagttgttcgatcactggattaacatcctaccgggtcagggaagtcggacgattcgcacggatgaggcgcttttcattgggttatctggtttgagacgggtgtgggagagtcggtgatgaaaagaggtctatactggagcgtgtacatcattcaaaggccacgtagatatccccgtgcgcattaaatccatttctattacggttgtggtatatcatttacgggtccctaaatcttacttgctgatatattgttttggaaaaccatgcaccaacatcatcgactttca

SEQ ID NO: 5891 - DNA, 666 bp, Muscodor strobelii
  misc_feature: SGI cDNA ID NO. 561690
  misc_feature: Encodes the peptide sequence at SEQ ID NO 5892
atgagcgcaacagtgaacatcagctcgtcaggcgagtggcagcgcatcctcggctcttccaccatcgtcgtcgcagacttttacgcggactggtgcggcccctgcaaaatgatagcgcccgctttcgagtccctctcaacgaaatactccaaaccgggtaaaatagcattcgtaaaagtaaacgtcgacaaccaccagtccatcgcccaatcccacggcgtctccgccatgcctacgttcctcatcttcaagtctggctcggtcatcgagacgattcgcggtgcgaacccgcctgctcttacaagtgctgttgagaaggctgtcaagctggctgggacggcggcaccgggtgcttctttcggaggctctgggaggactctgggtggtcctggggataagaggagaagtggtggacagacccttgggggacgaccctggagctttagtagctttaatgttattaatgctctgcttactttctttgggctgtattttgcctcgttgttctcgttcgacccttacaaagcagccgagaagtccgatttcaacctcctcaagcccagagcaccacccgcgcccatccgagccggtggcgctgcaggaccgtctggtgcagccgggcgtggtaacggtgttaggactctcgccgatcttggcggaagctag

SEQ ID NO: 5892 - protein, 221 aa, Muscodor strobelii
  misc_feature: SGI Peptide ID NO. 561690
  misc_feature (4)..(107): Pfam Id: PF00085 Pfam Desc: Thioredoxin
  misc_feature (4)..(201): NCBI GI: 149210327 Blast Desc: MGCH7_ch7g641 [Magnaporthe grisea 70-15] gi|86196596|gb|EAQ71234.1| MGCH7_ch7g641 [Magnaporthe grisea 70-15]
  misc_feature (4)..(201): NCBI GI: 145609908 Blast Desc: MGG_12571 [Magnaporthe grisea 70-15] gi|145017296|gb|EDK01659.1| MGG_12571 [Magnaporthe grisea 70-15]
  misc_feature (6)..(219): NCBI GI: 171684081 Blast Desc: protein product [Podospora anserina] gi|170942001|emb|CAP67653.1| protein product [Podospora anserina]
  misc_feature (1)..(186): NCBI GI: 256727089 Blast Desc: NECHADRAFT_103523 [Nectria haematococca mpVI 77-13-4]
  misc_feature (1)..(186): NCBI GI: 46135863 Blast Desc: FG09447.1 [Gibberella zeae PH-1]
  misc_feature (17)..(220): NCBI GI: 164428456 Blast Desc: NCU00598 [Neurospora crassa OR74A] gi|157072153|gb|EAA36502.2| conserved [Neurospora crassa OR74A]
  misc_feature (17)..(220): NCBI GI: 38567309 Blast Desc: related to thioredoxin [Neurospora crassa]
  misc_feature (5)..(184): NCBI GI: 189193151 Blast Desc: thioredoxin [Pyrenophora tritici-repentis Pt-1C-BFP] gi|187978478|gb|EDU45104.1| thioredoxin [Pyrenophora tritici-repentis Pt-1C-BFP]
  misc_feature (5)..(184): NCBI GI: 169605445 Blast Desc: SNOG_05747 [Phaeosphaeria nodorum SN15] gi|111065691|gb|EAT86811.1| SNOG_05747 [Phaeosphaeria nodorum SN15]
  misc_feature (1)..(120): NCBI GI: 261353804 Blast Desc: conserved [Verticillium albo-atrum VaMs.102]
MSATVNISSSGEWQRILGSSTIVVADFYADWCGPCKMIAPAFESLSTKYSKPGKIAFVKVNVDNHQSIAQSHGVSAMPTFLIFKSGSVIETIRGANPPALTSAVEKAVKLAGTAAPGASFGGSGRTLGGPGDKRRSGGQTLGGRPWSFSSFNVINALLTFFGLYFASLFSFDPYKAAEKSDFNLLKPRAPPAPIRAGGAAGPSGAAGRGNGVRTLADLGGS

SEQ ID NO: 5893 - DNA, 3115 bp, Muscodor strobelii
  misc_feature: SGI EST ID NO. CUFF.15107.0
  misc_feature: Variant of the nucleotide sequence at SEQ ID NO 5891
tgaaagtcgatgatgttggtgcatggttttccaaaacaatatatcagcaagtaagatttagggacccgtaaatgatataccacaaccgtaatagaaatggatttaatgcgcacggggatatctacgtggcctttgaatgatgtacacgctccagtatagacctcttttcatcaccgactctcccacacccgtctcaaaccagataacccaatgaaaagcgcctcatccgtgcgaatcgtccgacttccctgacccggtaggatgttaatccagtgatcgaacaactccttcgtcttgcccctcacgattcccatctcattcagcgaagcgtcattctcagctgcgtattcaagacctcttggccctccgaatacaaggagcagatgattgaaggtggcgggctctttcttccgcgccggaaacgcttcttgaatcgtgaggcctcgttctgaggtaccgatactcatatcatagccgccctcgtaagtacattcttcaaatactgcggatagggagctacaccgacggactgcgaagccccaatagtagcccccttcggtgcgaggcgtagcgggatctatgggctcgcctttggaagggtcgttctcgtccattcgtaatgtgatgcgggttttgggcggaacgtcctccgcaattgttacaggagctttgcgtccaacatcaacgagcgtgccggacccggtcctcgttccacccgacgtggtaacaccctcacagtaggggagccaatctgtctgatgggggtgagacggaatatccaaactagccattagaccggcttgcttgagattcggatgaattggtaacagagtgcggcgcatgaaaggcggcatctcaagatactgcagcagatggtcgacatatccacagggatcaacgtcgcccgtgtacatagcaggatcgacgttggttgcccgtgagtctgggggcgagtcatcgaagatgactacttcgtctatgctgaagactgagagagcccgcgcaatgtgggagactatgtttgtgcgctggtcatctcgacggcaactaaagacacggtgagtaaagatctatgagatggtattagttggatgagagcaatcctacgttgagatgacgctgcccggtatagcaactgatacggtccattctcggcctccatgaggctggaagaatgcagtgggcttggatgtatctacatagtcaccgtctctagtgagcctccgtttctgaagcaaatattagcaagatgagatcgtgagcaatgatagcaagtggatgattaccttttgtctgtcctgatcataagacattataactcaatactttgatttgccgatcgtgatgcagttattatcggcattccatcttgactcaattgagtaacactgacgagtggtatggatctgataaaactgtgccggcagaatagcagtgaacaaaacttcaccacctgccataatagaggggagactatgcttgacagtggatgcaggtcccccaacccactgaagcagcgggcgcggcattcactaaggtaagtctaccgggtaggcgaaacagtgggggccatcattctagatcaggacagctttacttcacttccgccatccccgccaatcccgccgccatcaactgctgcctcgaccatttacatcctcttgacattcctcccctttaagcttgtccgacgcagcctcacatcactttctctacttagccctcgactcgaagtatctgcagcaactttacaagtctccaatcaaacccgccaaaatgagcgcaacagtgaacatcagctcgtcaggcgagtggcagcgcatcctcggctcttccaccatcgtcgtcgcagacttttacgcggactggtgcggcccctgcaaaatgatagcgcccgctttcgagtccctctcaacgaaatactccaaaccgggtaaaatagcattcgtaaaagtaaacgtcgacaaccaccagtccatcgcccaatcccacggcgtctccgccatgcctacgttcctcatcttcaagtctggctcggtcatcgagacgattcgcggtgcgaacccgcctgctcttacaagtgctgttgagaaggctgtcaagctggctgggacggcggcaccgggtgcttctttcggaggctctgggaggactctgggtggtcctggggataagaggagaagtggtggacagacccttgggggacgaccctggagctttagtagctttaatgttattaatgctctgcttactttctttgggctgtattttgcctcgttgttctcgttcgacccttacaaagcagccgagaagtccgatttcaacctcctcaagcccagagcaccacccgcgcccatccgagccggtggcgctgcaggaccgtctggtgcagccgggcgtggtaacggtgttaggactctcgccgatcttggcggaagctaggcgacgagatcgcgagggtggatgccagagactgtgacaattaggacgagtgactgatgtttgtatttcacgaggtattgaggatcaaggcaggcaaggcgttatgagaatatgggtttccgagttataggcaatgaatttatatattatatgtctgtgcacttgcaaatgtgaatgtgtgtatttacactgtagatggaattctaacactggtgtcgcatgcgagtgaagcatatctcctccatttagttaaaacacaccgtaagattttgttgcgacgacttattacgaaagctatatgttactttaaaaacgaggaacgtgataataaataagactacagacattacaataagtggaaatcttaagacgtatcgaacacttagctaagccgcaaatttcaagtaaatgtaagaaaccaatgcagaccgcggaaagcagagaaaataaagaaaaagaagaaggaaatgacccaaatcgaacacccaacccggggcaatccaaaaagcgaagttgaccgaagtcgtaaatcacccgaagggcggcattcccgaaggaaagacaagcgtctttgctagtttgcttgagctacttcgctggcatctttcattctattgacatacatatactatgcacgcaagacgtccacacgattggtgattggccagtgcgg

SEQ ID NO: 5894 - DNA, 3315 bp, Muscodor strobelii
  misc_feature: SGI cDNA ID NO. 561691
  misc_feature: Encodes the peptide sequence at SEQ ID NO 5895
atgaatgccatccagcagaaatgccggcctaagcaccaggtcctggtcctcaagtgctatccgcgcacgactaagggagctgtcgacgtgaagcctaattccagcgagctcagctacctgctgttttacgctacctcgcgacgctccaagatccagaaggttggccagttcctcgagaaaaagacggctggcgacgtctggagactcaagatcggaaatgttcaggtcactttgcaaatcctagccgccttaattgaaaaatcgcccaaggatctacctctcttcgcccaaaatgtcctcaggatactggcccagatcctccgctccgagaacatcaccatggtcgaagcctccctgcccaccttcgacactttctgcgagcaccacgacgtctcgtcgctcttcgcagaccaggcatacctgcgccaatacgaggagatagtgcgcgcctatgctgccttcgcttctacgcgtaagactccaggcaaagggacacccagcaagccggttgctctccgctggaggaacgctggtctcgaggcgatcaaaagcgtcacaacctcggatgccttgtccaccgtctcgggacggcagctcaatgtcgtcgtccccatggttctcgaaaatctctggaccgacgacgatgaatacctgcgtgtcttgttgcagcgcatccagatcgaggaaaaggttgattctaacgcgttgctacggcgtaggacgagtgtttcgacggttaaaacaaccgagactggcggcgataccaaccctatcgccatcactggcacatccggcgacatcgataagctggcagaggaagagacgggtgttgaggctatgcaatgtctaaagcagatttttgcgatatccaaccgtgcacagctacatggagcaaccactgctctcatcaagtttacgcaggagaggatgaaacagaaagaaacagtagtaaagttctcgcttgatggacaccacgatagtggctgggcaatcaagatatttgacctcgtcactcgctgggcgccggtgcaagaccgctatgctattatgattactaccacggacgctttattccgggcagcccctactcaggataacattgccgaacagatcgcactcgcagccgtcatcggctctctgttacggtcagacatcaatctgatcggtcttagtgttatagatatactgcttggtttcatacaacacatcaaacggacactgcggtactgcagtacgacatccaatggagagccctcctcgtcgacgcaggacggtcatgaccatatgtctccgcaacaacgagatctcttgaaccgacttcagcaatgcatggggcatcttgcgacgcatgtctattatgctgatcagatttcggatatgatctcatcaatcctgctacggctcaagccacacgaaagcgcggcagagcctgtcgcgcaatccgaaagacatgatccttcgccggcaccgggtgcgtcgacagggaacgtctccgaagatcaacaccatctcgatagctttttctcaatgaatttagcaaaaaccaccgccctcaaggccatcaagtctatcttgatgatcgccaacccaaaaacgaagctcagcggcaacatcagtcttcgaagaaacaaagttcccatccaggtttgggaaggaacacattggttacttcgagatagtgatgggcaagttcgcaaagcatatgcggacgctctcattacttggcttgacagagagaccacgagggctgatctcaaggctagagatgagacaagtcaaaatccatctcgggtcaaggacagagaggtcccggctgcggctgtatcacgccgggccgtctcaaatgcgtcagtgaaggagaagccatccaagttaccgcggtcttatttcttgctgatgctgcatctgtccatctacgaaactgccaatcaatacgtcgaatttgacgctgacatggctctgcttcatgccttgttggcaaagttggttatgaagcttggagtcaatgcagctcgcttcggtcttcctatggtattcaggctgcaagaagacatccaggaaaccgacgccccgctctctaaagtacgccttgggtgtctttgtcacggctatttttgggcattgagcgagcattttgactttgaatcatctgccgttggtcgactcatccagaacgaaattgtgcgaaggcggagcaagcacttctgggttgaaggagtacaggttcctccaccctcgcctgagcatcttgctactcccggcacagccaacactcaacgaaagatgtcaatccacgaaattgagtcagaggcactgttgcccttcgatgatcgcactaccatggttgaatgtatatgtaccaactatcaagaaggggcaaactcgccaccgacgagtccttcagcttcacctggtcgaagtttttcacaaccgttattgagttcgaccttgagcaccatcccacctgccggcgacgaggagctaccaaataagttcagagaggagatgttggtagaatggacgaaggccgccgcgctgatggctgtgcaagaaggtagcaagtcggcatcactcaatggctccaaaaccggcaccactgcaacaagaaagaatcgcctcgcagcgaacggtcacagccctagtaggcctggctcggcgtatgcggcacagactaacctgcacccaactatgaatggcggcgcgcatggcacttatcgcaagtcaagcgtacaaagccgagggtcaggaagaagctcatctgcgcgagggtttgtcgcttctgtcgaccaactgaagtcggcactgaccggagatgccgttcgtccgtccacttttcacactgttcgagaaggcgacagcagtagcgatagtatggtaagttatgatgcgactccttcggaactctcattcaacccacagacagcagaaggcggtgaacacattgaggctagcacaagcaagtcccgccaacgtacaggttccaacgagtctggcggtcctctgacgtctcaccctatgagtagtgaggaagacgaggatgaagtgccacccgttcctcctctaccagcgtcgttcgtcagtcaaacaccagagtctgacataggcgtggatcgcacagatcatgctttgatgccgaagaagtctggcaggacttctaagcgcagtgtcaaaagccgaggtggtgagagtttcagggccaacagcttcgcagaagcggatgaggctagtgttatggacctacaatcactactgaagggaattgacacgaagtcaacccataatacactagggaacctcacaagaccaccgtactaa

SEQ ID NO: 5895 - protein, 1104 aa, Muscodor strobelii
  misc_feature: SGI Peptide ID NO. 561691
  misc_feature (1)..(1104): NCBI GI: 171680117 Blast Desc: protein product [Podospora anserina] gi|170939685|emb|CAP64911.1| protein product [Podospora anserina]
  misc_feature (1)..(1104): NCBI GI: 39970629 Blast Desc: MGG_02781 [Magnaporthe grisea 70-15] gi|149210105|ref|XP_001522427.1| MGCH7_ch7g534 [Magnaporthe grisea 70-15] gi|121794298|sp|Q2KG01.1|EFR3_MAGGR RecName: EFR3
  misc_feature (1)..(978): NCBI GI: 116193333 Blast Desc: CHGG_06384 [Chaetomium globosum CBS 148.51] gi|121785400|sp|Q2H4N1.1|EFR3_CHAGB RecName: Full=Protein EFR3 gi|88182297|gb|EAQ89765.1| CHGG_06384 [Chaetomium globosum CBS
  misc_feature (1)..(974): NCBI GI: 256734160 Blast Desc: NECHADRAFT_10759 [Nectria haematococca mpVI 77-13-4]
  misc_feature (1)..(1104): NCBI GI: 46129268 Blast Desc: FG08819.1 [Gibberella zeae PH-1] gi|121811614|sp|Q4I1T9.1|EFR3_GIBZE RecName: Full=Protein EFR3
  misc_feature (1)..(1104): NCBI GI: 85074895 Blast Desc: NCU00675 [Neurospora crassa OR74A] gi|74619033|sp|Q7SHX8.1|EFR3_NEUCR RecName: Full=Protein efr-3 gi|28927628|gb|EAA36579.1| conserved [Neurospora crassa OR74A]
  misc_feature (1)..(1104): NCBI GI: 154294754 Blast Desc: BC1G_13592 [Botryotinia fuckeliana B05.10] gi|150844550|gb|EDN19743.1| BC1G_13592 [Botryotinia fuckeliana B05.10]
  misc_feature (73)..(1104): NCBI GI: 156055662 Blast Desc: SS1G_05183 [Sclerotinia sclerotiorum 1980] gi|154702967|gb|EDO02706.1| SS1G_05183 [Sclerotinia sclerotiorum 1980]
  misc_feature (1)..(960): NCBI GI: 169605517 Blast Desc: SNOG_05783 [Phaeosphaeria nodorum SN15] gi|160706778|gb|EAT86847.2| SNOG_05783 [Phaeosphaeria nodorum SN15]
  misc_feature (1)..(993): NCBI GI: 261193940 Blast Desc: protein EFR3 [Ajellomyces dermatitidis SLH14081] gi|239588389|gb|EEQ71032.1| protein EFR3 [Ajellomyces dermatitidis SLH14081]
MNAIQQKCRPKHQVLVLKCYPRTTKGAVDVKPNSSELSYLLFYATSRRSKIQKVGQFLEKKTAGDVWRLKIGNVQVTLQILAALIEKSPKDLPLFAQNVLRILAQILRSENITMVEASLPTFDTFCEHHDVSSLFADQAYLRQYEEIVRAYAAFASTRKTPGKGTPSKPVALRWRNAGLEAIKSVTTSDALSTVSGRQLNVVVPMVLENLWTDDDEYLRVLLQRIQIEEKVDSNALLRRRTSVSTVKTTETGGDTNPIAITGTSGDIDKLAEEETGVEAMQCLKQIFAISNRAQLHGATTALIKFTQERMKQKETVVKFSLDGHHDSGWAIKIFDLVTRWAPVQDRYAIMITTTDALFRAAPTQDNIAEQIALAAVIGSLLRSDINLIGLSVIDILLGFIQHIKRTLRYCSTTSNGEPSSSTQDGHDHMSPQQRDLLNRLQQCMGHLATHVYYADQISDMISSILLRLKPHESAAEPVAQSERHDPSPAPGASTGNVSEDQHHLDSFFSMNLAKTTALKAIKSILMIANPKTKLSGNISLRRNKVPIQVWEGTHWLLRDSDGQVRKAYADALITWLDRETTRADLKARDETSQNPSRVKDREVPAAAVSRRAVSNASVKEKPSKLPRSYFLLMLHLSIYETANQYVEFDADMALLHALLAKLVMKLGVNAARFGLPMVFRLQEDIQETDAPLSKVRLGCLCHGYFWALSEHFDFESSAVGRLIQNEIVRRRSKHFWVEGVQVPPPSPEHLATPGTANTQRKMSIHEIESEALLPFDDRTTMVECICTNYQEGANSPPTSPSASPGRSFSQPLLSSTLSTIPPAGDEELPNKFREEMLVEWTKAAALMAVQEGSKSASLNGSKTGTTATRKNRLAANGHSPSRPGSAYAAQTNLHPTMNGGAHGTYRKSSVQSRGSGRSSSARGFVASVDQLKSALTGDAVRPSTFHTVREGDSSSDSMVSYDATPSELSFNPQTAEGGEHIEASTSKSRQRTGSNESGGPLTSHPMSSEEDEDEVPPVPPLPASFVSQTPESDIGVDRTDHALMPKKSGRTSKRSVKSRGGESFRANSFAEADEASVMDLQSLLKGIDTKSTHNTLGNLTRPPY

SEQ ID NO: 5896 - DNA, 4665 bp, Muscodor strobelii
  misc_feature: SGI EST ID NO. CUFF.15280.1
  misc_feature: Variant of the nucleotide sequence at SEQ ID NO 5894
ttgcgatgggcttggtcccttacctcggttgcctcgaggttcgttgccgctctagtagatgttgggagcacacaatagcaaatcttaacaatgaaagacgtgttggccatcttctcttctatttaagtcgggtcttggagggcctgcgtgaataagccttttgctgcgggattcgagaggatatgaagacgactcggagctgtcagtacactaaccccgatccatcgtccaagtctccaccgtggatctcaatccgcctatctgtcgactttagatgcacttacgtgcctgcctagactcgcgcgatcacagtaataatacccgtaattgctgctaatcactcatcaacactgccgtcattgccagtgttgagcagtttaagttgtctgggcgtttcagtttcagatatacacgctgcattcctcggccacgtcgggaatgcaggacttctaaacgtggaaacaggccagattccagcacagcgatcatcatcagctctctctgctggcagccgagccagccttaccaaacaaccaaatctcatctcggggcgtcaaccttcacccgcgacaggccacaccttgctgattgcgcctcgccctggccagcgaggtccactgcagccacccgctcgggtcatttccagtccaaaattgtttttctgcatcttgcgaagcctcaccagcctcatacgaacactgcaacgcgccttgcaagactggattactggaacactcggattcgccctcgaccactcatgaccgctgctctgaaactctatacaaacccaactaagtccgcgaacccgacgcataccgagttcccggctgccgccactactctactgagctagccccccctgaactcaatcatcactgtcatcgtcatcgtcaccctgacgctgggctcgttgcggacttctcgtcgccgtcgcgatgaatgccatccagcagaaatgccggcctaagcaccaggtcctggtcctcaagtgctatccgcgcacgactaagggagctgtcgacgtgaagcctaattccagcgagctcagctacctgctgttttacgctacctcgcgacgctccaagatccagaaggttggccagttcctcgagaaaaagacggctggcgacgtctggagactcaagatcggaaatgttcaggtcactttgcaaatcctagccgccttaattgaaaaatcgcccaaggatctacctctcttcgcccaaaatgtcctcaggatactggcccagatcctccgctccgagaacatcaccatggtcgaagcctccctgcccaccttcgacactttctgcgagcaccacgacgtctcgtcgctcttcgcagaccaggcatacctgcgccaatacgaggagatagtgcgcgcctatgctgccttcgcttctacgcgtaagactccaggcaaagggacacccagcaagccggttgctctccgctggaggaacgctggtctcgaggcgatcaaaagcgtcacaacctcggatgccttgtccaccgtctcgggacggcagctcaatgtcgtcgtccccatggttctcgaaaatctctggaccgacgacgatgaatacctgcgtgtcttgttgcagcgcatccagatcgaggaaaaggttgattctaacgcgttgctacggcgtaggacgagtgtttcgacggttaaaacaaccgagactggcggcgataccaaccctatcgccatcactggcacatccggcgacatcgataagctggcagaggaagagacgggtgttgaggctatgcaatgtctaaagcagatttttgcgatatccaaccgtgcacagctacatggagcaaccactgctctcatcaagtttacgcaggagaggatgaaacagaaagaaacagtagtaaagttctcgcttgatggacaccacgatagtggctgggcaatcaagatatttgacctcgtcactcgctgggcgccggtgcaagaccgctatgctattatgattactaccacggacgctttattccgggcagcccctactcaggataacattgccgaacagatcgcactcgcagccgtcatcggctctctgttacggtcagacatcaatctgatcggtcttagtgttatagatatactgcttggtttcatacaacacatcaaacggacactgcggtactgcagtacgacatccaatggagagccctcctcgtcgacgcaggacggtcatgaccatatgtctccgcaacaacgagatctcttgaaccgacttcagcaatgcatggggcatcttgcgacgcatgtctattatgctgatcagatttcggatatgatctcatcaatcctgctacggctcaagccacacgaaagcgcggcagagcctgtcgcgcaatccgaaagacatgatccttcgccggcaccgggtgcgtcgacagggaacgtctccgaagatcaacaccatctcgatagctttttctcaatgaatttagcaaaaaccaccgccctcaaggccatcaagtctatcttgatgatcgccaacccaaaaacgaagctcagcggcaacatcagtcttcgaagaaacaaagttcccatccaggtttgggaaggaacacattggttacttcgagatagtgatgggcaagttcgcaaagcatatgcggacgctctcattacttggcttgacagagagaccacgagggctgatctcaaggctagagatgagacaagtcaaaatccatctcgggtcaaggacagagaggtcccggctgcggctgtatcacgccgggccgtctcaaatgcgtcagtgaaggagaagccatccaagttaccgcggtcttatttcttgctgatgctgcatctgtccatctacgaaactgccaatcaatacgtcgaatttgacgctgacatggctctgcttcatgccttgttggcaaagttggttatgaagcttggagtcaatgcagctcgcttcggtcttcctatggtattcaggctgcaagaagacatccaggaaaccgacgccccgctctctaaagtacgccttgggtgtctttgtcacggctatttttgggcattgagcgagcattttgactttgaatcatctgccgttggtcgactcatccagaacgaaattgtgcgaaggcggagcaagcacttctgggttgaaggagtacaggttcctccaccctcgcctgagcatcttgctactcccggcacagccaacactcaacgaaagatgtcaatccacgaaattgagtcagaggcactgttgcccttcgatgatcgcactaccatggttgaatgtatatgtaccaactatcaagaaggggcaaactcgccaccgacgagtccttcagcttcacctggtcgaagtttttcacaaccgttattgagttcgaccttgagcaccatcccacctgccggcgacgaggagctaccaaataagttcagagaggagatgttggtagaatggacgaaggccgccgcgctgatggctgtgcaagaaggtagcaagtcggcatcactcaatggctccaaaaccggcaccactgcaacaagaaagaatcgcctcgcagcgaacggtcacagccctagtaggcctggctcggcgtatgcggcacagactaacctgcacccaactatgaatggcggcgcgcatggcacttatcgcaagtcaagcgtacaaagccgagggtcaggaagaagctcatctgcgcgagggtttgtcgcttctgtcgaccaactgaagtcggcactgaccggagatgccgttcgtccgtccacttttcacactgttcgagaaggcgacagcagtagcgatagtatggtaagttatgatgcgactccttcggaactctcattcaacccacagacagcagaaggcggtgaacacattgaggctagcacaagcaagtcccgccaacgtacaggttccaacgagtctggcggtcctctgacgtctcaccctatgagtagtgaggaagacgaggatgaagtgccacccgttcctcctctaccagcgtcgttcgtcagtcaaacaccagagtctgacataggcgtggatcgcacagatcatgctttgatgccgaagaagtctggcaggacttctaagcgcagtgtcaaaagccgaggtggtgagagtttcagggccaacagcttcgcagaagcggatgaggctagtgttatggacctacaatcactactgaagggaattgacacgaagtcaacccataatacactagggaacctcacaagaccaccgtactaagcggacggtgaaaacaagtatgcgaagtcattttagcgagtttttggcgtatctgtggaggtaatagacgggcgagtgcactgtatttggagtgacaggcgcttcgagattggaagccccaaaatttaatatattagctggtgttgtgtgggatcatgtcgcgtttaagccatcaagatacccccaaggctgctgcacggcctttattgatatatcgttagaggatagtataatcatagtaaaagcatcattgtcttgtcgagacctcctctggcgctgtgctattgacttgttgcgaagtgacttccaatgtccgggagcttcatagtctaatagatcatatctcattgagtagagtagtccgtaacacatcaaattgcagtaaatctggtcttaaatctcgtccccagtacgt

SEQ ID NO: 5897 - DNA, 1476 bp, Muscodor strobelii
  misc_feature: SGI cDNA ID NO. 561692
  misc_feature: Encodes the peptide sequence at SEQ ID NO 5898
ggcggcctcgacgtctcccctaacgggctggagatccgctacgcccccgccacccgcaccgtccgcgagcaggaccacgaggtctgcggcatccgcgccgaccaccccatgccctcccaggccggcatctactacttcgagattaccattctgactaagaggaaagatgaaaccagtgtgtgcatcggctttgcgagcaagagcgtcgccttggccaggccgccgggctgggaacccgagtcttggggcttgcacggcgacgacggcgatctctacgccggcggcaacaacggcaagaagtacggcgactcttctacttttggcagcggagatgttgttggctgcggtgtcaacttcaggacgggccaggccttcttcaccaagaacgggacccgcgccggcaaaggccctgcgttccgtgatatcaagggcaagctgtacccggtcataggtctcaagaagacgggcgagcatatccgcgtcaactttggccagagcccctttgtcttcgacatcaacaaactcatgaaggacgaacaggatcggataaaggaaactatttccaagcaaggcatgtacacaatgtatcaccaatggtgtgtaaagctaattctagttagtattgacaaacttgtatcgcctcctatcagcgagacagaactcatccagaaactggtgctacaattcctccaacatgatggctatgtcgaaacagctcgagaattcgccaaagagctcttcgaggaacaccatgctttgagaattgagtcgacggcacaagtgtccggtttcagcgtcaatgtgaacgatgatgacgatgctaacaggagacaacgtatccgcaaagctgtactggagggagacatcgatagggcacttaagctgaccaacacattctaccctcacgtactggagcaaaaccagcaggtgtacttcaaattgaagtgccgcaagttcatcgagatgatcaccaaggcgcaagaggtgaacaccgcaggaaagactaatgggcattcctacgaggatgcacaccagaagatggacgtggacgagagcgcctctgacgacgacagccacgaggaagaggaagaggaagatgatgtgagaggaaacacgaacgagctgctcgaggaagcggtccggtttggccaggctttgcaggccgagttcaaggacgatcccaggagagaggtcaccaaagcactgaatgacatgtttggtttaatggcgtataggaatcccctgggtgtcaaggagattgcgccgcttctcgaccgcaagggccggacaaacgtggccgaagagttgaactcggctattttgtcatcgttaggaaagtcttctcgctcggcactggagaacttgtgcggacagacgagcgtgctgttggattacctgagggaagaaggaggagcagggagtttgatcaacattcagtccgtcattgatgacatccccaagcctcagacattgtaa

SEQ ID NO: 5898 - protein, 491 aa, Muscodor strobelii
  misc_feature: SGI Peptide ID NO. 561692
  misc_feature (41)..(167): Pfam Id: PF00622 Pfam Desc: SPRY domain
  misc_feature (220)..(245): Pfam Id: PF08513 Pfam Desc: LisH
  misc_feature (1)..(491): NCBI GI: 256732185 Blast Desc: NECHADRAFT_69522 [Nectria haematococca mpVI 77-13-4]
  misc_feature (1)..(486): NCBI GI: 39974201 Blast Desc: MGG_00753 [Magnaporthe grisea 70-15] gi|145018315|gb|EDK02594.1| MGG_00753 [Magnaporthe grisea 70-15]
  misc_feature (2)..(488): NCBI GI: 46137179 Blast Desc: FG10105.1 [Gibberella zeae PH-1]
  misc_feature (3)..(491): NCBI GI: 171691829 Blast Desc: protein product [Podospora anserina] gi|170945863|emb|CAP72664.1| protein product [Podospora anserina]
  misc_feature (3)..(489): NCBI GI: 85099698 Blast Desc: NCU01409 [Neurospora crassa OR74A] gi|28922359|gb|EAA31596.1| conserved [Neurospora crassa OR74A] gi|38566828|emb|CAE76135.1| related to B cell antigen receptor Ig
  misc_feature (1)..(489): NCBI GI: 156044234 Blast Desc: SS1G_10220 [Sclerotinia sclerotiorum 1980] gi|154694609|gb|EDN94347.1| SS1G_10220 [Sclerotinia sclerotiorum 1980]
  misc_feature (2)..(480): NCBI GI: 258576869 Blast Desc: [Uncinocarpus reesii 1704] gi|237902882|gb|EEP77283.1| [Uncinocarpus reesii 1704]
  misc_feature (2)..(480): NCBI GI: 240107575 Blast Desc: SPRY domain containing protein [Coccidioides posadasii C735 delta SOWgp]
  misc_feature (2)..(477): NCBI GI: 145245767 Blast Desc: An12g00550 [Aspergillus niger] gi|134079851|emb|CAK40984.1| protein product [Aspergillus niger]
  misc_feature (2)..(480): NCBI GI: 119489193 Blast Desc: Ran-binding protein (RanBPM), [Neosartorya fischeri NRRL 181] gi|119411006|gb|EAW20951.1| Ran-binding protein (RanBPM), [Neosartorya fischeri NRRL 181]
GGLDVSPNGLEIRYAPATRTVREQDHEVCGIRADHPMPSQAGIYYFEITILTKRKDETSVCIGFASKSVALARPPGWEPESWGLHGDDGDLYAGGNNGKKYGDSSTFGSGDVVGCGVNFRTGQAFFTKNGTRAGKGPAFRDIKGKLYPVIGLKKTGEHIRVNFGQSPFVFDINKLMKDEQDRIKETISKQGMYTMYHQWCVKLILVSIDKLVSPPISETELIQKLVLQFLQHDGYVETAREFAKELFEEHHALRIESTAQVSGFSVNVNDDDDANRRQRIRKAVLEGDIDRALKLTNTFYPHVLEQNQQVYFKLKCRKFIEMITKAQEVNTAGKTNGHSYEDAHQKMDVDESASDDDSHEEEEEEDDVRGNTNELLEEAVRFGQALQAEFKDDPRREVTKALNDMFGLMAYRNPLGVKEIAPLLDRKGRTNVAEELNSAILSSLGKSSRSALENLCGQTSVLLDYLREEGGAGSLINIQSVIDDIPKPQTL

SEQ ID NO: 5899 - DNA, 1805 bp, Muscodor strobelii
  misc_feature: SGI EST ID NO. CUFF.15012.3
  misc_feature: Variant of the nucleotide sequence at SEQ ID NO 5897
cggcggcctcgacgtctcccctaacgggctggagatccgctacgcccccgccacccgcaccgtccgcgagcaggaccacgaggtctgcggcatccgcgccgaccaccccatgccctcccaggccggcatctactacttcgagattaccattctgactaagaggaaagatgaaaccagtgtgtgcatcggctttgcgagcaagagcgtcgccttggccaggccgccgggctgggaacccgagtcttggggcttgcacggcgacgacggcgatctctacgccggcggcaacaacggcaagaagtacggcgactcttctacttttggcagcggagatgttgttggctgcggtgtcaacttcaggacgggccaggccttcttcaccaagaacgggacccgcgccggcaaaggccctgcgttccgtgatatcaagggcaagctgtacccggtcataggtctcaagaagacgggcgagcatatccgcgtcaactttggccagagcccctttgtcttcgacatcaacaaactcatgaaggacgaacaggatcggataaaggaaactatttccaagcaaggcatgtacacaatgtatcaccaatggtgtgtaaagctaattctagttagtattgacaaacttgtatcgcctcctatcagcgagacagaactcatccagaaactggtgctacaattcctccaacatgatggctatgtcgaaacagctcgagaattcgccaaagagctcttcgaggaacaccatgctttgagaattgagtcgacggcacaagtgtccggtttcagcgtcaatgtgaacgatgatgacgatgctaacaggagacaacgtatccgcaaagctgtactggagggagacatcgatagggcacttaagctgaccaacacattctaccctcacgtactggagcaaaaccagcaggtgtacttcaaattgaagtgccgcaagttcatcgagatgatcaccaaggcgcaagaggtgaacaccgcaggaaagactaatgggcattcctacgaggatgcacaccagaagatggacgtggacgagagcgcctctgacgacgacagccacgaggaagaggaagaggaagatgatgtgagaggaaacacgaacgagctgctcgaggaagcggtccggtttggccaggctttgcaggccgagttcaaggacgatcccaggagagaggtcaccaaagcactgaatgacatgtttggtttaatggcgtataggaatcccctgggtgtcaaggagattgcgccgcttctcgaccgcaagggccggacaaacgtggccgaagagttgaactcggctattttgtcatcgttaggaaagtcttctcgctcggcactggagaacttgtgcggacagacgagcgtgctgttggattacctgagggaagaaggaggagcagggagtttgatcaacattcagtccgtcattgatgacatccccaagcctcagacattgtaaccggggaggctgatgatgcttcgattatgtacacgttcagattgtgacgcctctgtcgcgcctgagagcggcgaagaggctggttgtggtggaccggacgagcgagctgattgaacagttcacatgtgtatatgttttctatgctgttgcaactctgggagtttaggtggcaagattggagttgtgggagttggcaactgactgtgcgatcgattcactggctcattacatgcctgctcatttgcctgaaactgatgtcgtagagacatcaccattctgcttactttttaagtaaactgataagaataacattattcctaatcttgcg

SEQ ID NO: 5900 - DNA, 801 bp, Muscodor strobelii
  misc_feature: SGI cDNA ID NO. 561693
  misc_feature: Encodes the peptide sequence at SEQ ID NO 5901
atggaagtcaacagcttgttcaacgttaaggggaaagtcgtcctcgttactggaggcgcgcgaggcatagggcgcatgatctcagagggctttgtagccaacggcgcgaaagtatacatcgcctcgcgagacgcgaaggcatgcgataccactgcgtctgagctaacagcgatgggtcccggatcctgcacggcgatcccagcagatcttctcaagctctcagagtgcgagcgtctcgtcgcagagctgaagaagagagagaagaatctgcatgtgctagtgaataacagcggtgcggcttggggcgcaccgctggaggaattccctgatgagcagtggtcgcggatcttgacgttgaatctgcagagggctttcacgcttacgcagatgcttttgccgatgcttgagagtgctggcgctggtgctggggaggaggcaggccccgcgagtgtgattaatattgggagtatcaatgcgctcagtgttcctaccgctgagaactacagctacagcgcttctaaagccggattacaccatctcaccaggcatctctcgcaagtccttggtcctaagggtatcacggttaacaccctggcttgcggaccgttcgacaccaagatgatggctttcaacatgaagcacttccgcgatataattaccgagtcgaatcctatgaagaggactgggcgcgcgggcgatgttgccggtgcagctattttcttggctagtcgtgccggatcatacgtcaacggtgccacgataaacatagacggtggtgttcacttgtcggccaagatgtag

SEQ ID NO: 5901 - protein, 266 aa, Muscodor strobelii
  misc_feature: SGI Peptide ID NO. 561693
  misc_feature (12)..(189): Pfam Id: PF00106 Pfam Desc: short chain dehydrogenase
  misc_feature (14)..(257): Pfam Id: PF01370 Pfam Desc: NAD dependent epimerase/dehydratase family
  misc_feature (13)..(160): Pfam Id: PF08659 Pfam Desc: KR domain
  misc_feature (1)..(266): NCBI GI: 119499872 Blast Desc: short chain dehydrogenase/reductase family [Neosartorya fischeri NRRL 181] gi|119414858|gb|EAW24796.1| short chain dehydrogenase/reductase family [Neosartorya fischeri NRRL
  misc_feature (1)..(266): NCBI GI: 156059668 Blast Desc: SS1G_03846 [Sclerotinia sclerotiorum 1980] gi|154701633|gb|EDO01372.1| SS1G_03846 [Sclerotinia sclerotiorum 1980]
  misc_feature (1)..(266): NCBI GI: 70993258 Blast Desc: short chain dehydrogenase/reductase family [Aspergillus fumigatus Af293] gi|66849110|gb|EAL89438.1| short chain dehydrogenase/reductase family [Aspergillus fumigatus short
  misc_feature (1)..(266): NCBI GI: 121708657 Blast Desc: short chain dehydrogenase/reductase family [Aspergillus clavatus NRRL 1] gi|119400352|gb|EAW10778.1| short chain dehydrogenase/reductase family [Aspergillus clavatus NRRL
  misc_feature (1)..(266): NCBI GI: 261197309 Blast Desc: short chain dehydrogenase/reductase [Ajellomyces dermatitidis SLH14081] gi|239595687|gb|EEQ78268.1| short chain dehydrogenase/reductase [Ajellomyces dermatitidis SLH14081] short
  misc_feature (1)..(266): NCBI GI: 145230085 Blast Desc: An01g09310 [Aspergillus niger] gi|134055466|emb|CAK43981.1| protein product [Aspergillus niger]
  misc_feature (1)..(266): NCBI GI: 67538934 Blast Desc: AN5637.2 [Aspergillus nidulans FGSC A4] gi|40743540|gb|EAA62730.1| AN5637.2 [Aspergillus nidulans FGSC A4] gi|259484894|tpe|CBF81504.1| TPA: short chain family nidulans
  misc_feature (1)..(266): NCBI GI: 85098543 Blast Desc: NCU01399 [Neurospora crassa OR74A] gi|28922137|gb|EAA31392.1| NCU01399 [Neurospora crassa OR74A]
  misc_feature (1)..(266): NCBI GI: 255947284 Blast Desc: Pc22g03680 [Penicillium chrysogenum Wisconsin 54-1255] gi|211591426|emb|CAP97656.1| Pc22g03680 [Penicillium chrysogenum Wisconsin 54-1255]
  misc_feature (1)..(266): NCBI GI: 115389816 Blast Desc: conserved [Aspergillus terreus NIH2624] gi|114194809|gb|EAU36509.1| conserved [Aspergillus terreus NIH2624]
  misc_feature (3)..(262): SWISSPROT Homolog: EC 1.1.1.100 3-oxoacyl-[acyl-carrier-protein] reductase
MEVNSLFNVKGKVVLVTGGARGIGRMISEGFVANGAKVYIASRDAKACDTTASELTAMGPGSCTAIPADLLKLSECERLVAELKKREKNLHVLVNNSGAAWGAPLEEFPDEQWSRILTLNLQRAFTLTQMLLPMLESAGAGAGEEAGPASVINIGSINALSVPTAENYSYSASKAGLHHLTRHLSQVLGPKGITVNTLACGPFDTKMMAFNMKHFRDIITESNPMKRTGRAGDVAGAAIFLASRAGSYVNGATINIDGGVHLSAKM

SEQ ID NO: 5902 - DNA, 3981 bp, Muscodor strobelii
  misc_feature: SGI EST ID NO. CUFF.15018.0
  misc_feature: Variant of the nucleotide sequence at SEQ ID NO 5900
tgtagccatgaggatatagtgccttcccagaacgagtcaagcgtggtaccacagacctcggctggcgggtatggggaggaagcacttggtcaacccagactgcattccgaaacaactttcatcgatttttaatagtaggtgtattcccgaaattgacatctcaagtatttggaacataatttgtttgtgtattggaagcaaaatggaagtcaacagcttgttcaacgttaaggggaaagtcgtcctcgttactggaggcgcgcgaggcatagggcgcatgatctcagagggctttgtagccaacggcgcgaaagtatacatcgcctcgcgagacgcgaaggcatgcgataccactgcgtctgagctaacagcgatgggtcccggatcctgcacggcgatcccagcagatcttctcaagctctcagagtgcgagcgtctcgtcgcagagctgaagaagagagagaagaatctgcatgtgctagtgaataacagcggtgcggcttggggcgcaccgctggaggaattccctgatgagcagtggtcgcggatcttgacgttgaatctgcagagggctttcacgcttacgcagatgcttttgccgatgcttgagagtgctggcgctggtgctggggaggaggcaggccccgcgagtgtgattaatattgggagtatcaatgcgctcagtgttcctaccgctgagaactacagctacagcgcttctaaagccggattacaccatctcaccaggcatctctcgcaagtccttggtcctaagggtatcacggttaacaccctggcttgcggaccgttcgacaccaagatgatggctttcaacatgaagcacttccgcgatataattaccgagtcgaatcctatgaagaggactgggcgcgcgggcgatgttgccggtgcagctattttcttggctagtcgtgccggatcatacgtcaacggtgccacgataaacatagacggtggtgttcacttgtcggccaagatgtagaagctagtgtaggaaaataccttgcaagtggcatatccaggcaaagcgatagagaaaaccaaaactatgaaagtttagagaatgggttgattgatctatcgggtatctaacgcggaggttttaataaagatggctgggccaccaccaccatattgcccgcccgcgccttgttcctagaatttttatacattatagctcatattttcttacacttgtttatacaatatcatgcagagaagctctgagaccacgagggttccagcgttattaagtccagtagtcatgtcgctgccctcgattgatatatggattccagaccgaaccagaagctgaactgatcgcaaggaggaattacgaggttgacctatgaggagccccagcaacgatcatataaccgattgcgatgtgaaacaagacgagggaactcgcgcaacatatcaccaagtcggtcgtttttccaggcgagtttttcgtccaagatgaggtacgtgtaggagaaaactgcagcgtcaaatagacctgggtctttggcgccgaagaaccacgtgccatcgcctagcaacgtgtcaagggcgccgaaagcctcttgtgcatctgcgtacaagatggcagggtcgatgcattgtctgctcgtcgactttaagatctccgactcggcggcctgcctaaggtggtaccggacgttgaagcggatgagcgtggacgagctgactggcgcaacgtagagcctgtcaagaatgctggcgttggtgggagagagatacagtgtgtagagccagacatttctgatgcgatggtcgagcaaggactcgtacgcgtctatcctgaaggcgtcactcggcggtgggtcagcgaggctgccgtgttctctcgcatactgctcgagcttggtggagggaacggggaggttggtggcggcagacggtggcaggaggaagggaagtgcgccggtgggagaggcgtggttgttggaggagacgaggcggaagtcgacgccggacagcttgagcagggtctgccacttcaggcacgcggggttgtagcttgggcggccctcgagggcatcgtcgccggatatgaagacccagagactgggtgtctcgcggtggctgacggcgctgcagcgggcgggcagcgcgttgggcgggtagacctggagaggcacctttctgaacagccactccagcggcgccggtatcgtgagccagcccgtggtcatgctgggcactcgttcgatgcggtcggggttgagcgatccacgctgggccttgcatgtggctaggaaggctgttgcgtcgcagcaccgggtcgcgggccacgcagcatcacgtcacctcatgtttcaacagttcgggtcacggcccgtatcgataagccggacaacctctgccgacatcttgatcactcagttaatctttcagcattcgcttgaatcgcttcaggtagtcacgagctgatcgtacatgtagcaagcaataacaatcacgatgcattggccatttgacagccgagtgctcgccgttggtcagactgcattcgactgcgtccgaacttgccgtgtctcgagtccctgctgcaattggagttgaaccctccctcgcccttcttctccggtcttctgcccggtacgatcggggaatcagatcggtcagcctagcatgccacctactgtacatagtccgtacacacgtagtccaccacagcgagtgctcatattcccgccataagcttacttatgcagtatctccagtcgtgctggtaacagttcatgcatgagcatcacgtcattggcaaactaagtacctctgttgctcttgtcacacattggatatacctacatgcatagcaactaaggcagagagagacccctcagcccaggtctgttggacggcgcagctattgtcctacatactcgcctaccgacagctgaagatacgtgaacgctgttccctgtccaagttaagcctttcaagcctcgtatgtttcaacttgcgagctgggtttcccacgaggcccgtcacccggggtttggccctgttgatgcacctccgcgtcctcccgttcctttaggattcggccttgtcgggatacatgcgagcaggtaataatatcacgttccaatatgcaagatctcaccccttctctccggactcggatcgctccctcccggcccccaagcatatcagctcctttctgaccctttgtacgatgtcgcagtacccaaggtacatcgtcgatatggaatgtaaatttcaattttctactgcatttgggaacttgttggcactaaatacctagcgctttgtctcggctactaggagatcgtcaatgatgtgtcctgggaaaaacccaatgtccaggtattcggaactgggccgcgtagcgtcctactatgaaaggctaacaagatgagataatttgaccaccgaccacatgaacggactccaacccgacccctagcccagccgctaatggcacattctgggtccgcaaccgctggtctcgtccttccaatgcatgccgagtcgcttaagatgaattgatctgctgctgcggtaggaccctgctccaagttgttctccgcgccatgcaactttcgccgtggaagtcgccggcaatatcgcatcggttgtagttcgtgaacaaattgtatgcgaacccatgcagcatgcagcccgcagacaggctgtgatatgaacaacagaaacaataggcggtctttccagtcatacataccgactgtcaccgcaatcccttcctgtattactaattacaatttggtgcaaagcttggttgatcgccaatcttacagtcgagcatcgcgccaacgacagtgagttacgcaatgcctcgttcttctgccgagagaaggtagaatattgcggattgatcgagcgagctattgatcggactcgtgcttagctccaagtgttattgccaggtagcgactagcaagtcacaggatcataactcgcgag

SEQ ID NO: 5903 - DNA, 813 bp, Muscodor strobelii
  misc_feature: SGI cDNA ID NO. 561694
  misc_feature: Encodes the peptide sequence at SEQ ID NO 5904
atggaagtcaacagcttgttcaacgttaaggggaaagtcgtcctcgttactggaggcgcgcgaggcatagggcgcatgatctcagagggctttgtagccaacggcgcgaaagtatacatcgcctcgcgagacgcgaaggcatgcgataccactgcgtctgagctaacagcgatgggtcccggatcctgcacggcgatcccagcagatcttctcaagctctcagagtgcgagcgtctcgtcgcagagctgaagaagagagagaagaatctgcatgtgctagtgaataacagcggtgcggcttggggcgcaccgctggaggaattccctgatgagcagtggtcgcggatcttgacgttgaatctgcagagggctttcacgcttacgcagatgcttttgccgatgcttgagagtgctggcgctggtgctggggaggaggcaggccccgcgagtgtgattaatattgggagtatcaatgcgctcagtgttcctaccgctgagaactacagctacagcgcttctaaagccggattacaccatctcaccaggcatctctcgcaagtccttggtcctaagggtatcacggttaacaccctggcttgcggaccgttcgacaccaagatgatggctttcaacatgaagcacttccgcgatataattaccgagtcgaatcctatgaagaggactgggcgcgcgggcgatgttgccggtgcagctattttcttggctagtcgtgccggatcatacgtcaacggtgccacgataaacatagacggtaagtaccctttagacatcatcttctttccctccgagtaa

SEQ ID NO: 5904 - protein, 270 aa, Muscodor strobelii
  misc_feature: SGI Peptide ID NO. 561694
  misc_feature (12)..(189): Pfam Id: PF00106 Pfam Desc: short chain dehydrogenase
  misc_feature (14)..(257): Pfam Id: PF01370 Pfam Desc: NAD dependent epimerase/dehydratase family
  misc_feature (13)..(160): Pfam Id: PF08659 Pfam Desc: KR domain
  misc_feature (1)..(258): NCBI GI: 119499872 Blast Desc: short chain dehydrogenase/reductase family [Neosartorya fischeri NRRL 181] gi|119414858|gb|EAW24796.1| short chain dehydrogenase/reductase family [Neosartorya fischeri NRRL
  misc_feature (1)..(258): NCBI GI: 156059668 Blast Desc: SS1G_03846 [Sclerotinia sclerotiorum 1980] gi|154701633|gb|EDO01372.1| SS1G_03846 [Sclerotinia sclerotiorum 1980]
  misc_feature (1)..(258): NCBI GI: 70993258 Blast Desc: short chain dehydrogenase/reductase family [Aspergillus fumigatus Af293] gi|66849110|gb|EAL89438.1| short chain dehydrogenase/reductase family [Aspergillus fumigatus short
  misc_feature (1)..(258): NCBI GI: 121708657 Blast Desc: short chain dehydrogenase/reductase family [Aspergillus clavatus NRRL 1] gi|119400352|gb|EAW10778.1| short chain dehydrogenase/reductase family [Aspergillus clavatus NRRL
  misc_feature (1)..(258): NCBI GI: 261197309 Blast Desc: short chain dehydrogenase/reductase [Ajellomyces dermatitidis SLH14081] gi|239595687|gb|EEQ78268.1| short chain dehydrogenase/reductase [Ajellomyces dermatitidis SLH14081] short
  misc_feature (1)..(258): NCBI GI: 67538934 Blast Desc: AN5637.2 [Aspergillus nidulans FGSC A4] gi|40743540|gb|EAA62730.1| AN5637.2 [Aspergillus nidulans FGSC A4] gi|259484894|tpe|CBF81504.1| TPA: short chain family nidulans
  misc_feature (1)..(258): NCBI GI: 145230085 Blast Desc: An01g09310 [Aspergillus niger] gi|134055466|emb|CAK43981.1| protein product [Aspergillus niger]
  misc_feature (1)..(262): NCBI GI: 85098543 Blast Desc: NCU01399 [Neurospora crassa OR74A] gi|28922137|gb|EAA31392.1| NCU01399 [Neurospora crassa OR74A]
  misc_feature (1)..(258): NCBI GI: 255947284 Blast Desc: Pc22g03680 [Penicillium chrysogenum Wisconsin 54-1255] gi|211591426|emb|CAP97656.1| Pc22g03680 [Penicillium chrysogenum Wisconsin 54-1255]
  misc_feature (1)..(258): NCBI GI: 169764477 Blast Desc: [Aspergillus oryzae RIB40] gi|83764564|dbj|BAE54708.1| protein product [Aspergillus oryzae]
  misc_feature (7)..(262): SWISSPROT Homolog: EC 1.1.1.100 3-oxoacyl-[acyl-carrier-protein] reductase
MEVNSLFNVKGKVVLVTGGARGIGRMISEGFVANGAKVYIASRDAKACDTTASELTAMGPGSCTAIPADLLKLSECERLVAELKKREKNLHVLVNNSGAAWGAPLEEFPDEQWSRILTLNLQRAFTLTQMLLPMLESAGAGAGEEAGPASVINIGSINALSVPTAENYSYSASKAGLHHLTRHLSQVLGPKGITVNTLACGPFDTKMMAFNMKHFRDIITESNPMKRTGRAGDVAGAAIFLASRAGSYVNGATINIDGKYPLDIIFFPSE

SEQ ID NO: 5905 - DNA, 3981 bp, Muscodor strobelii; identical to SEQ ID NO: 5902
  misc_feature: SGI EST ID NO. CUFF.15018.0
  misc_feature: Variant of the nucleotide sequence at SEQ ID NO 5903

SEQ ID NO: 5906 - DNA, 882 bp, Muscodor strobelii
  misc_feature: SGI cDNA ID NO. 561695
  misc_feature: Reduced expression when VOC is produced
  misc_feature: Encodes the peptide sequence at SEQ ID NO 5907
atggaagtcaacagcttgttcaacgttaaggggaaagtcgtcctcgttactggaggcgcgcgaggcatagggcgcatgatctcagagggctttgtagccaacggcgcgaaagtatacatcgcctcgcgagacgcgaaggcatgcgataccactgcgtctgagctaacagcgatggggtcagcctctctctccatatttcctcctcctctctttgccagaattcttactaacccccgcctgcccagtcccggatcctgcacggcgatcccagcagatcttctcaagctctcagagtgcgagcgtctcgtcgcagagctgaagaagagagagaagaatctgcatgtgctagtgaataacagcggtgcggcttggggcgcaccgctggaggaattccctgatgagcagtggtcgcggatcttgacgttgaatctgcagagggctttcacgcttacgcagatgcttttgccgatgcttgagagtgctggcgctggtgctggggaggaggcaggccccgcgagtgtgattaatattgggagtatcaatgcgctcagtgttcctaccgctgagaactacagctacagcgcttctaaagccggattacaccatctcaccaggcatctctcgcaagtccttggtcctaagggtatcacggttaacaccctggcttgcggaccgttcgacaccaagatgatggctttcaacatgaagcacttccgcgatataattaccgagtcgaatcctatgaagaggactgggcgcgcgggcgatgttgccggtgcagctattttcttggctagtcgtgccggatcatacgtcaacggtgccacgataaacatagacggtaagtaccctttagacatcatcttctttccctccgagtaa

SEQ ID NO: 5907 - protein, 293 aa, Muscodor strobelii
  misc_feature: SGI Peptide ID NO. 561695
  misc_feature (12)..(212): Pfam Id: PF00106 Pfam Desc: short chain dehydrogenase
  misc_feature (12)..(62): Pfam Id: PF00106 Pfam Desc: short chain dehydrogenase
  misc_feature (87)..(212): Pfam Id: PF00106 Pfam Desc: short chain dehydrogenase
  misc_feature (1)..(281): NCBI GI: 119499872 Blast Desc: short chain dehydrogenase/reductase family [Neosartorya fischeri NRRL 181] gi|119414858|gb|EAW24796.1| short chain dehydrogenase/reductase family [Neosartorya fischeri NRRL
  misc_feature (1)..(281): NCBI GI: 156059668 Blast Desc: SS1G_03846 [Sclerotinia sclerotiorum 1980] gi|154701633|gb|EDO01372.1| SS1G_03846 [Sclerotinia sclerotiorum 1980]
  misc_feature (1)..(281): NCBI GI: 70993258 Blast Desc: short chain dehydrogenase/reductase family [Aspergillus fumigatus Af293] gi|66849110|gb|EAL89438.1| short chain dehydrogenase/reductase family [Aspergillus fumigatus short
  misc_feature (1)..(285): NCBI GI: 85098543 Blast Desc: NCU01399 [Neurospora crassa OR74A] gi|28922137|gb|EAA31392.1| NCU01399 [Neurospora crassa OR74A]
  misc_feature (1)..(281): NCBI GI: 121708657 Blast Desc: short chain dehydrogenase/reductase family [Aspergillus clavatus NRRL 1] gi|119400352|gb|EAW10778.1| short chain dehydrogenase/reductase family [Aspergillus clavatus NRRL
  misc_feature (1)..(281): NCBI GI: 261197309 Blast Desc: short chain dehydrogenase/reductase [Ajellomyces dermatitidis SLH14081] gi|239595687|gb|EEQ78268.1| short chain dehydrogenase/reductase [Ajellomyces dermatitidis SLH14081] short
  misc_feature (1)..(281): NCBI GI: 145230085 Blast Desc: An01g09310 [Aspergillus niger] gi|134055466|emb|CAK43981.1| protein product [Aspergillus niger]
  misc_feature (1)..(281): NCBI GI: 67538934 Blast Desc: AN5637.2 [Aspergillus nidulans FGSC A4] gi|40743540|gb|EAA62730.1| AN5637.2 [Aspergillus nidulans FGSC A4] gi|259484894|tpe|CBF81504.1| TPA: short chain family nidulans
  misc_feature (1)..(281): NCBI GI: 255947284 Blast Desc: Pc22g03680 [Penicillium chrysogenum Wisconsin 54-1255] gi|211591426|emb|CAP97656.1| Pc22g03680 [Penicillium chrysogenum Wisconsin 54-1255]
  misc_feature (1)..(281): NCBI GI: 169764477 Blast Desc: [Aspergillus oryzae RIB40] gi|83764564|dbj|BAE54708.1| protein product [Aspergillus oryzae]
  misc_feature (7)..(285): SWISSPROT Homolog: EC 1.1.1.100 3-oxoacyl-[acyl-carrier-protein] reductase
  misc_feature: Useful for introducing or modulating the production of volatile compounds
MEVNSLFNVKGKVVLVTGGARGIGRMISEGFVANGAKVYIASRDAKACDTTASELTAMGSASLSIFPPPLFARILTNPRLPSPGSCTAIPADLLKLSECERLVAELKKREKNLHVLVNNSGAAWGAPLEEFPDEQWSRILTLNLQRAFTLTQMLLPMLESAGAGAGEEAGPASVINIGSINALSVPTAENYSYSASKAGLHHLTRHLSQVLGPKGITVNTLACGPFDTKMMAFNMKHFRDIITESNPMKRTGRAGDVAGAAIFLASRAGSYVNGATINIDGKYPLDIIFFPSE

SEQ ID NO: 5908 - DNA, 3981 bp, Muscodor strobelii; identical to SEQ ID NO: 5902
  misc_feature: SGI EST ID NO. CUFF.15018.0
  misc_feature: Variant of the nucleotide sequence at SEQ ID NO 5906

SEQ ID NO: 5909 - DNA, 972 bp, Muscodor strobelii
  misc_feature: SGI cDNA ID NO. 561696
  misc_feature: Reduced expression when VOC is produced
  misc_feature: Encodes the peptide sequence at SEQ ID NO 5910
atgtcggcagaggttgtccggcttatcgatacgggccgtgacccgaactccttcctagccacatgcaaggcccagcgtggatcgctcaaccccgaccgcatcgaacgagtgcccagcatgaccacgggctggctcacgataccggcgccgctggagtggctgttcagaaaggtgcctctccaggtctacccgcccaacgcgctgcccgcccgctgcagcgccgtcagccaccgcgagacacccagtctctgggtcttcatatccggcgacgatgccctcgagggccgcccaagctacaaccccgcgtgcctgaagtggcagaccctgctcaagctgtccggcgtcgacttccgcctcgtctcctccaacaaccacgcctctcccaccggcgcacttcccttcctcctgccaccgtctgccgccaccaacctccccgttccctccaccaagctcgagcagtatgcgagagaacacggcagcctcgctgacccaccgccgagtgacgccttcaggatagacgcgtacgagtccttgctcgaccatcgcatcagaaatgtctggctctacacactgtatctctctcccaccaacgccagcattcttgacaggctctacgttgcgccagtcagctcgtccacgctcatccgcttcaacgtccggtaccaccttaggcaggccgccgagtcggagatcttaaagtcgacgagcagacaatgcatcgaccctgccatcttgtacgcagatgcacaagaggctttcggcgcccttgacacgttgctaggcgatggcacgtggttcttcggcgccaaagacccaggtctatttgacgctgcagttttctcctacacgtacctcatcttggacgaaaaactcgcctggaaaaacgaccgacttggtgatatgttgcgcgagttccctcgtcttgtttcacatcgcaatcggttatatgatcgttgctggggctcctcatag

SEQ ID NO: 5910 - protein, 323 aa, Muscodor strobelii
  misc_feature: SGI Peptide ID NO. 561696
  misc_feature (39)..(321): NCBI GI: 46137181 Blast Desc: FG10106.1 [Gibberella zeae PH-1]
  misc_feature (33)..(317): NCBI GI: 226280626 Blast Desc: conserved [Paracoccidioides brasiliensis Pb01]
  misc_feature (39)..(315): NCBI GI: 255937217 Blast Desc: Pc13g12190 [Penicillium chrysogenum Wisconsin 54-1255] gi|211584255|emb|CAP92288.1| Pc13g12190 [Penicillium chrysogenum Wisconsin 54-1255]
  misc_feature (38)..(317): NCBI GI: 261198599 Blast Desc: mitochondrial outer membrane protein [Ajellomyces dermatitidis SLH14081] gi|239594853|gb|EEQ77434.1| mitochondrial outer membrane protein [Ajellomyces dermatitidis SLH14081]
  misc_feature (45)..(315): NCBI GI: 189198960 Blast Desc: conserved [Pyrenophora tritici-repentis Pt-1C-BFP] gi|187982916|gb|EDU48404.1| conserved [Pyrenophora tritici-repentis Pt-1C-BFP]
  misc_feature (38)..(317): NCBI GI: 239610025 Blast Desc: mitochondrial outer membrane protein [Ajellomyces dermatitidis ER-3]
  misc_feature (28)..(321): NCBI GI: 154305450 Blast Desc: BC1G_08494 [Botryotinia fuckeliana B05.10] gi|150853281|gb|EDN28473.1| BC1G_08494 [Botryotinia fuckeliana B05.10]
  misc_feature (20)..(321): NCBI GI: 156044242 Blast Desc: SS1G_10224 [Sclerotinia sclerotiorum 1980] gi|154694613|gb|EDN94351.1| SS1G_10224 [Sclerotinia sclerotiorum 1980]
  misc_feature (39)..(315): NCBI GI: 238489221 Blast Desc: mitochondrial outer membrane protein (Sam35), [Aspergillus flavus NRRL3357] gi|220698236|gb|EED54576.1| mitochondrial outer membrane protein (Sam35), [Aspergillus flavus
  misc_feature (31)..(315): NCBI GI: 145240177 Blast Desc: An08g06200 [Aspergillus niger] gi|134077249|emb|CAK45590.1| protein product [Aspergillus niger]
  misc_feature: Useful for introducing or modulating the production of volatile compounds
MSAEVVRLIDTGRDPNSFLATCKAQRGSLNPDRIERVPSMTTGWLTIPAPLEWLFRKVPLQVYPPNALPARCSAVSHRETPSLWVFISGDDALEGRPSYNPACLKWQTLLKLSGVDFRLVSSNNHASPTGALPFLLPPSAATNLPVPSTKLEQYAREHGSLADPPPSDAFRIDAYESLLDHRIRNVWLYTLYLSPTNASILDRLYVAPVSSSTLIRFNVRYHLRQAAESEILKSTSRQCIDPAILYADAQEAFGALDTLLGDGTWFFGAKDPGLFDAAVFSYTYLILDEKLAWKNDRLGDMLREFPRLVSHRNRLYDRCWGSS

SEQ ID NO: 5911 - DNA, 873 bp, Muscodor strobelii
  misc_feature: SGI cDNA ID NO. 561697
  misc_feature: Encodes the peptide sequence at SEQ ID NO 5912
atggctccagcccgagacaacccgccggctgagggaccgctggtcacccacttcaaaggtgccttagaggccgagtatagttcgcgatggaataaatgctgggagaccaagcaaactccatgggataggggtggaccaagtctcgctctgtacgatttgctacgtgacaaccctcggggtgttctggatcctatgcccaaagatggcatgagaaagagagctcttgtccctggatgtggtatgggacacgatgtcctcttgctggccaccttcggatacgatgtgttcggccttgacatcgcaactgaaggtcttgaggcagccatgaagcatgccagcgaggctactaccactggtggtattgggccggagaaaggtcatcaactaggagatatcaactggctttgccaggattttttcgaaactagctggggtgatgttgacaggcactttgacctagtctttgactacgccttcttctgcgcattgcatacatccatgcgagtagcttgggcatctgtcatgaagtcagtgctgaaccccggaggtagactcgtgtgcctcgaattccctaccgataaaccgcagaatgcaccaggacctccttggccttccaacccgactgagtaccaagcatatcttatgtttcccggaacagaacctctgagagacagacaaggcaaaatcccgctttcttacgtccatcaatcagctgctgctagtctcatgcggctgtaccactggaaacccgaacgaactcatgtggcgggcacgaaagtcggtcaggtcaaagactttatctccgtatgggcgcatggagatgaaccgtatgaccgtgcaaaatttccggtcttgagtttcgaggagtactaa

SEQ ID NO: 5912 - protein, 290 aa, Muscodor strobelii
  misc_feature: SGI Peptide ID NO. 561697
  misc_feature (25)..(245): Pfam Id: PF05724 Pfam Desc: Thiopurine S-methyltransferase (TPMT)
  misc_feature (27)..(191): Pfam Id: PF05724 Pfam Desc: Thiopurine S-methyltransferase (TPMT)
  misc_feature (11)..(271): NCBI GI: 46137187 Blast Desc: FG10109.1 [Gibberella zeae PH-1]
  misc_feature (14)..(271): NCBI GI: 261351776 Blast Desc: conserved [Verticillium albo-atrum VaMs.102]
  misc_feature (24)..(272): NCBI GI: 145611020 Blast Desc: thiol methyltransferase 1, [Magnaporthe grisea 70-15] gi|145018369|gb|EDK02648.1| thiol methyltransferase 1, [Magnaporthe grisea 70-15]
  misc_feature (30)..(270): NCBI GI: 258566409 Blast Desc: [Uncinocarpus reesii 1704] gi|237907650|gb|EEP82051.1| [Uncinocarpus reesii 1704]
  misc_feature (14)..(274): NCBI GI: 240104975 Blast Desc: Thiopurine S-methyltransferase family protein [Coccidioides posadasii C735 delta SOWgp]
  misc_feature (14)..(274): NCBI GI: 119195301 Blast Desc: CIMG_02025 [Coccidioides immitis RS]
  misc_feature (14)..(274): NCBI GI: 239606682 Blast Desc: thiol methyltransferase [Ajellomyces dermatitidis ER-3]
  misc_feature (14)..(274): NCBI GI: 261197313 Blast Desc: thiol methyltransferase [Ajellomyces dermatitidis SLH14081] gi|239595689|gb|EEQ78270.1| thiol methyltransferase [Ajellomyces dermatitidis SLH14081]
  misc_feature (30)..(272): NCBI GI: 238838478 Blast Desc: conserved [Microsporum canis CBS 113480]
  misc_feature (7)..(206): NCBI GI: 145234849 Blast Desc: An03g01710 [Aspergillus niger] gi|134057747|emb|CAK38144.1| protein product [Aspergillus niger]
MAPARDNPPAEGPLVTHFKGALEAEYSSRWNKCWETKQTPWDRGGPSLALYDLLRDNPRGVLDPMPKDGMRKRALVPGCGMGHDVLLLATFGYDVFGLDIATEGLEAAMKHASEATTTGGIGPEKGHQLGDINWLCQDFFETSWGDVDRHFDLVFDYAFFCALHTSMRVAWASVMKSVLNPGGRLVCLEFPTDKPQNAPGPPWPSNPTEYQAYLMFPGTEPLRDRQGKIPLSYVHQSAAASLMRLYHWKPERTHVAGTKVGQVKDFISVWAHGDEPYDRAKFPVLSFEEY

SEQ ID NO: 5913 - DNA, 1674 bp, Muscodor strobelii
  misc_feature: SGI EST ID NO. CUFF.14938.1
  misc_feature: Variant of the nucleotide sequence at SEQ ID NO 5911
tttcgtattctttatctgctttgagatatgtgttttgactgagaaacgtttacatacacaagcataagatatctggtcacggtagcgctccaaacggcagttacacggaggtgttgcactagtgctgggtacatgtaaataatggcgttggtaagtgcagcttctacctctcatcttctatcgaatgtgccttcactgcgattgatgtagagaagattccaggcacgaactgcacgattcttccgggtttaccttcttatcaacgttaaagcaaatactcggtcttacatccgaggccaacaaccccacctctacgccctccacacatcaatcgcaattgacatcttggccgttcgaccaagccgcacgtttacttcgtctctggattgcttagtacatctcaggtctcagccaattatctcaggaagcagtacctgatagaagttgcaatggctccagcccgagacaacccgccggctgagggaccgctggtcacccacttcaaaggtgccttagaggccgagtatagttcgcgatggaataaatgctgggagaccaagcaaactccatgggataggggtggaccaagtctcgctctgtacgatttgctacgtgacaaccctcggggtgttctggatcctatgcccaaagatggcatgagaaagagagctcttgtccctggatgtggtatgggacacgatgtcctcttgctggccaccttcggatacgatgtgttcggccttgacatcgcaactgaaggtcttgaggcagccatgaagcatgccagcgaggctactaccactggtggtattgggccggagaaaggtcatcaactaggagatatcaactggctttgccaggattttttcgaaactagctggggtgatgttgacaggcactttgacctagtctttgactacgccttcttctgcgcattgcatacatccatgcgagtagcttgggcatctgtcatgaagtcagtgctgaaccccggaggtagactcgtgtgcctcgaattccctaccgataaaccgcagaatgcaccaggacctccttggccttccaacccgactgagtaccaagcatatcttatgtttcccggaacagaacctctgagagacagacaaggcaaaatcccgctttcttacgtccatcaatcagctgctgctagtctcatgcggctgtaccactggaaacccgaacgaactcatgtggcgggcacgaaagtcggtcaggtcaaagactttatctccgtatgggcgcatggagatgaaccgtatgaccgtgcaaaatttccggtcttgagtttcgaggagtactaagggttgtgtcgatagtatgccctgagcgcacaaggctctggtcagcttttattatgaggaagtgttacccttatccggatacaccattacgtgatacttcaacgtggatcagacttgataggccatggatagtgagaggttaccgtataggtataatcagtctatcttgctaatcggggccctgtttcgaagagtaaaagaagatgtcgaacggtataaaagctttctagaattggaagccagtgtttgtatctagattcgcggggctgctttttctcctagtttcggcataggttcggattaggagtcaaagacactaggaacagatcacagatgtaatacagtatgctca

SEQ ID NO: 5914 - DNA, 2178 bp, Muscodor strobelii
  misc_feature: SGI cDNA ID NO. 561698
  misc_feature: Encodes the peptide sequence at SEQ ID NO 5915
atgtgtggtatcacggtagctatatctcttaggcgtgaagggagacaccaaacgaataggattcttaacgaagcatccaactgtctatctaatggtgacaagcctcatctacgagaagttcttgcatcgaaactctctaagagcttggatatcatagcatatcggggaccggatgcgaaaggcatatggatcagtccagacaacgccataggtctggctcattgtcgtttgtctatcaacgatctatcggatggcggtactcaaccactccatgacgacgagaattatatccatgccgtgatcaacggagaggtgtacgacaatgacaggttaagagaacagtgtaccaaggaattccgttaccagttcaagggattcagcgactccgaaacggtcgtggctctgtataaacactggtgcgtagtacgatacccaggctatggcgcaccgaaatttcttgactatatgcgaggcgagttttcgttggtcatatatgacgatcggagcggtaacgtaattgctgccagagatcgctttggcatcaagccattgttttggaggatatgggaggataaactattgattgcggcggagatgaaggcttttctgccgcttggatggaagccggaagattcagagggtattggtctaggaaagtggtattatggcagtcgaacacatttcaagaatgtctacaaggttgagccagccacttatatggtcgcgtcaccattcggagacatccaacatcatcgatattgggatttccagtatgcagacaagaacaaagtagaaacccgaacagtcgatgagatgattggagctgttcaagacaagcttatagaatcgattcgcttgagactacgcgccgacgtgcccgtaggtatatttttgtctggcgggcttgactcatctactattgcaggcatcgtcaaacatctcgtccagcaacatggagagaaaatgggcaacagggaagcgacggaaaggatcgcttgcttttgtatctcgttcgataaggattccggggtcgacgaatcgccaatcgcccagagaacggctgatttcctcggcgtgcaaatgcacacagcttatatgagcgaagctaagctagccaaacattttgaagaagctacatggcataacgagcaaatcactttcgatctcggaacggttggcaaatggtgcctgtcagagcttccgcgccagctcggcttcaaagttattcttagtggcgagggtgccgatgaagtgttcgccggatatccgtggtttgttacggatttcctcgcagaagccgatccttcaatgccagatcttgaacttcaacagaacccggagcttagagaagacctgtacaagacctgtcgggttgactatctcaggtcgctatccacgatgatgggtgattgcgattttaacaccaccccggagttagagaagagattgaatcatgcattggctcctgtgacgctctcgaacatgttgaggagcaccgatatactagttaactcgctttgcgagaaatacaccggcgatgaaagactccgcgcgagagtggacgattggccgaaagaagcccaagcaagaatccaggagtcgtcttggcatccactccatacctcactttattcgtggaatacaagttacctagccagctttatcctcacatccctaggagatcgatgtgaaatggcacatagtatcgaaggtcggccaccgttcttagatcacgagctggccgagctagttggccagatgccaccatccctaaagatatactacggtcaggatgtggaggggccatcgagcggcgagacgtcgagttggtgggcacatggcggagaatcaggtactaagcatatgtgggagaaatggattcttcgccaggccgccaaaccgttcatcactgatgagctctacaagcggagaaaacacccctatacggctcccgtgaaatgggtgaagggaggcgagatgcataagctcttctgccgtcttttaacacgcgagaatgtcgagaaactgggctttctggagtgggagaaagtcaaaagagctctagaccaaggatttgggacggatgctcttgtgccttcgtatcgattttgtcagcttgctgccggatatgtgactattgggcagcaattcggagtcccccgagcccaggacgtatga

SEQ ID NO: 5915 - protein, 725 aa, Muscodor strobelii
  misc_feature: SGI Peptide ID NO. 561698
  misc_feature (275)..(645): Pfam Id: PF00733 Pfam Desc: Asparagine synthase
  misc_feature (1)..(723): NCBI GI: 171678317 Blast Desc: protein product [Podospora anserina] gi|170937228|emb|CAP61885.1| protein product [Podospora anserina]
  misc_feature (1)..(723): NCBI GI: 225682870 Blast Desc: asparagine synthetase [Paracoccidioides brasiliensis Pb03]
  misc_feature (1)..(723): NCBI GI: 226285382 Blast Desc: asparagine synthase [Paracoccidioides brasiliensis Pb01]
  misc_feature (1)..(724): NCBI GI: 154281075 Blast Desc: [Ajellomyces capsulatus NAm1] gi|150411529|gb|EDN06917.1| [Ajellomyces capsulatus NAm1]
  misc_feature (1)..(724): NCBI GI: 225559610 Blast Desc: asparagine synthase [Ajellomyces capsulatus G186AR]
  misc_feature (1)..(724): NCBI GI: 240279348 Blast Desc: asparagine synthetase [Ajellomyces capsulatus H143]
  misc_feature (1)..(722): NCBI GI: 39947139 Blast Desc: MGG_08450 [Magnaporthe grisea 70-15] gi|145012273|gb|EDJ96929.1| MGG_08450 [Magnaporthe grisea 70-15]
  misc_feature (31)..(719): NCBI GI: 238507844 Blast Desc: asparagine synthetase, [Aspergillus flavus NRRL3357] gi|220688642|gb|EED44994.1| asparagine synthetase, [Aspergillus flavus NRRL3357]
  misc_feature (1)..(724): NCBI GI: 145247132 Blast Desc: An12g07660 [Aspergillus niger] gi|134080544|emb|CAK48505.1| protein product [Aspergillus niger]
  misc_feature (1)..(722): NCBI GI: 46139763 Blast Desc: FG11396.1 [Gibberella zeae PH-1]
  misc_feature (51)..(657): SWISSPROT Homolog: EC 6.3.5.4 Asparagine synthase (glutamine-hydrolyzing)
MCGITVAISLRREGRHQTNRILNEASNCLSNGDKPHLREVLASKLSKSLDIIAYRGPDAKGIWISPDNAIGLAHCRLSINDLSDGGTQPLHDDENYIHAVINGEVYDNDRLREQCTKEFRYQFKGFSDSETVVALYKHWCVVRYPGYGAPKFLDYMRGEFSLVIYDDRSGNVIAARDRFGIKPLFWRIWEDKLLIAAEMKAFLPLGWKPEDSEGIGLGKWYYGSRTHFKNVYKVEPATYMVASPFGDIQHHRYWDFQYADKNKVETRTVDEMIGAVQDKLIESIRLRLRADVPVGIFLSGGLDSSTIAGIVKHLVQQHGEKMGNREATERIACFCISFDKDSGVDESPIAQRTADFLGVQMHTAYMSEAKLAKHFEEATWHNEQITFDLGTVGKWCLSELPRQLGFKVILSGEGADEVFAGYPWFVTDFLAEADPSMPDLELQQNPELREDLYKTCRVDYLRSLSTMMGDCDFNTTPELEKRLNHALAPVTLSNMLRSTDILVNSLCEKYTGDERLRARVDDWPKEAQARIQESSWHPLHTSLYSWNTSYLASFILTSLGDRCEMAHSIEGRPPFLDHELAELVGQMPPSLKIYYGQDVEGPSSGETSSWWAHGGESGTKHMWEKWILRQAAKPFITDELYKRRKHPYTAPVKWVKGGEMHKLFCRLLTRENVEKLGFLEWEKVKRALDQGFGTDALVPSYRFCQLAAGYVTIGQQFGVPRAQDV

SEQ ID NO: 5916 - DNA, 2167 bp, Muscodor strobelii
  misc_feature: SGI EST ID NO. CUFF.15103.0
  misc_feature: Variant of the nucleotide sequence at SEQ ID NO 5914
cctcggcgtgcaaatgcacacagcttatatgagcgaagctaagctagccaaacattttgaagaagctacatggcataacgagcaaatcactttcgatctcggaacggttggcaaatggtgcctgtcagagcttccgcgccagctcggcttcaaagttattcttagtggcgagggtgccgatgaagtgttcgccggatatccgtggtttgttacggatttcctcgcagaagccgatccttcaatgccagatcttgaacttcaacagaacccggagcttagagaagacctgtacaagacctgtcgggttgactatctcaggtcgctatccacgatgatgggtgattgcgattttaacaccaccccggagttagagaagagattgaatcatgcattggctcctgtgacgctctcgaacatgttgaggagcaccgatatactagttaactcgctttgcgagaaatacaccggcgatgaaagactccgcgcgagagtggacgattggccgaaagaagcccaagcaagaatccaggagtcgtcttggcatccactccatacctcactttattcgtggaatacaagttacctagccagctttatcctcacatccctaggagatcgatgtgaaatggcacatagtatcgaaggtcggccaccgttcttagatcacgagctggccgagctagttggccagatgccaccatccctaaagatatactacggtcaggatgtggaggggccatcgagcggcgagacgtcgagttggtgggcacatggcggagaatcaggtactaagcatatgtgggagaaatggattcttcgccaggccgccaaaccgttcatcactgatgagctctacaagcggagaaaacacccctatacggctcccgtgaaatgggtgaagggaggcgagatgcataagctcttctgccgtcttttaacacgcgagaatgtcgagaaactgggctttctggagtgggagaaagtcaaaagagctctagaccaaggatttgggacggatgctcttgtgccttcgtatcgattttgtcagcttgctgccggatatgtgactattgggcagcaattcggagtcccccgagcccaggacgtatgagccgtaggtgcgtctggatgaccagcgacatttggtctttttcgaaatacaaagctcggcagcaacacttagtccagcattgaaagacgcaacctgtttcaatttttgtatatccgcctcccgagaacgcctgagattacccactataacaacatagcatagagtagcacattcataatggtagtatctcgtgcttgaacctcttcttgccatcgccctcgccgtatacagctgtaacatgtccttggccccgtatcttgtatttatagattgtcaagccttctaatccaacaggacctcgggagtggatcttgttcgtgctgatgcctacctctgtgccaaaaccatacctcataccatcagcgaaacgtgtcgatgcattccaatacactccggctgcatcaatgcctgacatgaacttctcagcgatgtgctcctccgatgtcaggatcacgtcagtatgtttcgagccatgaatattgatgtgtgtgatggcctcgtcgataccgatcacgacctttacagcaagagtcagctccaggaattccgtgtcaaagtcggcatctgtagcatcttgaagactcttcgagttgtccggtgtcttcaagttctctgacaaaaattccttcgtcgtcttatcacaacgaagaacaacacccttggtaatcagggcttcggccactgcgagtaaacatttgagggcggcatcagagttctgcaccagtagagtctccaagctgttgcatgcagcagggtagctggtcttggagtctacaatgacagcaactgccatctcgggatctgcactttgctcgaggaagatggagcagaggccatccgcatggccgaggactggaattttagtattagacttgatgaaacggacaagctcattcgaccctctgggaatcgctagatcgatgaactggtccaacttgagcagcccgggaatgacatcccttgtagttaccaactggatggcgttattgggtacctgactctgagctagagcagctgagatgacacttgaaatagcaacaaaggactctgttgact

SEQ ID NO: 5917 - DNA, 1356 bp, Muscodor strobelii
  misc_feature: SGI cDNA ID NO. 561699
  misc_feature: Encodes the peptide sequence at SEQ ID NO 5918
atgtcgttgaccaatgcttcgcccgctgaggccgcattgcaggccaagaactcatcccacatcctcgctacattgcccgtgaccgccaggaacgatgcgctaaccgccatccacgccgcgctcgctgaagccaaggatgacatactagcagccaatgcccgtgacttggcggcagctcgccaggcagcgcagagcggcgagctcagccagagccttgtctcgcgtttagatctgggaaagaagggcaagtgggaggatatgctgaagggcattctcgacgtgaggggactcgaagatccagttggcaaggtcaccctgaggacaaaactagatgatgggttggaattaacacgcgtcacttgtcctatcggtgtcctactcatcattttcgaggctcgtcccgaagtcattgcgaacattgcctcattggccatcaagtccggcaatgctgccatcctgaagggaggcaaggagtcaacagagtcctttgttgctatttcaagtgtcatctcagctgctctagctcagagtcaggtacccaataacgccatccagttggtaactacaagggatgtcattcccgggctgctcaagttggaccagttcatcgatctagcgattcccagagggtcgaatgagcttgtccgtttcatcaagtctaatactaaaattccagtcctcggccatgcggatggcctctgctccatcttcctcgagcaaagtgcagatcccgagatggcagttgctgtcattgtagactccaagaccagctaccctgctgcatgcaacagcttggagactctactggtgcagaactctgatgccgccctcaaatgtttactcgcagtggccgaagccctgattaccaagggtgttgttcttcgttgtgataagacgacgaaggaatttttgtcagagaacttgaagacaccggacaactcgaagagtcttcaagatgctacagatgccgactttgacacggaattcctggagctgactcttgctgtaaaggtcgtgatcggtatcgacgaggccatcacacacatcaatattcatggctcgaaacatactgacgtgatcctgacatcggaggagcacatcgctgagaagttcatgtcaggcattgatgcagccggagtgtattggaatgcatcgacacgtttcgctgatggtatgaggtatggttttggcacagaggtaggcatcagcacgaacaagatccactcccgaggtcctgttggattagaaggcttgacaatctataaatacaagatacggggccaaggacatgttacagctgtatacggcgagggcgatggcaagaagaggttcaagcacgagatactaccattatga

SEQ ID NO: 5918 - protein, 451 aa, Muscodor strobelii
  misc_feature: SGI Peptide ID NO. 561699
  misc_feature (1)..(451): NCBI GI: 154295409 Blast Desc: BC1G_13183 [Botryotinia fuckeliana B05.10] gi|150844051|gb|EDN19244.1| BC1G_13183 [Botryotinia fuckeliana B05.10]
  misc_feature (1)..(451): NCBI GI: 116179892 Blast Desc: CHGG_00574 [Chaetomium globosum CBS 148.51] gi|88184871|gb|EAQ92339.1| CHGG_00574 [Chaetomium globosum CBS 148.51]
  misc_feature (1)..(451): NCBI GI: 156048929 Blast Desc: SS1G_08171 [Sclerotinia sclerotiorum 1980] gi|154692570|gb|EDN92308.1| SS1G_08171 [Sclerotinia sclerotiorum 1980]
  misc_feature (1)..(451): NCBI GI: 85099713 Blast Desc: gamma-glutamyl phosphate reductase [Neurospora crassa OR74A] gi|28922362|gb|EAA31599.1| gamma-glutamyl phosphate reductase [Neurospora crassa OR74A] gi|28949999|emb|CAD70884.1|
  misc_feature (1)..(451): NCBI GI: 171691823 Blast Desc: protein product [Podospora anserina] gi|170945860|emb|CAP72661.1| protein product [Podospora anserina]
  misc_feature (1)..(451): NCBI GI: 46137211 Blast Desc: FG10121.1 [Gibberella zeae PH-1]
  misc_feature (1)..(451): NCBI GI: 256732177 Blast Desc: [Nectria haematococca mpVI 77-13-4]
  misc_feature (1)..(451): NCBI GI: 261197113 Blast Desc: glutamate-5-semialdehyde dehydrogenase [Ajellomyces dermatitidis SLH14081] gi|239595589|gb|EEQ78170.1| glutamate-5-semialdehyde dehydrogenase [Ajellomyces dermatitidis
  misc_feature (1)..(451): NCBI GI: 239606505 Blast Desc: glutamate-5-semialdehyde dehydrogenase [Ajellomyces dermatitidis ER-3]
  misc_feature (1)..(451): NCBI GI: 145602608 Blast Desc: MGG_12996 [Magnaporthe grisea 70-15] gi|145011003|gb|EDJ95659.1| MGG_12996 [Magnaporthe grisea 70-15]
  misc_feature (10)..(446): SWISSPROT Homolog: EC 1.2.1.41 Glutamate-5-semialdehyde dehydrogenase
MSLTNASPAEAALQAKNSSHILATLPVTARNDALTAIHAALAEAKDDILAANARDLAAARQAAQSGELSQSLVSRLDLGKKGKWEDMLKGILDVRGLEDPVGKVTLRTKLDDGLELTRVTCPIGVLLIIFEARPEVIANIASLAIKSGNAAILKGGKESTESFVAISSVISAALAQSQVPNNAIQLVTTRDVIPGLLKLDQFIDLAIPRGSNELVRFIKSNTKIPVLGHADGLCSIFLEQSADPEMAVAVIVDSKTSYPAACNSLETLLVQNSDAALKCLLAVAEALITKGVVLRCDKTTKEFLSENLKTPDNSKSLQDATDADFDTEFLELTLAVKVVIGIDEAITHINIHGSKHTDVILTSEEHIAEKFMSGIDAAGVYWNASTRFADGMRYGFGTEVGISTNKIHSRGPVGLEGLTIYKYKIRGQGHVTAVYGEGDGKKRFKHEILPL

SEQ ID NO: 5919 - DNA, 3164 bp, Muscodor strobelii
  misc_feature: SGI EST ID NO. CUFF.15104.1
  misc_feature: Variant of the nucleotide sequence at SEQ ID NO 5917
ccacaatcgaccccagacaaacatcttttcagctggtattccttaggttagctcttcacttactactatggtagagtcggactactggcttgttgagttgatgttgctcgcagctgagatatttgagctttcccatcaatatcaaatctatcaacctcgaactgtgcggcggaggtcaaagtccgctagacttgcacgccgaggagtcagtcacctaaatagcacctatagacaggaccgtatatcatacacgaagtcaattgactatgaaacattgacaaacaggctcgaaggccatgctcgtggatcgttgactcctattccatgttcttattccacatgtagcttccaagtctgcgaaactcggagccaaaaaaattatagtcccgtctctccaagtatataatttgatccggcccgcatcccgctcattggcttctccatcgccgtccacgtcggcccaagttgcgattctctcctcgggccagggaacttgagatattggttaccaataaaaaagtacgaagcatgtcgttgaccaatgcttcgcccgctgaggccgcattgcaggccaagaactcatcccacatcctcgctacattgcccgtgaccgccaggaacgatgcgctaaccgccatccacgccgcgctcgctgaagccaaggatgacatactagcagccaatgcccgtgacttggcggcagctcgccaggcagcgcagagcggcgagctcagccagagccttgtctcgcgtttagatctgggaaagaagggcaagtgggaggatatgctgaagggcattctcgacgtgaggggactcgaagatccaggtatacatatcgtcgctttgcaacatgcgtagtctacagaaaggaccaaggttgcgcagaactaactctaccggcaaatacagttggcaaggtcaccctgaggacaaaactagatgatgggttggaattaacacgcgtcacttgtcctatcggtgtcctactcatcattttcgaggctcgtcccgaagtcattgcgaacattgcctcattggccatcaagtccggcaatgctgccatcctgaagggaggcaaggagtcaacagagtcctttgttgctatttcaagtgtcatctcagctgctctagctcagagtcaggtacccaataacgccatccagttggtaactacaagggatgtcattcccgggctgctcaagttggaccagttcatcgatctagcgattcccagagggtcgaatgagcttgtccgtttcatcaagtctaatactaaaattccagtcctcggccatgcggatggcctctgctccatcttcctcgagcaaagtgcagatcccgagatggcagttgctgtcattgtagactccaagaccagctaccctgctgcatgcaacagcttggagactctactggtgcagaactctgatgccgccctcaaatgtttactcgcagtggccgaagccctgattaccaagggtgttgttcttcgttgtgataagacgacgaaggaatttttgtcagagaacttgaagacaccggacaactcgaagagtcttcaagatgctacagatgccgactttgacacggaattcctggagctgactcttgctgtaaaggtcgtgatcggtatcgacgaggccatcacacacatcaatattcatggctcgaaacatactgacgtgatcctgacatcggaggagcacatcgctgagaagttcatgtcaggcattgatgcagccggagtgtattggaatgcatcgacacgtttcgctgatggtatgaggtatggttttggcacagaggtaggcatcagcacgaacaagatccactcccgaggtcctgttggattagaaggcttgacaatctataaatacaagatacggggccaaggacatgttacagctgtatacggcgagggcgatggcaagaagaggttcaagcacgagatactaccattatgaatgtgctactctatgctatgttgttatagtgggtaatctcaggcgttctcgggaggcggatatacaaaaattgaaacaggttgcgtctttcaatgctggactaagtgttgctgccgagctttgtatttcgaaaaagaccaaatgtcgctggtcatccagacgcacctacggctcatacgtcctgggctcgggggactccgaattgctgcccaatagtcacatatccggcagcaagctgacaaaatcgatacgaaggcacaagagcatccgtcccaaatccttggtctagagctcttttgactttctcccactccagaaagcccagtttctcgacattctcgcgtgttaaaagacggcagaagagcttatgcatctcgcctcccttcacccatttcacgggagccgtataggggtgttttctccgcttgtagagctcatcagtgatgaacggtttggcggcctggcgaagaatccatttctcccacatatgcttagtacctgattctccgccatgtgcccaccaactcgacgtctcgccgctcgatggcccctccacatcctgaccgtagtatatctttagggatggtggcatctggccaactagctcggccagctcgtgatctaagaacggtggccgaccttcgatactatgtgccatttcacatcgatctcctagggatgtgaggataaagctggctaggtaacttgtattccacgaataaagtgaggtatggagtggatgccaagacgactcctggattcttgcttgggcttctttcggccaatcgtccactctcgcgcggagtctttcatcgccggtgtatttctcgcaaagcgagttaactagtatatcggtgctcctcaacatgttcgagagcgtcacaggagccaatgcatgattcaatctcttctctaactccggggtggtgttaaaatcgcaatcacccatcatcgtggatagcgacctgagatagtcaacccgacaggtcttgtacaggtcttctctaagctccgggttctgttgaagttcaagatctggcattgaaggatcggcttctgcgaggaaatccgtaacaaaccacggatatccggcgaacacttcatcggcaccctcgccactaagaataactttgaagccgagctggcgcggaagctctgacaggcaccatttgccaaccgttccgagatcgaaagtga

SEQ ID NO: 5920 - DNA, 2334 bp, Muscodor strobelii
  misc_feature: SGI cDNA ID NO. 561700
  misc_feature: Reduced expression when VOC is produced
  misc_feature: Encodes the peptide sequence at SEQ ID NO 5921
atggcgtgccctcacctcgattctataaccttgacgcctcccacgcctgtccagtccgtctaccgcgaagactgcacacaatgcttcgactccattgacgagccagaggggctcgatgtctgcctccagtgcttcaacggcgcatgtgtcggcctccgaacccactcgcagctgcaccacctcacccggagccatcctctggccctcaacatccgccgcacgcgcaagcaggtcgtcaaggatgagccccccgccaagatgaccaagctggccatcgccgccgagaccgacgccgaccgctacgactacaccaccgccgtcaagtgcctcgagtgcgccgccgagctcgacaaggccggccccaagctcgcccccgtcgtcgacgccatcctcaacgccaacaccttctcgcgccaggaggaggtcaaggcctgggagcaggacatgtccacctgcgagcacatcctcatgctgcacccacacgacagccgcaccatccagagtggcgacctgggccactgctcccagtgcgacctgaaggagaacctgtggctctgtctcgtctgtgggaacctcggctgcggtcgcgctcagttcggcggcgtcgggggcaactctcacggcctcgcccacgccaccgaagctcaccacgccgttgccgtcaagcttggctccattacgcccgagggatccgccgacgtctactgctaccagtgcgacgaggagcgcttggacggtgatctggccacgcatcttgcgcactggggcatcatactgtccgatcaagtcaagacggagaagagcttgaccgagatgcagatcgagcagaacttgcgatgggagttttctatgaccaccgaggacggcagagaactccgacccctgttcggccccaacctgaccggtttgaaaaacttgggcaatagctgttatctcgccagcatcctgcagtgtctctttgacttgcctgcctttcgagaacgctacaatatccccgaggtcgaccttcccatggtggaggacccagctcaggatctcgagacgcagcttcgcaagatggccgacggtctactctccggccgctactccaaaccagatagcgacgtggtctcatccgaaagctccgccgacatggttcatcagaaagggttggcgcctagcatgttgaaacatttgattggtcgcggccacgctgagttctcgacgatgcgccaacaggactccttcgaactcctccagcatctcgtcaagctgatcacccgatcgcctcacacagggtctcagcgagacccaacccaacctttccggtttgtcatggagcagcgactgcagtgcgtcaactgcaagaaggtccgctactcgtccaccgagcaggataacgtattcatcgatgtgcctatcgagaaactgcctgctacggaagacggcggagaggcgtacaagccggtaacgttagaagagtgccttgaccgtctcaccggagaggagatggtggagttgacctgtcctggatgcgggagcaaggagggattcttgaaacgaagtctctttaagacattccctacgacgctcgtggtcaacgcgcgaaagatgacggtggagaactgggttccgcgcaaggtggatgtccccgttatcgtcggggatgatgtcttcgcgctggataaatacttgtcgcccggccatcagcccagcgaagaactactacccgaggaagacaaggccacgccggcgttcgtgccgaaccaagaggccatggatcagctgggcgccatggggttcccggcggtgcggtgtgagaaggcgctctacaagacgggcaactcggatgccaacgcagccatggaatggctgtttgcgcacatggaggacgccgacatcgacgagccattgcagatcgaggccgctgcgggtgggtcgtcggtggcagacgatccggagaagatagccatgttccaggccatgggattcagtataccccaagcccgcaaagggttgaaggagacggggggcgatatggagagggcggtggagtggctgttcagccatccggacgagcagggcgacttcggaggcgatgacagcagtggcggcgagaagaaggagagcgcgccggccggcacggcggagctccctgcgagattccagctgcgaagcatcgtctgccacaagggcacgagcatccacgctggacactacgttgcgttcatccgcaagcttctggatacgacggagcctcgatgggtgctcttcaacgacgagaaggtggtggaggccggagacatagaggagatgaagaagacggcgtatgtctatttcttccaccgcgcgtga

SEQ ID NO: 5921 - protein, 777 aa, Muscodor strobelii
  misc_feature: SGI Peptide ID NO. 561700
  misc_feature (644)..(680): Pfam Id: PF00627 Pfam Desc: UBA/TS-N domain
  misc_feature (581)..(618): Pfam Id: PF00627 Pfam Desc: UBA/TS-N domain
  misc_feature (298)..(774): Pfam Id: PF00443 Pfam Desc: Ubiquitin carboxyl-terminal hydrolase
  misc_feature (174)..(250): Pfam Id: PF02148 Pfam Desc: Zn-finger in ubiquitin-hydrolases and other protein
  misc_feature (1)..(776): NCBI GI: 46111517 Blast Desc: FG02640.1 [Gibberella zeae PH-1]
  misc_feature (1)..(776): NCBI GI: 39946482 Blast Desc: MGG_08270 [Magnaporthe grisea 70-15] gi|145020091|gb|EDK04319.1| MGG_08270 [Magnaporthe grisea 70-15]
  misc_feature (1)..(776): NCBI GI: 171677294 Blast Desc: protein product [Podospora anserina] gi|170936715|emb|CAP61373.1| protein product [Podospora anserina]
  misc_feature (1)..(776): NCBI GI: 85095236 Blast Desc: NCU05777 [Neurospora crassa OR74A] gi|28921496|gb|EAA30801.1| NCU05777 [Neurospora crassa OR74A]
  misc_feature (1)..(776): NCBI GI: 116200987 Blast Desc: CHGG_08378 [Chaetomium globosum CBS 148.51] gi|88176896|gb|EAQ84364.1| CHGG_08378 [Chaetomium globosum CBS 148.51]
  misc_feature (1)..(776): NCBI GI: 156043051 Blast Desc: SS1G_10528 [Sclerotinia sclerotiorum 1980] gi|154694916|gb|EDN94654.1| SS1G_10528 [Sclerotinia sclerotiorum 1980]
  misc_feature (1)..(776): NCBI GI: 189211369 Blast Desc: ubiquitin carboxyl-terminal hydrolase 14 [Pyrenophora tritici-repentis Pt-1C-BFP] gi|187978108|gb|EDU44734.1| ubiquitin carboxyl-terminal hydrolase 14 [Pyrenophora tritici-repentis
  misc_feature (1)..(776): NCBI GI: 261187449 Blast Desc: ubiquitin C-terminal hydrolase [Ajellomyces dermatitidis SLH14081] gi|239594198|gb|EEQ76779.1| ubiquitin C-terminal hydrolase [Ajellomyces dermatitidis SLH14081] ER-3]
  misc_feature (1)..(776): NCBI GI: 226280406 Blast Desc: ubiquitin carboxyl-terminal hydrolase [Paracoccidioides brasiliensis Pb01]
  misc_feature (2)..(777): NCBI GI: 169769544 Blast Desc: [Aspergillus oryzae RIB40] gi|83767100|dbj|BAE57240.1| protein product [Aspergillus oryzae]
  misc_feature (1)..(776): SWISSPROT Homolog: EC 3.1.2.15 Ubiquitin thiolesterase
  misc_feature: Useful for introducing or modulating the production of volatile compounds
MACPHLDSITLTPPTPVQSVYREDCTQCFDSIDEPEGLDVCLQCFNGACVGLRTHSQLHHLTRSHPLALNIRRTRKQVVKDEPPAKMTKLAIAAETDADRYDYTTAVKCLECAAELDKAGPKLAPVVDAILNANTFSRQEEVKAWEQDMSTCEHILMLHPHDSRTIQSGDLGHCSQCDLKENLWLCLVCGNLGCGRAQFGGVGGNSHGLAHATEAHHAVAVKLGSITPEGSADVYCYQCDEERLDGDLATHLAHWGIILSDQVKTEKSLTEMQIEQNLRWEFSMTTEDGRELRPLFGPNLTGLKNLGNSCYLASILQCLFDLPAFRERYNIPEVDLPMVEDPAQDLETQLRKMADGLLSGRYSKPDSDVVSSESSADMVHQKGLAPSMLKHLIGRGHAEFSTMRQQDSFELLQHLVKLITRSPHTGSQRDPTQPFRFVMEQRLQCVNCKKVRYSSTEQDNVFIDVPIEKLPATEDGGEAYKPVTLEECLDRLTGEEMVELTCPGCGSKEGFLKRSLFKTFPTTLVVNARKMTVENWVPRKVDVPVIVGDDVFALDKYLSPGHQPSEELLPEEDKATPAFVPNQEAMDQLGAMGFPAVRCEKALYKTGNSDANAAMEWLFAHMEDADIDEPLQIEAAAGGSSVADDPEKIAMFQAMGFSIPQARKGLKETGGDMERAVEWLFSHPDEQGDFGGDDSSGGEKKESAPAGTAELPARFQLRSIVCHKGTSIHAGHYVAFIRKLLDTTEPRWVLFNDEKVVEAGDIEEMKKTAYVYFFHRA

SEQ ID NO: 5922 - DNA, 5249 bp, Muscodor strobelii
  misc_feature: SGI EST ID NO. CUFF.15679.0
  misc_feature: Variant of the nucleotide sequence at SEQ ID NO 5920
ggcatttctctcatcagccctgttatgacggaactggggccattaacgtcgcccgtttgttgcccctcgttggctgcctgcggctcagcgccgttgaaacttcccgtgcactactagggtcaagagatacatgcatgcagacatcacgaccaatgtcatgatttgagtttctctttttctttgcctgcgaaccgtactacatcatttccccagctggcgcttcatcgcagcccagtcttcatcccgctttgtcacggcagatctgtaggtctcaacttgatccgcatcagcgcctgcaactctagagtcgttcctccttccccaaagtcgcaacattccactgtcactcccatcgtcgtcgtcgtttctcaccttccaactcgccgtggggagccccgcctctctctgtctcgctgcccgccatggcgtgccctcacctcgattctataaccttgacgcctcccacgcctgtccagtccgtctaccgcgaagactgcacacaatgcttcgactccattgacgagccagaggggctcgatgtctgcctccagtgcttcaacggcgcatgtgtcggcctccgaacccactcgcagctgcaccacctcacccggagccatcctctggccctcaacatccgccgcacgcgcaagcaggtcgtcaaggatgagccccccgccaagatgaccaagctggccatcgccgccgagaccgacgccgaccgctacgactacaccaccgccgtcaagtgcctcgagtgcgccgccgagctcgacaaggccggccccaagctcgcccccgtcgtcgacgccatcctcaacgccaacaccttctcgcgccaggaggaggtcaaggcctgggagcaggacatgtccacctgcgagcacatcctcatgctgcacccacacgacagccgcaccatccagagtggcgacctgggccactgctcccagtgcgacctgaaggagaacctgtggctctgtctcgtctgtgggaacctcggctgcggtcgcgctcagttcggcggcgtcgggggcaactctcacggcctcgcccacgccaccgaagctcaccacgccgttgccgtcaagcttggctccattacgcccgagggatccgccgacgtctactgctaccagtgcgacgaggagcgcttggacggtgatctggccacgcatcttgcgcactggggcatcatactgtccgatcaagtcaagacggagaagagcttgaccgagatgcagatcgagcagaacttgcgatgggagttttctatgaccaccgaggacggcagagaactccgacccctgttcggccccaacctgaccggtttgaaaaacttgggcaatagctgttatctcgccagcatcctgcagtgtctctttgacttgcctgcctttcgagaacgctacaatatccccgaggtcgaccttcccatggtggaggacccagctcaggatctcgagacgcagcttcgcaagatggccgacggtctactctccggccgctactccaaaccagatagcgacgtggtctcatccgaaagctccgccgacatggttcatcagaaagggttggcgcctagcatgttgaaacatttgattggtcgcggccacgctgagttctcgacgatgcgccaacaggactccttcgaactcctccagcatctcgtcaagctgatcacccgatcgcctcacacagggtctcagcgagacccaacccaacctttccggtttgtcatggagcagcgactgcagtgcgtcaactgcaagaaggtccgctactcgtccaccgagcaggataacgtattcatcgatgtgcctatcgagaaactgcctgctacggaagacggcggagaggcgtacaagccggtaacgttagaagagtgccttgaccgtctcaccggagaggagatggtggagttgacctgtcctggatgcgggagcaaggagggattcttgaaacgaagtctctttaagacattccctacgacgctcgtggtcaacgcgcgaaagatgacggtggagaactgggttccgcgcaaggtggatgtccccgttatcgtcggggatgatgtcttcgcgctggataaatacttgtcgcccggccatcagcccagcgaagaactactacccgaggaagacaaggccacgccggcgttcgtgccgaaccaagaggccatggatcagctgggcgccatggggttcccggcggtgcggtgtgagaaggcgctctacaagacgggcaactcggatgccaacgcagccatggaatggctgtttgcgcacatggaggacgccgacatcgacgagccattgcagatcgaggccgctgcgggtgggtcgtcggtggcagacgatccggagaagatagccatgttccaggccatgggattcagtataccccaagcccgcaaagggttgaaggagacggggggcgatatggagagggcggtggagtggctgttcagccatccggacgagcagggcgacttcggaggcgatgacagcagtggcggcgagaagaaggagagcgcgccggccggcacggcggagctccctgcgagattccagctgcgaagcatcgtctgccacaagggcacgagcatccacgctggacactacgttgcgttcatccgcaagcttctggatacgacggagcctcgatgggtgctcttcaacgacgagaaggtggtggaggccggagacatagaggagatgaagaagacggcgtatgtctatttcttccaccgcgcgtgaggatgaaaaggggccgcaggagacatgatgacgtgaaagtgactgacgcataatgttcgatggggccgggtttggcttggtgcaagaaatgagagcatttacgaagcatggcatgcctggcgaaaaaagaagagcaagatgagcaaatcatagatgtgttttcatagcatggcttctcgcacaaccccaatctctggtagaatggcatatcagagacctgaaggagcagtgtacaagaaggaggtatgggcttgattggtatcttcacgaatgaatcctagcctgacatggtcatctcctcgatgcgtgttcaagttgccatttacatgttcagatcccttctcgcgccatgtacaagtctcggccatatccagtgtagcctgcattatagatagacagactcctcaacgccgccaagtttgcatgtgcatgtgtctgttgcttcttcgtcttttcgtatcgttatcattatttccgccctttccgcccgacgcaatccatccacgtagggagctagtatacaatgaatacaagtgttgttcctcggtgcaagtgcgcggcctagtctcccaggcggtagctgacgagggtgtcgacgcggtgggaggaggtggtgaagccgcgcagctggaccctctcgccgttgacgatctccttggcgtccgagtcgccccactcgacggggacgtccgagtcggcgtcggcgtagacgaggacgttgaaggtgcagtcgccctgcagctggggcaggaaggtgacggaggcggtgatctggcggaagagggccgcgatctcggcctggatctcggcctcggtcttggaggggtccacggccgtcgacgacgacgatgatgagttctcgttcgccgatgaggacggtggcacggtcctagaggatgaggacttggaagatttagatgacgaggctaggatctggacgtcgaactgccagcgctcgacgtggtcgcccgtgtccttgtcggtgatgacgacgacgagcttgctgatcttgccgcgctgcatccagcggtcgagctgggacatgatcttcttgatgtaggcgcgcacctggtcgtcggccgagacgagcatgttgaggccgtacttcttcaccgccgtgaagtcctcggccgggtagacgcccctctggaagaggatggtgtggatggagtattggaactgcgagtggcgcgatcaaagtcgccatgtcagcatattgtgtgcttgtatatacatatatatgtggtgattcattctccttttttaaagagggggagagacacatacgaactcggcaacgagcttggcgctacccttgagcgacagcttatggactttggacttgtccttctcttcggctttggacgaggacatggctgtggctgtgctgggggatctgacgattcgtatcgaagtcaattggatgtatatgtgcaatgaattgactggcagagaactggatgtcgttggtgtctttttttggtgacgatgataagttaggtagtgtaagtccccaaggttacctaatttgtttactttggaggtgcagtatctggcggggtgacggcggaatgggtttgtagtaggtacctctctacaacgcccctgctctccggggagctacctgcagggtaggtagtgtttctgataagataggacggacagatgaatggatggatggatggattgcagctggcttttctgcggctgtcatcaagtgagatcatcacatcgcctctttctcttctctttttctcttgactgacaagcttagcgccgcatccccaacaaagcttgaatggatgggtagcagatgtctcatgcgaccatcatggctgctccgccaggtcacttcctccgccaccgccactgctgccccagctagtagagttggcagtgctgttcgcagtactgctcgcagtactcgcagcttgcattcgctatgccacgcttcatcatcatcacgtcgttgtcggcctacaccatgcacagctgcatttgcatctgcatctgtgcctctgcagctgagccgcggtgttgccaacggtaaagtggtggtgggcgagctggagcggcgcatcgcggcgatcccgatcgagcggttccgcaacttctgcatcgtcgcgcacatcgaccacggcaagtcgacgctgtcggaccggctgctagagacgacgggcacgatcgcggcgtcgcaggccaaccggcagatcctcgacacgctcgaggtggagcgcgagcgcggcatcacggtcaaggcgcagacgtgcaccatgctgtaccgccacaccgacgggctcgactacctgctgcacctcgtcgacacccccggccacgtcgacttccgcgccgaggtcacccgctcctacgccagctgcggcggcgccctgctgctcgtcgacgccagccagggcgtccaggcccagaccgtcgccaacttctacctcgccttcgcccagggcctgcgcatcctgcccgtcgtcaacaaggtcg

SEQ ID NO: 5923 - DNA, 705 bp, Muscodor strobelii
  misc_feature: SGI cDNA ID NO. 561701
  misc_feature: Encodes the peptide sequence at SEQ ID NO 5924
atgtcctcgtccaaagccgaagagaaggacaagtccaaagtccataagctgtcgctcaagggtagcgccaagctcgttgccgagttcttccaatactccatccacaccatcctcttccagaggggcgtctacccggccgaggacttcacggcggtgaagaagtacggcctcaacatgctcgtctcggccgacgaccaggtgcgcgcctacatcaagaagatcatgtcccagctcgaccgctggatgcagcgcggcaagatcagcaagctcgtcgtcgtcatcaccgacaaggacacgggcgaccacgtcgagcgctggcagttcgacgtccagatcctagcctcgtcatctaaatcttccaagtcctcatcctctaggaccgtgccaccgtcctcatcggcgaacgagaactcatcatcgtcgtcgtcgacggccgtggacccctccaagaccgaggccgagatccaggccgagatcgcggccctcttccgccagatcaccgcctccgtcaccttcctgccccagctgcagggcgactgcaccttcaacgtcctcgtctacgccgacgccgactcggacgtccccgtcgagtggggcgactcggacgccaaggagatcgtcaacggcgagagggtccagctgcgcggcttcaccacctcctcccaccgcgtcgacaccctcgtcagctaccgcctgggagactag

SEQ ID NO: 5924 - protein, 234 aa, Muscodor strobelii
  misc_feature: SGI Peptide ID NO. 561701
  misc_feature (18)..(232): Pfam Id: PF02301 Pfam Desc: HORMA domain
  misc_feature (3)..(234): NCBI GI: 116200985 Blast Desc: conserved [Chaetomium globosum CBS 148.51] gi|88176895|gb|EAQ84363.1| conserved [Chaetomium globosum CBS 148.51]
  misc_feature (14)..(232): NCBI GI: 256725851 Blast Desc: [Nectria haematococca mpVI 77-13-4]
  misc_feature (8)..(234): NCBI GI: 240274345 Blast Desc: mitotic spindle checkpoint component mad2 [Ajellomyces capsulatus H143]
  misc_feature (8)..(234): NCBI GI: 154270758 Blast Desc: conserved [Ajellomyces capsulatus NAm1] gi|150409807|gb|EDN05247.1| conserved [Ajellomyces capsulatus NAm1] gi|225554974|gb|EEH03268.1| HORMA domain-containing protein
  misc_feature (2)..(232): NCBI GI: 171677296 Blast Desc: protein product [Podospora anserina] gi|170936716|emb|CAP61374.1| protein product [Podospora anserina]
  misc_feature (6)..(233): NCBI GI: 240107467 Blast Desc: HORMA domain containing protein [Coccidioides posadasii C735 delta SOWgp]
  misc_feature (14)..(229): NCBI GI: 164425466 Blast Desc: mitotic spindle checkpoint component MAD2 [Neurospora crassa OR74A] gi|157070936|gb|EAA30805.2| mitotic spindle checkpoint component MAD2 [Neurospora crassa OR74A]
  misc_feature (9)..(234): NCBI GI: 169780902 Blast Desc: [Aspergillus oryzae RIB40] gi|83773655|dbj|BAE63782.1| protein product [Aspergillus oryzae]
  misc_feature (8)..(232): NCBI GI: 261196049 Blast Desc: HORMA domain-containing protein [Ajellomyces dermatitidis SLH14081] gi|239587561|gb|EEQ70204.1| HORMA domain-containing protein [Ajellomyces dermatitidis SLH14081]
  misc_feature (9)..(234): NCBI GI: 119490431 Blast Desc: HORMA domain protein [Neosartorya fischeri NRRL 181] gi|119411192|gb|EAW21135.1| HORMA domain protein [Neosartorya fischeri NRRL 181]
MSSSKAEEKDKSKVHKLSLKGSAKLVAEFFQYSIHTILFQRGVYPAEDFTAVKKYGLNMLVSADDQVRAYIKKIMSQLDRWMQRGKISKLVVVITDKDTGDHVERWQFDVQILASSSKSSKSSSSRTVPPSSSANENSSSSSSTAVDPSKTEAEIQAEIAALFRQITASVTFLPQLQGDCTFNVLVYADADSDVPVEWGDSDAKEIVNGERVQLRGFTTSSHRVDTLVSYRLGD

SEQ ID NO: 5925 - DNA, 5344 bp, Muscodor strobelii
  misc_feature: SGI EST ID NO. CUFF.15680.1
  misc_feature: Variant of the nucleotide sequence at SEQ ID NO 5923
cgaccttgttgacgacgggcaggatgcgcaggccctgggcgaaggcgaggtagaagttggcgacggtctgggcctggacgccctggctggcgtcgacgagcagcagggcgccgccgcagctggcgtaggagcgggtgacctcggcgcggaagtcgacgtggccgggggtgtcgacgaggtgcagcaggtagtcgagcccgtcggtgtggcggtacagcatggtgcacgtctgcgccttgaccgtgatgccgcgctcgcgctccacctcgagcgtgtcgaggatctgccggttggcctgcgacgccgcgatcgtgcccgtcgtctctagcagccggtccgacagcgtcgacttgccgtggtcgatgtgcgcgacgatgcagaagttgcggaaccgctcgatcgggatcgccgcgatgcgccgctccagctcgcccaccaccactttaccgttggcaacaccgcggctcagctgcagaggcacagatgcagatgcaaatgcagctgtgcatggtgtaggccgacaacgacgtgatgatgatgaagcgtggcatagcgaatgcaagctgcgagtactgcgagcagtactgcgaacagcactgccaactctactagctggggcagcagtggcggtggcggaggaagtgacctggcggagcagccatgatggtcgcatgagacatctgctacccatccattcaagctttgttggggatgcggcgctaagcttgtcagtcaagagaaaaagagaagagaaagaggcgatgtgatgatctcacttgatgacagccgcagaaaagccagctgcaatccatccatccatccattcatctgtccgtcctatcttatcagaaacactacctaccctgcaggtagctccccggagagcaggggcgttgtagagaggtacctactacaaacccattccgccgtcaccccgccagatactgcacctccaaagtaaacaaattaggtaaccttggggacttacactacctaacttatcatcgtcaccaaaaaaagacaccaacgacatccagttctctgccagtcaattcattgcacatatacatccaattgacttcgatacgaatcgtcagatcccccagcacagccacagccatgtcctcgtccaaagccgaagagaaggacaagtccaaagtccataagctgtcgctcaagggtagcgccaagctcgttgccgagttcttccaatactccatccacaccatcctcttccagaggggcgtctacccggccgaggacttcacggcggtgaagaagtacggcctcaacatgctcgtctcggccgacgaccaggtgcgcgcctacatcaagaagatcatgtcccagctcgaccgctggatgcagcgcggcaagatcagcaagctcgtcgtcgtcatcaccgacaaggacacgggcgaccacgtcgagcgctggcagttcgacgtccagatcctagcctcgtcatctaaatcttccaagtcctcatcctctaggaccgtgccaccgtcctcatcggcgaacgagaactcatcatcgtcgtcgtcgacggccgtggacccctccaagaccgaggccgagatccaggccgagatcgcggccctcttccgccagatcaccgcctccgtcaccttcctgccccagctgcagggcgactgcaccttcaacgtcctcgtctacgccgacgccgactcggacgtccccgtcgagtggggcgactcggacgccaaggagatcgtcaacggcgagagggtccagctgcgcggcttcaccacctcctcccaccgcgtcgacaccctcgtcagctaccgcctgggagactaggccgcgcacttgcaccgaggaacaacacttgtattcattgtatactagctccctacgtggatggattgcgtcgggcggaaagggcggaaataatgataacgatacgaaaagacgaagaagcaacagacacatgcacatgcaaacttggcggcgttgaggagtctgtctatctataatgcaggctacactggatatggccgagacttgtacatggcgcgagaagggatctgaacatgtaaatggcaacttgaacacgcatcgaggagatgaccatgtcaggctaggattcattcgtgaagataccaatcaagcccatacctccttcttgtacactgctccttcaggtctctgatatgccattctaccagagattggggttgtgcgagaagccatgctatgaaaacacatctatgatttgctcatcttgctcttcttttttcgccaggcatgccatgcttcgtaaatgctctcatttcttgcaccaagccaaacccggccccatcgaacattatgcgtcagtcactttcacgtcatcatgtctcctgcggccccttttcatcctcacgcgcggtggaagaaatagacatacgccgtcttcttcatctcctctatgtctccggcctccaccaccttctcgtcgttgaagagcacccatcgaggctccgtcgtatccagaagcttgcggatgaacgcaacgtagtgtctggagacaatgtcagcaaagcaacgcaaccatttaaatcacttcgcagccaaggaagggagccacgtacccagcgtggatgctcgtgcccttgtggcagacgatgcttcgcagctggaatctcgcagggagctccgccgtgccggccggcgcgctctccttcttctcgccgccactgctgtcatcgcctccgaagtcgccctgctcgtccggatggctgaacagccactccaccgccctctccatatcgccccccgtctccttcaaccctttgcgggcttggggtatactgaatcccatggcctggaacatggctatcttctccggatcgtctgccaccgacgacccacccgcagcggcctcgatctgcaatggctcgtcgatgtcggcgtcctccatgtgcgcaaacagccattccatggctgcgttggcatccgagttgcccgtcttgtagagcgccttctcacaccgcaccgccgggaaccccatggcgcccagctgatccatggcctcttggttcggcacgaacgccggcgtggccttgtcttcctcgggtagtagttcttcgctgggctgatggccgggcgacaagtatttatccagcgcgaagacatcatccccgacgataacggggacatccaccttgcgcggaacccagttctccaccgtcatctttcgcgcgttgaccacgagcgtcgtagggaatgtcttaaagagacttcgtttcaagaatccctccttgctcccgcatccaggacaggtcaactccaccatctcctctccggtgagacggtcaaggcactcttctaacgttaccggcttgtacgcctctccgccgtcttccgtagcaggcagtttctcgataggcacatcgatgaatacgttatcctgctcggtggacgagtagcggaccttcttgcagttgacgcactgcagtcgctgctccatgacaaaccggaaaggttgggttgggtctcgctgagaccctgtgtgaggcgatcgggtgatcagcttgacgagatgctggaggagttcgaaggagtcctgttggcgcatcgtcgagaactcagcgtggccgcgaccaatcaaatgtttcaacatgctaggcgccaaccctttctgatgaaccatgtcggcggagctttcggatgagaccacgtcgctatctggtttggagtagcggccggagagtagaccgtcggccatcttgcgaagctgcgtctcgagatcctgagctgggtcctccaccatgggaaggtcgacctcggggatattgtagcgttctcgaaaggcaggcaagtcaaagagacactgcaggatgctggcgagataacagctattgcccaagtttttcaaaccggtcaggttggggccgaacaggggtcggagttctctgccgtcctcggtggtcatagaaaactcccatcgcaagttctgctcgatctgcatctcggtcaagctcttctccgtcttgacttgatcggacagtatgatgccccagtgcgcaagatgcgtggccagatcaccgtccaagcgctcctcgtcgcactggtagcagtagacgtcggcggatccctcgggcgtaatggagccaagcttgacggcaacggcgtggtgagcttcggtggcgtgggcgaggccgtgagagttgcccccgacgccgccgaactgagcgcgaccgcagccgaggttcccacagacgagacagagccacaggttctccttcaggtcgcactgggagcagtggcccaggtcgccactctggatggtgcggctgtcgtgtgggtgcagcatgaggatgtgctcgcaggtggacatgtcctgctcccaggccttgacctcctcctggcgcgagaaggtgttggcgttgaggatggcgtcgacgacgggggcgagcttggggccggccttgtcgagctcggcggcgcactcgaggcacttgacggcggtggtgtagtcgtagcggtcggcgtcggtctcggcggcgatggccagcttggtcatcttggcggggggctcatccttgacgacctgcttgcgcgtgcggcggatgttgagggccagaggatggctccgggtgaggtggtgcagctgcgagtgggttcggaggccgacacatgcgccgttgaagcactggaggcagacatcgagcccctctggctcgtcctaggtgtccagttagccggacactcggacagaggaaggtcgatgaggtcttaaactaggggttgtgtacaatggagtcgaagcattgtgtgcagtcttcgcggtagacggactggacaggcgtgggaggcgtcaaggctgagcgcgcaaacgcgcatcagcaaaggcgaatcaagcttgtagatgtcggggcgtactcacttatagaatcgaggtgagggcacgccatggcgggcagcgagacagagagaggcggggctccccacggcgagttggaaggtgagaaacgacgacgacgatgggagtgacagtggaatgttgcgactttggggaaggaggaacgactctagagttgcaggcgctgatgcggatcaagttgagacctacagatctgccgtgacaaagcgggatgaagactgggctgcgatgaagcgccagctggggaaatgatgtagtacggttcgcaggcaaagaaaaagagaaactcaaatcatgacattggtcgtgatgtctgcatgcatgtatctcttgaccctagtagtgcacgggaagtttcaacggcgctgagccgcaggcagccaacgaggggcaacaaacgggcgacgttaatggccccagttccgtcataacagggctgatgagagaaatgcc

SEQ ID NO: 5926 - DNA, 692 bp, Muscodor strobelii
  misc_feature: SGI cDNA ID NO. 561702
  misc_feature: Reduced expression when VOC is produced
  misc_feature: Encodes the peptide sequence at SEQ ID NO 5927
atgggtagcagatgtctcatgcgaccatcatggctgctccgccaggtcacttcctccgccaccgccactgctgccccagctagtagagttggcagtgctgttcgcagtactgctcgcagtactcgcagcttgcattcgctatgccacgcttcatcatcatcacgtcgttgtcggcctacaccatgcacagctgcatttgcatctgcatctgtgcctctgcagctgagccgcggtgttgccaacggtaaagtggtggtgggcgagctggagcggcgcatcgcggcgatcccgatcgagcggttccgcaacttctgcatcgtcgcgcacatcgaccacggcaagtcgacgctgtcggaccggctgctagagacgacgggcacgatcgcggcgtcgcaggccaaccggcagatcctcgacacgctcgaggtggagcgcgagcgcggcatcacggtcaaggcgcagacgtgcaccatgctgtaccgccacaccgacgggctcgactacctgctgcacctcgtcgacacccccggccacgtcgacttccgcgccgaggtcacccgctcctacgccagctgcggcggcgccctgctgctcgtcgacgccagccagggcgtccaggcccagaccgtcgccaacttctacctcgccttcgcccagggcctgcgcatcctgcccgtcgtcaacaaggtcga

SEQ ID NO: 5927 - protein, 230 aa, Muscodor strobelii
  misc_feature: SGI Peptide ID NO. 561702
  misc_feature (99)..(230): Pfam Id: PF00009 Pfam Desc: Elongation factor Tu GTP binding domain
  misc_feature (88)..(230): NCBI GI: 85089814 Blast Desc: GTP-binding protein GUF1 [Neurospora crassa OR74A] gi|28919447|gb|EAA28886.1| GTP-binding protein GUF1 [Neurospora crassa OR74A]
  misc_feature (80)..(230): NCBI GI: 261196047 Blast Desc: GTP-binding protein LepA [Ajellomyces dermatitidis SLH14081] gi|239587560|gb|EEQ70203.1| GTP-binding protein LepA [Ajellomyces dermatitidis SLH14081] gi|239614511|gb|EEQ91498.1|
  misc_feature (88)..(230): NCBI GI: 145602935 Blast Desc: MGG_04686 [Magnaporthe grisea 70-15] gi|145011284|gb|EDJ95940.1| MGG_04686 [Magnaporthe grisea 70-15]
  misc_feature (12)..(230): NCBI GI: 226285561 Blast Desc: GTP-binding protein GUF1 [Paracoccidioides brasiliensis Pb01]
  misc_feature (88)..(230): NCBI GI: 154270756 Blast Desc: GTP-binding protein GUF1 [Ajellomyces capsulatus NAm1] gi|150409806|gb|EDN05246.1| GTP-binding protein GUF1 [Ajellomyces capsulatus NAm1]
  misc_feature (88)..(230): NCBI GI: 240274344 Blast Desc: GTP-binding protein [Ajellomyces capsulatus H143]
  misc_feature (88)..(230): NCBI GI: 225554973 Blast Desc: GTP-binding protein GUF1 [Ajellomyces capsulatus G186AR]
  misc_feature (76)..(230): NCBI GI: 258564809 Blast Desc: GTP-binding protein LepA [Uncinocarpus reesii 1704] gi|237906850|gb|EEP81251.1| GTP-binding protein LepA [Uncinocarpus reesii 1704]
  misc_feature (58)..(230): NCBI GI: 225678719 Blast Desc: GTP-binding protein GUF1 [Paracoccidioides brasiliensis Pb03]
  misc_feature (88)..(230): NCBI GI: 240107466 Blast Desc: GTP-binding protein GUF1, [Coccidioides posadasii C735 delta SOWgp]
  misc_feature (89)..(230): SWISSPROT Homolog: EC 2.7.7.4 Sulfate adenylyltransferase
  misc_feature: Useful for introducing or modulating the production of volatile compounds
MGSRCLMRPSWLLRQVTSSATATAAPASRVGSAVRSTARSTRSLHSLCHASSSSRRCRPTPCTAAFASASVPLQLSRGVANGKVVVGELERRIAAIPIERFRNFCIVAHIDHGKSTLSDRLLETTGTIAASQANRQILDTLEVERERGITVKAQTCTMLYRHTDGLDYLLHLVDTPGHVDFRAEVTRSYASCGGALLLVDASQGVQAQTVANFYLAFAQGLRILPVVNKV

SEQ ID NO: 5928 - DNA, 5249 bp, Muscodor strobelii; identical to SEQ ID NO: 5922
  misc_feature: SGI EST ID NO. CUFF.15679.0
  misc_feature: Variant of the nucleotide sequence at SEQ ID NO 5926

SEQ ID NO: 5929 - DNA, 3591 bp, Muscodor strobelii
  misc_feature: SGI cDNA ID NO. 561703
  misc_feature: Encodes the peptide sequence at SEQ ID NO 5930
atgttgggtaaactgttcaacctaacgtcaggcaccgccggaggcgcgtctactctcccgaactcccctagtatcaaggtgccacctgagtcgatgcaagaggaaatacatacgcgtagcctcttatttccagacactcatgcgctttttcaccgggatgaccagctcttccctttgccttcatcaaacacactacagccaggcgtgcagacgagcgctttcgattatgacggcgaggttgacctcgagatgcgtgatgtccgtgtcatcatcatgcaggatgcgctcggaaacgtgagcccttcgctgctgttcgatagccatccgggacctgcgcccgaaagaccagctgcgcagtccagtgcaagctcgtctcaatctatttctcaagattcgaagagaggccataattcctccaggaaaggcagtctcggccagatccctagaccgttggtgatacagcctggcagcccccagtctcggcagggcgctttcgacaggagaggctccattcagtcccgcaactacacattcgccgagactgaggctcagcgtgccgcaagggagtatcgtgaggagctcgcgagtttttccaactgcattttcgccaataccgaagtcatggcctataagggaacatcgacaaaagttcacatcatcccgagtgactctcgagtgacatccatacccagttcctacgcagctgatggacgtggatctctgggcaagtcaagtatgcgcggaagtcgactagcacagtcgtatgcaacagaaacaatgaatccgcatttcggaacaacgactcttcaaagtcggccgacagaacgaaagaaaatcctcgttactcgtctctttcccgtcaatcttccaagcgacgattcagaaacgcctcatgggttgacagaagatgccaccggatttccctttccgtactcgccagacgactccggaccgaaaagaaaaaagccaaaaccaattcccaaaagaacacctatgtatgccgtcgctctggttgtaccccttcctacaagcccaacgaacacggctggaacagctccaaagccgacacctcgagcctcaagttcctttactgaaccagacgccttttcttcatcgcttggatctgctcgccgagccggctggacaatgatcaatgcgggatacggcacggaatcgttcgaatcaagttataccgacgccgacgatcgcatggagttcataacacaacattgggatatcattatgagaatactgacccatctccaatcagtcgtggccagcgctttatttcctatgctcaaacaagcagaggtttctgttccagatccttacccagcgaatgcaccggggcggtcagcgtcgggacatggtcgacgtgaatctaacgcttctcagattaagcagcctaagcaatacgcgaaactcgtctcactacctcccaatgcgttgatgcaagagcaccaaatcgccgaagaagttgagaatgctcaactacggatcgttacgggcctttgtgccgcccgcgttgtcacgggtcaaggccggtggggtctttggagagaagaggctagatggattgcacgctgggccgggggcaaagaacaaggcttcttcttcttcaacctgctcactgggttccttgccacccatactgattggctacaagctctgagtccgatttggtacaggcgaaaatactatcaacaacagaaggccaaaggcgtggaagaaacttcgttgccatctcgcaccattgtcatctcgaacgataaaatggctgcacggaggctagtcttcttactttcagcatttctacctgcaaatcagcaactgccaactcttcgagcacaacggcctgctacttccgcgtcattcggcgcattaggccactctccgccgtcattaattgttcctataaataaggaagaatccttacggcgaaaaatcaatcgccgtcaaggccaaagaggtccatcgcatacacgtagcttcagcatccagtcttctgccacgacgagatcaatgacaggcatacccgcccagcttgcacatcttagcattgacagccaacagcacgagaggcgctcctctgactttttcaaaccagtccatctaccactggccgggagcgaccttaatactagaaaaagcagtgctgcaactacaaacaccgtgttggcagacgaggcagttgcacatttcgcctcgtcacagaggagtggtttaaaccgcatgattcgtccagagcaccgcggtagcatggctgccgatgatctcaagcggtcactcaagagagttgacagtcttggtcattcgagccgtggcagtgggcattctcgccaaagttcccgatggggcagcgtcatcagtgggttatggagctcgagacgacgcgactcggccgcgtcgacatcgcagactcccaacacactaggcctgtatgatagccctgttgggtcgccaaccaagactatgtcagttcaaaggaacaagcccgctgaaatggcgaaagaggtggataacatggcgcttgacccatccgtccctcttgggcagcacagggaaagtgaaaacgacccagatactcctcgtaacagggaaacaaaacctacagatccgcataccagaaccccagacccgtcgggcgcttttgaatcacctgtaaaaacttccatcaacatagatgatggcgttatcgatgtcgatgtaccttttccggactacctgacttcctttgagacagcagtgagttcaccgtcaagcagtggttatctatctacacccggtttgggtagtggactggatggttttgaacagctttcacgattagcaatcgatggcgatgcgcccctcaatgttgccggatggttacagagataccatccagattttacattgcaagcaattgctccacaaagggaccttcttgaccgagtccgcgattccctccaggccgagcctactccaatggtgcatccaaatgcgcttgcagaggaatggccgatggagcagtggattgatgtgagcagtgcaatcatagcggacacaaccaacttcactattaaaagaatacgttaccgtcgccttgtaaaaccgaaatctacgacggcgcggaatacaggcagttcctttaatccgtacagctcgtctgtgatgacaccagcattgtcaccatatgagcaacccatcgaggagaaatttgaggaagaagaactagtcaccttggatgaagccctgatcgacgctgtggagagggtcattgcgcaaaccaataattcaagccgtggaaattcggcgacttcctcgcggtcggtcagtaagcgtcgggaccggagtggtagtgaagcctctgagccagaggagatagcacctgagactcggttagacctcccggaagtgccccgtgttgagtgcaggacggtggttttgtctgccctcgggggtatcgttcaggatgtagcggatcagcgcgagagagagggtcaaaaccagacccaaaacgctaattacagtacgagtcgggagaaggagagcgccttgcgcggtgctgtgcgttcatggctcgaaaatgttgaattgggtgacgtttag

SEQ ID NO: 5930 - protein, 1196 aa, Muscodor strobelii
  misc_feature: SGI Peptide ID NO. 561703
  misc_feature (1)..(1194): NCBI GI: 171690574 Blast Desc: protein product [Podospora anserina] gi|170945235|emb|CAP71346.1| protein product [Podospora anserina]
  misc_feature (1)..(1189): NCBI GI: 261352549 Blast Desc: conserved [Verticillium albo-atrum VaMs.102]
  misc_feature (1)..(1195): NCBI GI: 39944304 Blast Desc: MGG_04163 [Magnaporthe grisea 70-15] gi|145014896|gb|EDJ99464.1| MGG_04163 [Magnaporthe grisea 70-15]
  misc_feature (1)..(1193): NCBI GI: 256727528 Blast Desc: [Nectria haematococca mpVI 77-13-4]
  misc_feature (1)..(1195): NCBI GI: 46136499 Blast Desc: FG09765.1 [Gibberella zeae PH-1]
  misc_feature (1)..(1194): NCBI GI: 116196060 Blast Desc: CHGG_04628 [Chaetomium globosum CBS 148.51] gi|88180541|gb|EAQ88009.1| CHGG_04628 [Chaetomium globosum CBS 148.51]
  misc_feature (1)..(1194): NCBI GI: 85107010 Blast Desc: NCU07707 [Neurospora crassa OR74A] gi|28923895|gb|EAA33057.1| [Neurospora crassa OR74A]
  misc_feature (1)..(1192): NCBI GI: 154317465 Blast Desc: BC1G_03084 [Botryotinia fuckeliana B05.10] gi|150844258|gb|EDN19451.1| BC1G_03084 [Botryotinia fuckeliana B05.10]
  misc_feature (30)..(1192): NCBI GI: 156049305 Blast Desc: SS1G_08359 [Sclerotinia sclerotiorum 1980] gi|154692758|gb|EDN92496.1| SS1G_08359 [Sclerotinia sclerotiorum 1980]
  misc_feature (1)..(1192): NCBI GI: 189206107 Blast Desc: conserved [Pyrenophora tritici-repentis Pt-1C-BFP] gi|187975481|gb|EDU42107.1| conserved [Pyrenophora tritici-repentis Pt-1C-BFP]
MLGKLFNLTSGTAGGASTLPNSPSIKVPPESMQEEIHTRSLLFPDTHALFHRDDQLFPLPSSNTLQPGVQTSAFDYDGEVDLEMRDVRVIIMQDALGNVSPSLLFDSHPGPAPERPAAQSSASSSQSISQDSKRGHNSSRKGSLGQIPRPLVIQPGSPQSRQGAFDRRGSIQSRNYTFAETEAQRAAREYREELASFSNCIFANTEVMAYKGTSTKVHIIPSDSRVTSIPSSYAADGRGSLGKSSMRGSRLAQSYATETMNPHFGTTTLQSRPTERKKILVTRLFPVNLPSDDSETPHGLTEDATGFPFPYSPDDSGPKRKKPKPIPKRTPMYAVALVVPLPTSPTNTAGTAPKPTPRASSSFTEPDAFSSSLGSARRAGWTMINAGYGTESFESSYTDADDRMEFITQHWDIIMRILTHLQSVVASALFPMLKQAEVSVPDPYPANAPGRSASGHGRRESNASQIKQPKQYAKLVSLPPNALMQEHQIAEEVENAQLRIVTGLCAARVVTGQGRWGLWREEARWIARWAGGKEQGFFFFNLLTGFLATHTDWLQALSPIWYRRKYYQQQKAKGVEETSLPSRTIVISNDKMAARRLVFLLSAFLPANQQLPTLRAQRPATSASFGALGHSPPSLIVPINKEESLRRKINRRQGQRGPSHTRSFSIQSSATTRSMTGIPAQLAHLSIDSQQHERRSSDFFKPVHLPLAGSDLNTRKSSAATTNTVLADEAVAHFASSQRSGLNRMIRPEHRGSMAADDLKRSLKRVDSLGHSSRGSGHSRQSSRWGSVISGLWSSRRRDSAASTSQTPNTLGLYDSPVGSPTKTMSVQRNKPAEMAKEVDNMALDPSVPLGQHRESENDPDTPRNRETKPTDPHTRTPDPSGAFESPVKTSINIDDGVIDVDVPFPDYLTSFETAVSSPSSSGYLSTPGLGSGLDGFEQLSRLAIDGDAPLNVAGWLQRYHPDFTLQAIAPQRDLLDRVRDSLQAEPTPMVHPNALAEEWPMEQWIDVSSAIIADTTNFTIKRIRYRRLVKPKSTTARNTGSSFNPYSSSVMTPALSPYEQPIEEKFEEEELVTLDEALIDAVERVIAQTNNSSRGNSATSSRSVSKRRDRSGSEASEPEEIAPETRLDLPEVPRVECRTVVLSALGGIVQDVADQREREGQNQTQNANYSTSREKESALRGAVRSWLENVELGDV

SEQ ID NO: 5931 - DNA, 6073 bp, Muscodor strobelii
  misc_feature: SGI EST ID NO. CUFF.14971.0
  misc_feature: Variant of the nucleotide sequence at SEQ ID NO 5929
atggtccagtccccaatctcccttaggtgagttatggtctatctcacctgtctccccaagataatatcagattcactggaaacaaagggcgggccggcttggtggtggccggccattagcattagagttgcgaggtggtgcaagaagcatagccatctgtttgccatggttgcagcgatcagaggcttgtcggctatcacttatgaggtccatgtagacgacggtctcggcccgcttgagccattttgagacttagtcaacctgttgagatagatgtcatctctgagagattccagtggagatcaatgcaacgaacaatgacaacctccttgacgcggttaaaaccagtgcttggattcgtgaggtagctgtacatgttgtggctgtaaggtttcgcgcacattcacatgctctctggcttggagctaggtgcatgtacaatactaagcgcctctcaccgccagtctcgacggtcttgcagccatgatgtatccatctgcaggaccctctgcaggaccctctgctagctccatccaaagaccctggtagaaggtcgcctcgactgcctgccgagactgccaacgagctcacacacacatctttacatacggcccctccagatctcatgcatgacagatgcgacaacgggcgcatgcgggcttggaagcttctgttaaccgttgaggcccgcaaccctcacaagggtgtcctctgccagctagtgcatcatagcgcatcgtagtgcatcgtgaccgcctaccgtcccgaaccaatcctctggaatcaatttcccaccgctctactgccgatagccaagttgcgaatgccaagtccacctcattgtcgcatccctcttttctcaccaggtcgccatcacttcttcttatcctacaaagtactcatacacctaatagtcaagactcgaaactgcagcccgccagtccaacgcgtggtaatgatacattttttatagtagtacttgcatgttgccgttgtgtccatgctagtgtaccaacatcaacacaggcttgaggtcttcagatctccgaatatcagacagacctatttcttaccaggcaatatctttcgttctgtaagacctgctgctttggttgttaatagttgacctctgttcattggtgctagagctagcctaaggcaatacttgagacgcctgccccgactgtgaacatttctgccgcatacatcgatcgtcaaacccccctggaagtgatccgctctcgttgtactgatattagaagagggaaagggttcaaggaccacctacaacgtcatacggctttcatccctccgatttatctgcttttcttcaccacgacttcttcaacaaatcggagctcggctgctgcatggcatctggaaccattatcgctcattgcattgaggctacgcgcctacgaatctgaggaacagaagcgattgtctggctatgacctatccgggaggagtaatctactcaaaattcgtctgaataaccaaacaacttctcggaccccttgaatctcctcattcgcgcctgtgactggatgcaaccaaccattgttcaaatcacgacgcgccacccatctcacacaatcctgggcttcctcgggatctcgtcattgctgtgtagcattggcaacacctgtctcttcatcactctgcgtatttgagaactccgaaagttgtcttcaatgtatacgcaaatagccatgaatcaaacagtgtgtgctcgcaatatgatgtgacactcttgaggattttctcaactcgcggctcgcaaagactgttccaacgtgtgcgttgccacactctgccaacaataaacatgttgggtaaactgttcaacctaacgtcaggcaccgccggaggcgcgtctactctcccgaactcccctagtatcaaggtgccacctgagtcgatgcaagaggaaatacatacgcgtagcctcttatttccagacactcatgcgctttttcaccgggatgaccagctcttccctttgccttcatcaaacacactacagccaggcgtgcagacgagcgctttcgattatgacggcgaggttgacctcgagatgcgtgatgtccgtgtcatcatcatgcaggatgcgctcggaaacgtgagcccttcgctgctgttcgatagccatccgggacctgcgcccgaaagaccagctgcgcagtccagtgcaagctcgtctcaatctatttctcaagattcgaagagaggccataattcctccaggaaaggcagtctcggccagatccctagaccgttggtgatacagcctggcagcccccagtctcggcagggcgctttcgacaggagaggctccattcagtcccgcaactacacattcgccgagactgaggctcagcgtgccgcaagggagtatcgtgaggagctcgcgagtttttccaactgcattttcgccaataccgaagtcatggcctataagggaacatcgacaaaagttcacatcatcccgagtgactctcgagtgacatccatacccagttcctacgcagctgatggacgtggatctctgggcaagtcaagtatgcgcggaagtcgactagcacagtcgtatgcaacagaaacaatgaatccgcatttcggaacaacgactcttcaaagtcggccgacagaacgaaagaaaatcctcgttactcgtctctttcccgtcaatcttccaagcgacgattcagaaacgcctcatgggttgacagaagatgccaccggatttccctttccgtactcgccagacgactccggaccgaaaagaaaaaagccaaaaccaattcccaaaagaacacctatgtatgccgtcgctctggttgtaccccttcctacaagcccaacgaacacggctggaacagctccaaagccgacacctcgagcctcaagttcctttactgaaccagacgccttttcttcatcgcttggatctgctcgccgagccggctggacaatgatcaatgcgggatacggcacggaatcgttcgaatcaagttataccgacgccgacgatcgcatggagttcataacacaacattgggatatcattatgagaatactgacccatctccaatcagtcgtggccagcgctttatttcctatgctcaaacaagcagaggtttctgttccagatccttacccagcgaatgcaccggggcggtcagcgtcgggacatggtcgacgtgaatctaacgcttctcagattaagcagcctaagcaatacgcgaaactcgtctcactacctcccaatgcgttgatgcaagagcaccaaatcgccgaagaagttgagaatgctcaactacggatcgttacgggcctttgtgccgcccgcgttgtcacgggtcaaggccggtggggtctttggagagaagaggctagatggattgcacgctgggccgggggcaaagaacaaggcttcttcttcttcaacctgctcactgggttccttgccacccatactgattggctacaagctctgagtccgatttggtacaggcgaaaatactatcaacaacagaaggccaaaggcgtggaagaaacttcgttgccatctcgcaccattgtcatctcgaacgataaaatggctgcacggaggctagtcttcttactttcagcatttctacctgcaaatcagcaactgccaactcttcgagcacaacggcctgctacttccgcgtcattcggcgcattaggccactctccgccgtcattaattgttcctataaataaggaagaatccttacggcgaaaaatcaatcgccgtcaaggccaaagaggtccatcgcatacacgtagcttcagcatccagtcttctgccacgacgagatcaatgacaggcatacccgcccagcttgcacatcttagcattgacagccaacagcacgagaggcgctcctctgactttttcaaaccagtccatctaccactggccgggagcgaccttaatactagaaaaagcagtgctgcaactacaaacaccgtgttggcagacgaggcagttgcacatttcgcctcgtcacagaggagtggtttaaaccgcatgattcgtccagagcaccgcggtagcatggctgccgatgatctcaagcggtcactcaagagagttgacagtcttggtcattcgagccgtggcagtgggcattctcgccaaagttcccgatggggcagcgtcatcagtgggttatggagctcgagacgacgcgactcggccgcgtcgacatcgcagactcccaacacactaggcctgtatgatagccctgttgggtcgccaaccaagactatgtcagttcaaaggaacaagcccgctgaaatggcgaaagaggtggataacatggcgcttgacccatccgtccctcttgggcagcacagggaaagtgaaaacgacccagatactcctcgtaacagggaaacaaaacctacagatccgcataccagaaccccagacccgtcgggcgcttttgaatcacctgtaaaaacttccatcaacatagatgatggcgttatcgatgtcgatgtaccttttccggactacctgacttcctttgagacagcagtgagttcaccgtcaagcagtggttatctatctacacccggtttgggtagtggactggatggttttgaacagctttcacgattagcaatcgatggcgatgcgcccctcaatgttgccggatggttacagagataccatccagattttacattgcaagcaattgctccacaaagggaccttcttgaccgagtccgcgattccctccaggccgagcctactccaatggtgcatccaaatgcgcttgcagaggaatggccgatggagcagtggattgatgtgagcagtgcaatcatagcggacacaaccaacttcactattaaaagaatacgttaccgtcgccttgtaaaaccgaaatctacgacggcgcggaatacaggcagttcctttaatccgtacagctcgtctgtgatgacaccagcattgtcaccatatgagcaacccatcgaggagaaatttgaggaagaagaactagtcaccttggatgaagccctgatcgacgctgtggagagggtcattgcgcaaaccaataattcaagccgtggaaattcggcgacttcctcgcggtcggtcagtaagcgtcgggaccggagtggtagtgaagcctctgagccagaggagatagcacctgagactcggttagacctcccggaagtgccccgtgttgagtgcaggacggtggttttgtctgccctcgggggtatcgttcaggatgtagcggatcagcgcgagagagagggtcaaaaccagacccaaaacgctaattacagtacgagtcgggagaaggagagcgccttgcgcggtgctgtgcgttcatggctcgaaaatgttgaattgggtgacgtttagtggcgaaatccctcaacttttgatttttgtggacgagaacggcatgatcatatcaatattggttttcacatcgttataccataccgtatggcacgatgtggtgtttttcatccttgtttgttgccatgtcctcatgaagaggctgattcatagaatgcgtgtttcatgtccaaccaagataccccttgagcattgtttgctttaacgattgatgatctagcgttgctttggtgctattttcccctaggcgattccagcatgcctattgctgagatcatttgctctatgctggcaaggcttgattcacgagcgcatgtgcctcgtaggaattgtacgaggggagttatgacgtctcatttgatgtttttaccattgggttaagtgtacatttcataaaacggcgtttgagatggtgacaaggattgctccgttgctttggacaccagtcccggtcagagaatggacatagagtccctcaaattaatcaactttcaaatcaaccatttttctagatatgcttgtgatgttcacggagccgtagcaaccataaagcttgaccttgggctaccagatatgcattgtgtccacaagacgctaggtaatatattgaacactttcttgatcacttgcacagcctaagctgatatattggcc

SEQ ID NO: 5932 - DNA, 1005 bp, Muscodor strobelii
  misc_feature: SGI cDNA ID NO. 561704
  misc_feature: Encodes the peptide sequence at SEQ ID NO 5933
atggcttttacaatgcattcccactcagggcagttttgccctgggcatgcgaagaacaacctggaagacatcatcaagtatgccatcggacttggctacaccaccatgggcttgaccgaacacatgccgcgcacaggacttgatgacctataccccgaggaactcgatgatccagaagtgtccctcgcagaactagctccacgacacgcagcatacctacaagaagcacaacgtctacaggccctctacgcccctcaaatctcgcttctcatcgggtttgagggtgaatggctacgtcctagctaccgcaatctggtcacagagctagcttctcatccagcaatcgactatttcatcggcagtcttcatcacgtaaatggcgtacccattgactatgacaaagactactacgcgcgcgctatggcgtctgtcggcatttcacccgatgtactcaccaatggcaccaccgctacagactctggtgagccccaagatgaggcgcgagagatagaaaacggagaggagcggatgtacgaacggtactacgaccagcaatatgagatgctcactgcactttgcccacgggtcgtcggccattttgacctcatccggctgatgagcgtggatcctggccgcgatgtccgccgctggcccggcgtctgggagcgtatcgagcggaacctgacattcgttgcgtcctatggcggctggttggagtgtaatagtagtgcgctacgcaaggggctttctgagccttatccatgccgggtcattgccgagaaatgggtatcccttggcggcaaattcacattatctgatgatagccacggtatcgtgcaactcggcaccaactatggccgcgccctcgattttcttgcctcactcaacgtcacgactctgtggactttccaaaagcaactgacaccacaagacacgcaagataagaatacacagactcctagactagtagatgttccggtggccctagacgacatccagtccgta

SEQ ID NO: 5933 - protein, 335 aa, Muscodor strobelii
  misc_feature: SGI Peptide ID NO. 561704
  misc_feature (3)..(279): Pfam Id: PF02811 Pfam Desc: PHP domain
  misc_feature (3)..(136): Pfam Id: PF02811 Pfam Desc: PHP domain
  misc_feature (1)..(296): NCBI GI: 261359705 Blast Desc: histidinol-phosphatase [Verticillium albo-atrum VaMs.102]
  misc_feature (1)..(327): NCBI GI: 256729825 Blast Desc: NECHADRAFT_47112 [Nectria haematococca mpVI 77-13-4]
  misc_feature (1)..(318): NCBI GI: 85108654 Blast Desc: NCU06974 [Neurospora crassa OR74A] gi|28924224|gb|EAA33378.1| NCU06974 [Neurospora crassa OR74A]
  misc_feature (1)..(334): NCBI GI: 46122515 Blast Desc: FG05635.1 [Gibberella zeae PH-1]
  misc_feature (5)..(305): NCBI GI: 39976067 Blast Desc: MGG_06040 [Magnaporthe grisea 70-15] gi|145011683|gb|EDJ96339.1| MGG_06040 [Magnaporthe grisea 70-15]
  misc_feature (1)..(334): NCBI GI: 171683361 Blast Desc: protein product [Podospora anserina] gi|170941640|emb|CAP67294.1| protein product [Podospora anserina]
  misc_feature (1)..(306): NCBI GI: 156049809 Blast Desc: SS1G_08612 [Sclerotinia sclerotiorum 1980] gi|154693010|gb|EDN92748.1| SS1G_08612 [Sclerotinia sclerotiorum 1980]
  misc_feature (1)..(305): NCBI GI: 154317727 Blast Desc: BC1G_03215 [Botryotinia fuckeliana B05.10] gi|150844389|gb|EDN19582.1| BC1G_03215 [Botryotinia fuckeliana B05.10]
  misc_feature (1)..(300): NCBI GI: 169784273 Blast Desc: [Aspergillus oryzae RIB40] gi|238508629|ref|XP_002385502.1| histidinol-phosphatase [Aspergillus flavus NRRL3357] gi|83775343|dbj|BAE65465.1| protein
  misc_feature (1)..(335): NCBI GI: 121714415 Blast Desc: histidinol-phosphatase [Aspergillus clavatus NRRL 1] gi|119402972|gb|EAW13392.1| histidinol-phosphatase [Aspergillus clavatus NRRL 1]
  misc_feature (1)..(305): SWISSPROT Homolog: EC 3.1.3.15 Histidinol-phosphatase
MAFTMHSHSGQFCPGHAKNNLEDIIKYAIGLGYTTMGLTEHMPRTGLDDLYPEELDDPEVSLAELAPRHAAYLQEAQRLQALYAPQISLLIGFEGEWLRPSYRNLVTELASHPAIDYFIGSLHHVNGVPIDYDKDYYARAMASVGISPDVLTNGTTATDSGEPQDEAREIENGEERMYERYYDQQYEMLTALCPRVVGHFDLIRLMSVDPGRDVRRWPGVWERIERNLTFVASYGGWLECNSSALRKGLSEPYPCRVIAEKWVSLGGKFTLSDDSHGIVQLGTNYGRALDFLASLNVTTLWTFQKQLTPQDTQDKNTQTPRLVDVPVALDDIQSV

SEQ ID NO: 5934 - DNA, 1333 bp, Muscodor strobelii
  misc_feature: SGI EST ID NO. CUFF.14968.0
  misc_feature: Variant of the nucleotide sequence at SEQ ID NO 5932
caaaaagttgaaatagttgcttcatatttagcagagaatttcacctattttaaatatttgggtttctgttattcaaaacttagaccacctactgttttcacgacttcaaggctcatacgtgagtccagtcttcgctgacacagtaagcgcacacagacaccgctcagacaaagaaacaacgctctctcactacaatggcttttacaatgcattcccactcagggcagttttgccctgggcatgcgaagaacaacctggaagacatcatcaagtatgccatcggacttggctacaccaccatgggcttgaccgaacacatgccgcgcacaggacttgatgacctataccccgaggaactcgatgatccagaagtgtccctcgcagaactagctccacgacacgcagcatacctacaagaagcacaacgtctacaggccctctacgcccctcaaatctcgcttctcatcgggtttgagggtgaatggctacgtcctagctaccgcaatctggtcacagagctagcttctcatccagcaatcgactatttcatcggcagtcttcatcacgtaaatggcgtacccattgactatgacaaagactactacgcgcgcgctatggcgtctgtcggcatttcacccgatgtactcaccaatggcaccaccgctacagactctggtgagccccaagatgaggcgcgagagatagaaaacggagaggagcggatgtacgaacggtactacgaccagcaatatgagatgctcactgcactttgcccacgggtcgtcggccattttgacctcatccggctgatgagcgtggatcctggccgcgatgtccgccgctggcccggcgtctgggagcgtatcgagcggaacctgacattcgttgcgtcctatggcggctggttggagtgtaatagtagtgcgctacgcaaggggctttctgagccttatccatgccgggtcattgccgagaaatgggtatcccttggcggcaaattcacattatctgatgatagccacggtatcgtgcaactcggcaccaactatggccgcgccctcgattttcttgcctcactcaacgtcacgactctgtggactttccaaaagcaactgacaccacaagacacgcaagataagaatacacagactcctagactagtagatgttccggtggccctagacgacatccagtccgtagtaagtaagtggccatgatggaagacccgaggaggcgcggctgcatcttagtcccggcatgtagatatagcgaatttagatatagaaaagatggattagagagctatacagttggcagatagacgaatgggcag

SEQ ID NO: 5935 - DNA, 2379 bp, Muscodor strobelii
  misc_feature: SGI cDNA ID NO. 561705
  misc_feature: Reduced expression when VOC is produced
  misc_feature: Encodes the peptide sequence at SEQ ID NO 5936
atgctgttcccagagagcgatgcgcctctcctcaaggcttggatcgtcaaccgtcttgccaataactcggacgccgacgccgacgttctcgccgactatgtgttggcgttattgcggcacgatggcgacacagagactatccggcgactgttcaacgacgagatcaaggactttctcggcgccgatgccccatcctttaccgaccaagtcttgcaggtagtcaagtaccgatcgtacatgccaggcgctccccctcctccgcctccgcctgctgccgttccaccttccactttcccacgcctgccatctcgaccagaagtgctcccgccagcgccctcgcataacagcttccagccaccctcttatgccgcccctactggccctagtgcctactcccacgactcttcacgcaagcgttcacacatggaacatgctgatgacgatgttgagatcatcctcaacaaccgaacgccctacaatgcccctttcaaacaaccgcgccgtgggggaggcttcgggccgcgaggttcaagaccagatgagccgtaccaacctgataactcttggggaccgcctccgttttttgcgccgactaaccaagctgcttttggagggactatgttgccctatggaatcgatatcagcacaattcatgagaatatccggcagctccaggcgttgatccccctagctgctggcctacctcagcctgtctattcaggcaccactattcctccaccacgcaagagaaaacaacggtgtagggactacgacaataagggattctgcgcgagaggcaatgattgcagataccatcacgttaacgagcccttatataatcctcggaatggatctgcaactggcgatggttggtttccgccacttgaccacaatgaccctagtcgaaacagtgaactaacacaattcttagaatatgatcccaacaacgcgtctttggtactgccttctatgcccttggacatgcctgcttcgcctatccctccaccgacgaatcgtcgcgaatctaagaaatccaggcgactcaaaggtggccgcgcagccttcgctcgcgacggccctatgcatgatcgatccaagactaaaattgttgttcaaaagatcccaagtggaaactataatgtggataatatccgcacctatttttcacagtttggcagcattaaccaagtttccttacaacatcaggaccgcacggcaactatagactttgagtcctgggaggcagcaaacgcggcttatagctcgccaaaggtgattttcgacaatcgttttgtcagggttttctggtataaggacgaaacaagcgaggagccactagcaaacgggaactctagcactcccacttttaatgaggctgcccagcccgagacggccaccccggctgagccggaattcgatttggaggagttccatcgcacactgcccgaagtccagaagacacacgaggaaaaattgaagaggcggcaagaatacgagcgtcagaaacaggaattagaagaggcccagagagagctcgacgagcgaaaagagaagactcaacgggagctccgggcgaagaaacgggcaaatggacaaaaagatcgctcatcatcaccaactgagattaaaactgaatctgcgaatggacactctggtacacagaccgagtatctacgtgcacaattagcagcgctcgagcaagaagcaacctcccttgggcttgaccctgatagtgtccatgaagatgctccaccatggttttcgaggggccgtggacgaggcagagtctaccgtggacgaggcgcgtaccacccgagagcagggagaggatggtatggatatcgaggaagaggaggtggttctggaggcagcatacatgccgcttatgcggcatattccctagatctgcgaccgaagactattgccatgacaggtgttgatttcacgatcccggcgaacaacgaggctctcaggcagtaccttttcgtatgtttgcactaccctccaagtgtatttggtactaatgatctccagactattggggacttcaaaggaatcgatgctgcacaagaaactacacttgtcgcgttccatgatcgtaaaactgctgagaagttctggtttggtgtctcgggccagaacttgatacccggcatcaaagagaaaatcgaacttgcgtggtccaagacgacaccgggatcattcaaggccacagatgatgatgtccagatgactagcactctcacgggcgaaaatgcggccaaggagaaagacgaagtgaatggcgacgaggatggcgagcttgaggatggtgagatagagattgaccaccgccaccatgatcacggagacatggactatgaggctggtgaatggtga

SEQ ID NO: 5936 - protein, 792 aa, Muscodor strobelii
  misc_feature: SGI Peptide ID NO. 561705
  misc_feature (249)..(275): Pfam Id: PF00642 Pfam Desc: Zinc finger C-x8-C-x5-C-x3-H type (and similar)
  misc_feature (1)..(754): NCBI GI: 164423817 Blast Desc: NCU07699 [Neurospora crassa OR74A] gi|157070244|gb|EAA33049.2| [Neurospora crassa OR74A]
  misc_feature (1)..(730): NCBI GI: 256727587 Blast Desc: NECHADRAFT_91128 [Nectria haematococca mpVI 77-13-4]
  misc_feature (1)..(777): NCBI GI: 156062434 Blast Desc: SS1G_01333 [Sclerotinia sclerotiorum 1980] gi|154696669|gb|EDN96407.1| SS1G_01333 [Sclerotinia sclerotiorum 1980]
  misc_feature (1)..(760): NCBI GI: 116196020 Blast Desc: CHGG_04608 [Chaetomium globosum CBS 148.51] gi|88180521|gb|EAQ87989.1| CHGG_04608 [Chaetomium globosum CBS 148.51]
  misc_feature (1)..(574): NCBI GI: 154302125 Blast Desc: BC1G_09743 [Botryotinia fuckeliana B05.10] gi|150855517|gb|EDN30709.1| BC1G_09743 [Botryotinia fuckeliana B05.10]
  misc_feature (254)..(792): NCBI GI: 39971663 Blast Desc: MGG_07147 [Magnaporthe grisea 70-15] gi|145019622|gb|EDK03850.1| MGG_07147 [Magnaporthe grisea 70-15]
  misc_feature (1)..(791): NCBI GI: 171690636 Blast Desc: protein product [Podospora anserina] gi|170945266|emb|CAP71377.1| protein product [Podospora anserina]
  misc_feature (1)..(758): NCBI GI: 238841020 Blast Desc: CCCH zinc finger and RRM domain-containing protein [Microsporum canis CBS 113480]
  misc_feature (1)..(791): NCBI GI: 119189981 Blast Desc: CIMG_05038 [Coccidioides immitis RS]
  misc_feature (1)..(791): NCBI GI: 240111022 Blast Desc: RNA recognition motif family protein [Coccidioides posadasii C735 delta SOWgp]
  misc_feature: Useful for introducing or modulating the production of volatile compounds
MLFPESDAPLLKAWIVNRLANNSDADADVLADYVLALLRHDGDTETIRRLFNDEIKDFLGADAPSFTDQVLQVVKYRSYMPGAPPPPPPPAAVPPSTFPRLPSRPEVLPPAPSHNSFQPPSYAAPTGPSAYSHDSSRKRSHMEHADDDVEIILNNRTPYNAPFKQPRRGGGFGPRGSRPDEPYQPDNSWGPPPFFAPTNQAAFGGTMLPYGIDISTIHENIRQLQALIPLAAGLPQPVYSGTTIPPPRKRKQRCRDYDNKGFCARGNDCRYHHVNEPLYNPRNGSATGDGWFPPLDHNDPSRNSELTQFLEYDPNNASLVLPSMPLDMPASPIPPPTNRRESKKSRRLKGGRAAFARDGPMHDRSKTKIVVQKIPSGNYNVDNIRTYFSQFGSINQVSLQHQDRTATIDFESWEAANAAYSSPKVIFDNRFVRVFWYKDETSEEPLANGNSSTPTFNEAAQPETATPAEPEFDLEEFHRTLPEVQKTHEEKLKRRQEYERQKQELEEAQRELDERKEKTQRELRAKKRANGQKDRSSSPTEIKTESANGHSGTQTEYLRAQLAALEQEATSLGLDPDSVHEDAPPWFSRGRGRGRVYRGRGAYHPRAGRGWYGYRGRGGGSGGSIHAAYAAYSLDLRPKTIAMTGVDFTIPANNEALRQYLFVCLHYPPSVFGTNDLQTIGDFKGIDAAQETTLVAFHDRKTAEKFWFGVSGQNLIPGIKEKIELAWSKTTPGSFKATDDDVQMTSTLTGENAAKEKDEVNGDEDGELEDGEIEIDHRHHDHGDMDYEAGEW

SEQ ID NO: 5937 - DNA, 2989 bp, Muscodor strobelii
  misc_feature: SGI EST ID NO. CUFF.15082.0
  misc_feature: Variant of the nucleotide sequence at SEQ ID NO 5935
agttgccagccggagcagcgacgcagctagaccggactgctagtagctacgccatcctcaggtcgcgatccaatgcagaggttgtacagcttgaagcattgagtcttcctcgacctcgttcgttagagacctgctcatgggccgacaatgcctactctctagacacagccgttacagctcgccaccgcagtgtcttcgacttgttcattcattttgtccttgcgccagctcctgtgcgcctcccaagccagagacaccacagtcgcatcccttcccttccttgcgccgcctcagtgcgtggcgagatactgagcttgccagatctaagaggcagtcgaagattgtgtcgccgcttctgccgcggcttgtcagcctcccgtcaccccatccaaaggctgtaagacgtgcatgtagtgcatcatgctgttcccagagagcgatgcgcctctcctcaaggcttggatcgtcaaccgtcttgccaataactcggacgccgacgccgacgttctcgccgactatgtgttggcgttattgcggcacgatggcgacacagagactatccggcgactgttcaacgacgagatcaaggactttctcggcgccgatgccccatcctttaccgaccaagtcttgcaggtagtcaagtaccgatcgtacatgccaggcgctccccctcctccgcctccgcctgctgccgttccaccttccactttcccacgcctgccatctcgaccagaagtgctcccgccagcgccctcgcataacagcttccagccaccctcttatgccgcccctactggccctagtgcctactcccacgactcttcacgcaagcgttcacacatggaacatgctgatgacgatgttgagatcatcctcaacaaccgaacgccctacaatgcccctttcaaacaaccgcgccgtgggggaggcttcgggccgcgaggttcaagaccagatgagccgtaccaacctgataactcttggggaccgcctccgttttttgcgccgactaaccaagctgcttttggagggactatgttgccctatggaatcgatatcagcacaattcatgagaatatccggcagctccaggcgttgatccccctagctgctggcctacctcagcctgtctattcaggcaccactattcctccaccacgcaagagaaaacaacggtgtagggactacgacaataagggattctgcgcgagaggcaatgattgcagataccatcacgttaacgagcccttatataatcctcggaatggatctgcaactggcgatgaatatgatcccaacaacgcgtctttggtactgccttctatgcccttggacatgcctgcttcgcctatccctccaccgacgaatcgtcgcgaatctaagaaatccaggcgactcaaaggtggccgcgcagccttcgctcgcgacggccctatgcatgatcgatccaagactaaaattgttgttcaaaagatcccaagtggaaactataatgtggataatatccgcacctatttttcacagtttggcagcattaaccaagtttccttacaacatcaggaccgcacggcaactatagactttgagtcctgggaggcagcaaacgcggcttatagctcgccaaaggtgattttcgacaatcgttttgtcagggttttctggtataaggacgaaacaagcgaggagccactagcaaacgggaactctagcactcccacttttaatgaggctgcccagcccgagacggccaccccggctgagccggaattcgatttggaggagttccatcgcacactgcccgaagtccagaagacacacgaggaaaaattgaagaggcggcaagaatacgagcgtcagaaacaggaattagaagaggcccagagagagctcgacgagcgaaaagagaagactcaacgggagctccgggcgaagaaacgggcaaatggacaaaaagatcgctcatcatcaccaactgagattaaaactgaatctgcgaatggacactctggtacacagaccgagtatctacgtgcacaattagcagcgctcgagcaagaagcaacctcccttgggcttgaccctgatagtgtccatgaagatgctccaccatggttttcgaggggccgtggacgaggcagagtctaccgtggacgaggcgcgtaccacccgagagcagggagaggatggtatggatatcgaggaagaggaggtggttctggaggcagcatacatgccgcttatgcggcatattccctagatctgcgaccgaagactattgccatgacaggtgttgatttcacgatcccggcgaacaacgaggctctcaggcagtaccttttcgtatgtttgcactaccctccaagtgtatttggtactaatgatctccagactattggggacttcaaaggaatcgatgctgcacaagaaactacacttgtcgcgttccatgatcgtaaaactgctgagaagttctggtttggtgtctcgggccagaacttgatacccggcatcaaagagaaaatcgaacttgcgtggtccaagacgacaccgggatcattcaaggccacagatgatgatgtccagatgactagcactctcacgggcgaaaatgcggccaaggagaaagacgaagtgaatggcgacgaggatggcgagcttgaggatggtgagatagagattgaccaccgccaccatgatcacggagacatggactatgaggctggtgaatggtgattgcggcacgtcgtgtacaactgcattttgggaccttgtaaatatatgtgtaagactgcgagcaaggaaagacgagggctatacgacaaagggagcatgaacggcaatacaccgacatttagcatggttcagtttgctgggagactagagataacttcaaaaacggtggtgatagcaaaggacttgcaaaggtgcatagtatcccaagaaagaagattaggattgcgaatcaagacttatattttctctgaat

SEQ ID NO: 5938 - DNA, 2316 bp, Muscodor strobelii
  misc_feature: SGI cDNA ID NO. 561706
  misc_feature: Reduced expression when VOC is produced
  misc_feature: Encodes the peptide sequence at SEQ ID NO 5939
atgctgttcccagagagcgatgcgcctctcctcaaggcttggatcgtcaaccgtcttgccaataactcggacgccgacgccgacgttctcgccgactatgtgttggcgttattgcggcacgatggcgacacagagactatccggcgactgttcaacgacgagatcaaggactttctcggcgccgatgccccatcctttaccgaccaagtcttgcaggtagtcaagtaccgatcgtacatgccaggcgctccccctcctccgcctccgcctgctgccgttccaccttccactttcccacgcctgccatctcgaccagaagtgctcccgccagcgccctcgcataacagcttccagccaccctcttatgccgcccctactggccctagtgcctactcccacgactcttcacgcaagcgttcacacatggaacatgctgatgacgatgttgagatcatcctcaacaaccgaacgccctacaatgcccctttcaaacaaccgcgccgtgggggaggcttcgggccgcgaggttcaagaccagatgagccgtaccaacctgataactcttggggaccgcctccgttttttgcgccgactaaccaagctgcttttggagggactatgttgccctatggaatcgatatcagcacaattcatgagaatatccggcagctccaggcgttgatccccctagctgctggcctacctcagcctgtctattcaggcaccactattcctccaccacgcaagagaaaacaacggtgtagggactacgacaataagggattctgcgcgagaggcaatgattgcagataccatcacgttaacgagcccttatataatcctcggaatggatctgcaactggcgatgaatatgatcccaacaacgcgtctttggtactgccttctatgcccttggacatgcctgcttcgcctatccctccaccgacgaatcgtcgcgaatctaagaaatccaggcgactcaaaggtggccgcgcagccttcgctcgcgacggccctatgcatgatcgatccaagactaaaattgttgttcaaaagatcccaagtggaaactataatgtggataatatccgcacctatttttcacagtttggcagcattaaccaagtttccttacaacatcaggaccgcacggcaactatagactttgagtcctgggaggcagcaaacgcggcttatagctcgccaaaggtgattttcgacaatcgttttgtcagggttttctggtataaggacgaaacaagcgaggagccactagcaaacgggaactctagcactcccacttttaatgaggctgcccagcccgagacggccaccccggctgagccggaattcgatttggaggagttccatcgcacactgcccgaagtccagaagacacacgaggaaaaattgaagaggcggcaagaatacgagcgtcagaaacaggaattagaagaggcccagagagagctcgacgagcgaaaagagaagactcaacgggagctccgggcgaagaaacgggcaaatggacaaaaagatcgctcatcatcaccaactgagattaaaactgaatctgcgaatggacactctggtacacagaccgagtatctacgtgcacaattagcagcgctcgagcaagaagcaacctcccttgggcttgaccctgatagtgtccatgaagatgctccaccatggttttcgaggggccgtggacgaggcagagtctaccgtggacgaggcgcgtaccacccgagagcagggagaggatggtatggatatcgaggaagaggaggtggttctggaggcagcatacatgccgcttatgcggcatattccctagatctgcgaccgaagactattgccatgacaggtgttgatttcacgatcccggcgaacaacgaggctctcaggcagtaccttttcgtatgtttgcactaccctccaagtgtatttggtactaatgatctccagactattggggacttcaaaggaatcgatgctgcacaagaaactacacttgtcgcgttccatgatcgtaaaactgctgagaagttctggtttggtgtctcgggccagaacttgatacccggcatcaaagagaaaatcgaacttgcgtggtccaagacgacaccgggatcattcaaggccacagatgatgatgtccagatgactagcactctcacgggcgaaaatgcggccaaggagaaagacgaagtgaatggcgacgaggatggcgagcttgaggatggtgagatagagattgaccaccgccaccatgatcacggagacatggactatgaggctggtgaatggtga

SEQ ID NO: 5939 - protein, 771 aa, Muscodor strobelii
  misc_feature: SGI Peptide ID NO. 561706
  misc_feature (249)..(275): Pfam Id: PF00642 Pfam Desc: Zinc finger C-x8-C-x5-C-x3-H type (and similar)
  misc_feature (1)..(733): NCBI GI: 164423817 Blast Desc: NCU07699 [Neurospora crassa OR74A] gi|157070244|gb|EAA33049.2| [Neurospora crassa OR74A]
  misc_feature (1)..(709): NCBI GI: 256727587 Blast Desc: NECHADRAFT_91128 [Nectria haematococca mpVI 77-13-4]
  misc_feature (1)..(756): NCBI GI: 156062434 Blast Desc: SS1G_01333 [Sclerotinia sclerotiorum 1980] gi|154696669|gb|EDN96407.1| SS1G_01333 [Sclerotinia sclerotiorum 1980]
  misc_feature (1)..(739): NCBI GI: 116196020 Blast Desc: CHGG_04608 [Chaetomium globosum CBS 148.51] gi|88180521|gb|EAQ87989.1| CHGG_04608 [Chaetomium globosum CBS 148.51]
  misc_feature (1)..(553): NCBI GI: 154302125 Blast Desc: BC1G_09743 [Botryotinia fuckeliana B05.10] gi|150855517|gb|EDN30709.1| BC1G_09743 [Botryotinia fuckeliana B05.10]
  misc_feature (1)..(770): NCBI GI: 171690636 Blast Desc: protein product [Podospora anserina] gi|170945266|emb|CAP71377.1| protein product [Podospora anserina]
  misc_feature (254)..(771): NCBI GI: 39971663 Blast Desc: MGG_07147 [Magnaporthe grisea 70-15] gi|145019622|gb|EDK03850.1| MGG_07147 [Magnaporthe grisea 70-15]
  misc_feature (1)..(737): NCBI GI: 238841020 Blast Desc: CCCH zinc finger and RRM domain-containing protein [Microsporum canis CBS 113480]
  misc_feature (1)..(770): NCBI GI: 119189981 Blast Desc: CIMG_05038 [Coccidioides immitis RS]
  misc_feature (1)..(770): NCBI GI: 240111022 Blast Desc: RNA recognition motif family protein [Coccidioides posadasii C735 delta SOWgp]
  misc_feature: Useful for introducing or modulating the production of volatile compounds
MLFPESDAPLLKAWIVNRLANNSDADADVLADYVLALLRHDGDTETIRRLFNDEIKDFLGADAPSFTDQVLQVVKYRSYMPGAPPPPPPPAAVPPSTFPRLPSRPEVLPPAPSHNSFQPPSYAAPTGPSAYSHDSSRKRSHMEHADDDVEIILNNRTPYNAPFKQPRRGGGFGPRGSRPDEPYQPDNSWGPPPFFAPTNQAAFGGTMLPYGIDISTIHENIRQLQALIPLAAGLPQPVYSGTTIPPPRKRKQRCRDYDNKGFCARGNDCRYHHVNEPLYNPRNGSATGDEYDPNNASLVLPSMPLDMPASPIPPPTNRRESKKSRRLKGGRAAFARDGPMHDRSKTKIVVQKIPSGNYNVDNIRTYFSQFGSINQVSLQHQDRTATIDFESWEAANAAYSSPKVIFDNRFVRVFWYKDETSEEPLANGNSSTPTFNEAAQPETATPAEPEFDLEEFHRTLPEVQKTHEEKLKRRQEYERQKQELEEAQRELDERKEKTQRELRAKKRANGQKDRSSSPTEIKTESANGHSGTQTEYLRAQLAALEQEATSLGLDPDSVHEDAPPWFSRGRGRGRVYRGRGAYHPRAGRGWYGYRGRGGGSGGSIHAAYAAYSLDLRPKTIAMTGVDFTIPANNEALRQYLFVCLHYPPSVFGTNDLQTIGDFKGIDAAQETTLVAFHDRKTAEKFWFGVSGQNLIPGIKEKIELAWSKTTPGSFKATDDDVQMTSTLTGENAAKEKDEVNGDEDGELEDGEIEIDHRHHDHGDMDYEAGEW

SEQ ID NO: 5940 - DNA, 2989 bp, Muscodor strobelii; identical to SEQ ID NO: 5937
  misc_feature: SGI EST ID NO. CUFF.15082.0
  misc_feature: Variant of the nucleotide sequence at SEQ ID NO 5938

SEQ ID NO: 5941 - DNA, 2268 bp, Muscodor strobelii
  misc_feature: SGI cDNA ID NO. 561707
  misc_feature: Reduced expression when VOC is produced
  misc_feature: Encodes the peptide sequence at SEQ ID NO 5942
atgctgttcccagagagcgatgcgcctctcctcaaggcttggatcgtcaaccgtcttgccaataactcggacgccgacgccgacgttctcgccgactatgtgttggcgttattgcggcacgatggcgacacagagactatccggcgactgttcaacgacgagatcaaggactttctcggcgccgatgccccatcctttaccgaccaagtcttgcaggtagtcaagtaccgatcgtacatgccaggcgctccccctcctccgcctccgcctgctgccgttccaccttccactttcccacgcctgccatctcgaccagaagtgctcccgccagcgccctcgcataacagcttccagccaccctcttatgccgcccctactggccctagtgcctactcccacgactcttcacgcaagcgttcacacatggaacatgctgatgacgatgttgagatcatcctcaacaaccgaacgccctacaatgcccctttcaaacaaccgcgccgtgggggaggcttcgggccgcgaggttcaagaccagatgagccgtaccaacctgataactcttggggaccgcctccgttttttgcgccgactaaccaagctgcttttggagggactatgttgccctatggaatcgatatcagcacaattcatgagaatatccggcagctccaggcgttgatccccctagctgctggcctacctcagcctgtctattcaggcaccactattcctccaccacgcaagagaaaacaacggtgtagggactacgacaataagggattctgcgcgagaggcaatgattgcagataccatcacgttaacgagcccttatataatcctcggaatggatctgcaactggcgatgaatatgatcccaacaacgcgtctttggtactgccttctatgcccttggacatgcctgcttcgcctatccctccaccgacgaatcgtcgcgaatctaagaaatccaggcgactcaaaggtggccgcgcagccttcgctcgcgacggccctatgcatgatcgatccaagactaaaattgttgttcaaaagatcccaagtggaaactataatgtggataatatccgcacctatttttcacagtttggcagcattaaccaagtttccttacaacatcaggaccgcacggcaactatagactttgagtcctgggaggcagcaaacgcggcttatagctcgccaaaggtgattttcgacaatcgttttgtcagggttttctggtataaggacgaaacaagcgaggagccactagcaaacgggaactctagcactcccacttttaatgaggctgcccagcccgagacggccaccccggctgagccggaattcgatttggaggagttccatcgcacactgcccgaagtccagaagacacacgaggaaaaattgaagaggcggcaagaatacgagcgtcagaaacaggaattagaagaggcccagagagagctcgacgagcgaaaagagaagactcaacgggagctccgggcgaagaaacgggcaaatggacaaaaagatcgctcatcatcaccaactgagattaaaactgaatctgcgaatggacactctggtacacagaccgagtatctacgtgcacaattagcagcgctcgagcaagaagcaacctcccttgggcttgaccctgatagtgtccatgaagatgctccaccatggttttcgaggggccgtggacgaggcagagtctaccgtggacgaggcgcgtaccacccgagagcagggagaggatggtatggatatcgaggaagaggaggtggttctggaggcagcatacatgccgcttatgcggcatattccctagatctgcgaccgaagactattgccatgacaggtgttgatttcacgatcccggcgaacaacgaggctctcaggcagtaccttttcactattggggacttcaaaggaatcgatgctgcacaagaaactacacttgtcgcgttccatgatcgtaaaactgctgagaagttctggtttggtgtctcgggccagaacttgatacccggcatcaaagagaaaatcgaacttgcgtggtccaagacgacaccgggatcattcaaggccacagatgatgatgtccagatgactagcactctcacgggcgaaaatgcggccaaggagaaagacgaagtgaatggcgacgaggatggcgagcttgaggatggtgagatagagattgaccaccgccaccatgatcacggagacatggactatgaggctggtgaatggtga

SEQ ID NO: 5942 - protein, 755 aa, Muscodor strobelii
  misc_feature: SGI Peptide ID NO. 561707
  misc_feature (249)..(275): Pfam Id: PF00642 Pfam Desc: Zinc finger C-x8-C-x5-C-x3-H type (and similar)
  misc_feature (1)..(717): NCBI GI: 164423817 Blast Desc: NCU07699 [Neurospora crassa OR74A] gi|157070244|gb|EAA33049.2| [Neurospora crassa OR74A]
  misc_feature (1)..(693): NCBI GI: 256727587 Blast Desc: NECHADRAFT_91128 [Nectria haematococca mpVI 77-13-4]
  misc_feature (1)..(740): NCBI GI: 156062434 Blast Desc: SS1G_01333 [Sclerotinia sclerotiorum 1980] gi|154696669|gb|EDN96407.1| SS1G_01333 [Sclerotinia sclerotiorum 1980]
  misc_feature (1)..(723): NCBI GI: 116196020 Blast Desc: CHGG_04608 [Chaetomium globosum CBS 148.51] gi|88180521|gb|EAQ87989.1| CHGG_04608 [Chaetomium globosum CBS 148.51]
  misc_feature (1)..(553): NCBI GI: 154302125 Blast Desc: BC1G_09743 [Botryotinia fuckeliana B05.10] gi|150855517|gb|EDN30709.1| BC1G_09743 [Botryotinia fuckeliana B05.10]
  misc_feature (254)..(755): NCBI GI: 39971663 Blast Desc: MGG_07147 [Magnaporthe grisea 70-15] gi|145019622|gb|EDK03850.1| MGG_07147 [Magnaporthe grisea 70-15]
  misc_feature (1)..(721): NCBI GI: 238841020 Blast Desc: CCCH zinc finger and RRM domain-containing protein [Microsporum canis CBS 113480]
  misc_feature (1)..(754): NCBI GI: 171690636 Blast Desc: protein product [Podospora anserina] gi|170945266|emb|CAP71377.1| protein product [Podospora anserina]
  misc_feature (1)..(754): NCBI GI: 119189981 Blast Desc: CIMG_05038 [Coccidioides immitis RS]
  misc_feature (1)..(754): NCBI GI: 240111022 Blast Desc: RNA recognition motif family protein [Coccidioides posadasii C735 delta SOWgp]
  misc_feature: Useful for introducing or modulating the production of volatile compounds
MLFPESDAPLLKAWIVNRLANNSDADADVLADYVLALLRHDGDTETIRRLFNDEIKDFLGADAPSFTDQVLQVVKYRSYMPGAPPPPPPPAAVPPSTFPRLPSRPEVLPPAPSHNSFQPPSYAAPTGPSAYSHDSSRKRSHMEHADDDVEIILNNRTPYNAPFKQPRRGGGFGPRGSRPDEPYQPDNSWGPPPFFAPTNQAAFGGTMLPYGIDISTIHENIRQLQALIPLAAGLPQPVYSGTTIPPPRKRKQRCRDYDNKGFCARGNDCRYHHVNEPLYNPRNGSATGDEYDPNNASLVLPSMPLDMPASPIPPPTNRRESKKSRRLKGGRAAFARDGPMHDRSKTKIVVQKIPSGNYNVDNIRTYFSQFGSINQVSLQHQDRTATIDFESWEAANAAYSSPKVIFDNRFVRVFWYKDETSEEPLANGNSSTPTFNEAAQPETATPAEPEFDLEEFHRTLPEVQKTHEEKLKRRQEYERQKQELEEAQRELDERKEKTQRELRAKKRANGQKDRSSSPTEIKTESANGHSGTQTEYLRAQLAALEQEATSLGLDPDSVHEDAPPWFSRGRGRGRVYRGRGAYHPRAGRGWYGYRGRGGGSGGSIHAAYAAYSLDLRPKTIAMTGVDFTIPANNEALRQYLFTIGDFKGIDAAQETTLVAFHDRKTAEKFWFGVSGQNLIPGIKEKIELAWSKTTPGSFKATDDDVQMTSTLTGENAAKEKDEVNGDEDGELEDGEIEIDHRHHDHGDMDYEAGEW

SEQ ID NO: 5943 - DNA, 2989 bp, Muscodor strobelii; identical to SEQ ID NO: 5937
  misc_feature: SGI EST ID NO. CUFF.15082.0
  misc_feature: Variant of the nucleotide sequence at SEQ ID NO 5941

SEQ ID NO: 5944 - DNA, 1320 bp, Muscodor strobelii
  misc_feature: SGI cDNA ID NO. 561708
  misc_feature: Encodes the peptide sequence at SEQ ID NO 5945
atgactgccctcaagctttcttcgaagcaaaagctgattgctgtcatttgcatctcattcagtttcttcattgctgaaattgcagttgcattctacaccaagtccttggctctgctggcagatgctttccattatcttaacgatctcatcggtttcgtaattgcacttgccgctattctggtctcggaacgagccaagtcaccacaaaatttctcctttggctgggcgcgtgcgcagctcctcggcgctttcttcaatggtgtctttcttctcgcactcggcttgtccatactgatccagtctattgagagattcattacccttcagcatgtggaaaatcctaagctggttctcgtaatcggatccgtgggccttggcctgaatattctcagtgcaatcgtgctgtatgccatgtgttttccatcttcgggccatgatcatggaggacatgaccatggccatggccacggtcacggtcacggtcacgcccattcccatgctcacgaatcagaggtagccggccatagccacagccacgttaatatcgaggcagctatcccagtcgtacatagctctagtgacgacgtggttctcacccctataggagcgcactcggagcaccgacacacaatcatcacactacaagctcccggtcgcgatctcggcatcatgggagtacttatccatgtcattggcgacgcactgaataaccttgctgtcattatcgccgcgctcatcatttggctgacgcattctccggcacgatactacgctgacccgagtgtttcggcagccatctccattttgattctactatcgtctatcccgttagttaagaacagtgggaagatattgatgcagactgcgcctcttggagttgacatggaggacgtgagacatgatttggaaaagataccaggtatccaatcagttcacgagctgcacatatggcgtctcgaccagaagaaggccatcgcatcagcacacattgtcgtctccaatgaagatatgaccgagttcatggaacaagccaagacggttcaagagtgcctccatgcttatggaatccactcagcaaccctacagccagagctggctaccgctcgtcaatctacggtaaatatcaacaaccaggacacaggtgcagctgatgctgctgaaacagagggaactcaaacccatggacctgcaaatgtgcgtgccgaggtagccgcgccgcttagaagacgacgcactgatggctcggcttgtcgaattgcttgcggaaacttgtgcgaaaacctcacatgctgcaatactactggtagtatgcgaatgtaa

SEQ ID NO: 5945 - protein, 439 aa, Muscodor strobelii
  misc_feature: SGI Peptide ID NO. 561708
  misc_feature (12)..(370): Pfam Id: PF01545 Pfam Desc: Cation efflux family
  misc_feature (4)..(432): NCBI GI: 169599527 Blast Desc: SNOG_02584 [Phaeosphaeria nodorum SN15] gi|111068195|gb|EAT89315.1| SNOG_02584 [Phaeosphaeria nodorum SN15]
  misc_feature (6)..(437): NCBI GI: 146324880 Blast Desc: cation diffusion facilitator family metal ion transporter, [Aspergillus fumigatus Af293] gi|129556613|gb|EAL86816.2| cation diffusion facilitator family
  misc_feature (6)..(437): NCBI GI: 119483160 Blast Desc: metal ion resistance protein/transporter (Zrc1), [Neosartorya fischeri NRRL 181] gi|119409763|gb|EAW19711.1| metal ion resistance protein/transporter (Zrc1), [Neosartorya fischeri
  misc_feature (6)..(431): NCBI GI: 212533093 Blast Desc: cation diffusion facilitator family metal ion transporter, [Penicillium marneffei ATCC 18224] gi|210072067|gb|EEA26156.1| cation diffusion facilitator family
  misc_feature (1)..(431): NCBI GI: 226288063 Blast Desc: zinc transporter 1 [Paracoccidioides brasiliensis Pb18]
  misc_feature (11)..(431): NCBI GI: 189191884 Blast Desc: cation efflux system protein czcD [Pyrenophora tritici-repentis Pt-1C-BFP] gi|187973887|gb|EDU41386.1| cation efflux system protein czcD [Pyrenophora tritici-repentis
  misc_feature (3)..(431): NCBI GI: 242799297 Blast Desc: cation diffusion facilitator family metal ion transporter, [Talaromyces stipitatus ATCC 10500] gi|218716694|gb|EED16115.1| cation diffusion facilitator family
  misc_feature (1)..(431): NCBI GI: 239610939 Blast Desc: conserved [Ajellomyces dermatitidis ER-3]
  misc_feature (1)..(431): NCBI GI: 261206188 Blast Desc: conserved [Ajellomyces dermatitidis SLH14081] gi|239592890|gb|EEQ75471.1| conserved [Ajellomyces dermatitidis SLH14081]
  misc_feature (4)..(398): NCBI GI: 46136487 Blast Desc: FG09759.1 [Gibberella zeae PH-1]
MTALKLSSKQKLIAVICISFSFFIAEIAVAFYTKSLALLADAFHYLNDLIGFVIALAAILVSERAKSPQNFSFGWARAQLLGAFFNGVFLLALGLSILIQSIERFITLQHVENPKLVLVIGSVGLGLNILSAIVLYAMCFPSSGHDHGGHDHGHGHGHGHGHAHSHAHESEVAGHSHSHVNIEAAIPVVHSSSDDVVLTPIGAHSEHRHTIITLQAPGRDLGIMGVLIHVIGDALNNLAVIIAALIIWLTHSPARYYADPSVSAAISILILLSSIPLVKNSGKILMQTAPLGVDMEDVRHDLEKIPGIQSVHELHIWRLDQKKAIASAHIVVSNEDMTEFMEQAKTVQECLHAYGIHSATLQPELATARQSTVNINNQDTGAADAAETEGTQTHGPANVRAEVAAPLRRRRTDGSACRIACGNLCENLTCCNTTGSMRM

SEQ ID NO: 5946 - DNA, 943 bp, Muscodor strobelii
  misc_feature: SGI EST ID NO. CUFF.14974.0
  misc_feature: Variant of the nucleotide sequence at SEQ ID NO 5944
ccatgatcatggaggacatgaccatggccatggccacggtcacggtcacggtcacgcccattcccatgctcacgaatcagaggtagccggccatagccacagccacgttaatatcgaggcagctatcccagtcgtacatagctctagtgacgacgtggttctcacccctataggagcgcactcggagcaccgacacacaatcatcacactacaagctcccggtcgcgatctcggcatcatgggagtacttatccatgtcattggcgacgcactgaataaccttgctgtcattatcgccgcgctcatcatttggctgacgcattctccggcacgatactacgctgacccgagtgtttcggcagccatctccattttgattctactatcgtctatcccgttagttaagaacagtgggaagatattgatgcagactgcgcctcttggagttgacatggaggacgtgagacatgatttggaaaagataccaggtatccaatcagttcacgagctgcacatatggcgtctcgaccagaagaaggccatcgcatcagcacacattgtcgtctccaatgaagatatgaccgagttcatggaacaagccaagacggttcaagagtgcctccatgcttatggaatccactcagcaaccctacagccagagctggctaccgctcgtcaatctacggtaaatatcaacaaccaggacacaggtgcagctgatgctgctgaaacagagggaactcaaacccatggacctgcaaatgtgcgtgccgaggtagccgcgccgcttagaagacgacgcactgatggctcggcttgtcgaattgcttgcggaaacttgtgcgaaaacctcacatgctgcaatactactggtagtatgcgaatgtaaatggtcgtgatgatcgccattgcacttgataagagctccgtagataatgcacga

SEQ ID NO: 5947 - DNA, 1338 bp, Muscodor strobelii
  misc_feature: SGI cDNA ID NO. 561709
  misc_feature: Encodes the peptide sequence at SEQ ID NO 5948
atgactgccctcaagctttcttcgaagcaaaagctgattgctgtcatttgcatctcattcagtttcttcattgctgaaattgcagttgcattctacaccaagtccttggctctgctggcagatgctttccattatcttaacgatctcatcggtttcgtaattgcacttgccgctattctggtctcggaacgagccaagtcaccacaaaatttctcctttggctgggcgcgtgcgcagctcctcggcgctttcttcaatggtgtctttcttctcgcactcggcttgtccatactgatccagtctattgagagattcattacccttcagcatgtggaaaatcctaagctggttctcgtaatcggatccgtgggccttggcctgaatattctcagtgcaatcgtgctgtatgccatgtgttttccatcttcgtcatatcaacgacaaataaacccgctgctatataccgagagaaacaagcagcagaattctaacatgtttactgtaggggccatgatcatggaggacatgaccatggccatggccacggtcacggtcacggtcacgcccattcccatgctcacgaatcagagctctagtgacgacgtggttctcacccctataggagcgcactcggagcaccgacacacaatcatcacactacaagctcccggtcgcgatctcggcatcatgggagtacttatccatgtcattggcgacgcactgaataaccttgctgtcattatcgccgcgctcatcatttggctgacgcattctccggcacgatactacgctgacccgagtgtttcggcagccatctccattttgattctactatcgtctatcccgttagttaagaacagtgggaagatattgatgcagactgcgcctcttggagttgacatggaggacgtgagacatgatttggaaaagataccaggtatccaatcagttcacgagctgcacatatggcgtctcgaccagaagaaggccatcgcatcagcacacattgtcgtctccaatgaagatatgaccgagttcatggaacaagccaagacggttcaagagtgcctccatgcttatggaatccactcagcaaccctacagccagagctggctaccgctcgtcaatctacggtaaatatcaacaaccaggacacaggtgcagctgatgctgctgaaacagagggaactcaaacccatggacctgcaaatgtgcgtgccgaggtagccgcgccgcttagaagacgacgcactgatggctcggcttgtcgaattgcttgcggaaacttgtgcgaaaacctcacatgctgcaatactactggtagtatgcgaatgtaa

SEQ ID NO: 5948 - protein, 445 aa, Muscodor strobelii
  misc_feature: SGI Peptide ID NO. 561709
  misc_feature (12)..(376): Pfam Id: PF01545 Pfam Desc: Cation efflux family
  misc_feature (225)..(376): Pfam Id: PF01545 Pfam Desc: Cation efflux family
  misc_feature (12)..(135): Pfam Id: PF01545 Pfam Desc: Cation efflux family
  misc_feature (4)..(438): NCBI GI: 169599527 Blast Desc: SNOG_02584 [Phaeosphaeria nodorum SN15] gi|111068195|gb|EAT89315.1| SNOG_02584 [Phaeosphaeria nodorum SN15]
  misc_feature (6)..(443): NCBI GI: 119483160 Blast Desc: metal ion resistance protein/transporter (Zrc1), [Neosartorya fischeri NRRL 181] gi|119409763|gb|EAW19711.1| metal ion resistance protein/transporter (Zrc1), [Neosartorya fischeri
  misc_feature (6)..(443): NCBI GI: 146324880 Blast Desc: cation diffusion facilitator family metal ion transporter, [Aspergillus fumigatus Af293] gi|129556613|gb|EAL86816.2| cation diffusion facilitator family
  misc_feature (3)..(437): NCBI GI: 212533093 Blast Desc: cation diffusion facilitator family metal ion transporter, [Penicillium marneffei ATCC 18224] gi|210072067|gb|EEA26156.1| cation diffusion facilitator family
  misc_feature (1)..(437): NCBI GI: 226288063 Blast Desc: zinc transporter 1 [Paracoccidioides brasiliensis Pb18]
  misc_feature (11)..(437): NCBI GI: 189191884 Blast Desc: cation efflux system protein czcD [Pyrenophora tritici-repentis Pt-1C-BFP] gi|187973887|gb|EDU41386.1| cation efflux system protein czcD [Pyrenophora tritici-repentis
  misc_feature (1)..(437): NCBI GI: 239610939 Blast Desc: conserved [Ajellomyces dermatitidis ER-3]
  misc_feature (1)..(437): NCBI GI: 261206188 Blast Desc: conserved [Ajellomyces dermatitidis SLH14081] gi|239592890|gb|EEQ75471.1| conserved [Ajellomyces dermatitidis SLH14081]
  misc_feature (3)..(437): NCBI GI: 242799297 Blast Desc: cation diffusion facilitator family metal ion transporter, [Talaromyces stipitatus ATCC 10500] gi|218716694|gb|EED16115.1| cation diffusion facilitator family
  misc_feature (4)..(388): NCBI GI: 46136487 Blast Desc: FG09759.1 [Gibberella zeae PH-1]
MTALKLSSKQKLIAVICISFSFFIAEIAVAFYTKSLALLADAFHYLNDLIGFVIALAAILVSERAKSPQNFSFGWARAQLLGAFFNGVFLLALGLSILIQSIERFITLQHVENPKLVLVIGSVGLGLNILSAIVLYAMCFPSSSYQRQINPLLYTERNKQQNSNMFTVGAMIMEDMTMAMATVTVTVTPIPMLTNQSSSDDVVLTPIGAHSEHRHTIITLQAPGRDLGIMGVLIHVIGDALNNLAVIIAALIIWLTHSPARYYADPSVSAAISILILLSSIPLVKNSGKILMQTAPLGVDMEDVRHDLEKIPGIQSVHELHIWRLDQKKAIASAHIVVSNEDMTEFMEQAKTVQECLHAYGIHSATLQPELATARQSTVNINNQDTGAADAAETEGTQTHGPANVRAEVAAPLRRRRTDGSACRIACGNLCENLTCCNTTGSMRM

SEQ ID NO: 5949 - DNA, 943 bp, Muscodor strobelii; identical to SEQ ID NO: 5946
  misc_feature: SGI EST ID NO. CUFF.14974.0
  misc_feature: Variant of the nucleotide sequence at SEQ ID NO 5947

SEQ ID NO: 5950 - DNA, 1092 bp, Muscodor strobelii
  misc_feature: SGI cDNA ID NO. 561710
  misc_feature: Encodes the peptide sequence at SEQ ID NO 5951
atgcgctcctcttttccgtaccaagctacagtactctccagttattcaacgcaaatggatgcgattaagaatgccatcggtgagaatttcggcggaccggcgtcgaagctgtccacgcaccagttcagtctagatgatgtgccagacctaagtgacaaggtagcagttgtcacaggcggtagtgaaggcattgggtatggctgtacccacaccttgctgagacacaacattgccagggtctatattctgtcagtttccgaagaagtcgtgaagaatacgaaagcggccattgcagatgagcttgggaagagtgccgcagacaaaacgaaatggtaccagtgcgacctggcagactggaagaagaccaaggatgtagctgaagagattaagaaggataccgatagactcgacatcctgatcaacaacgccgctcgtggtatcatgacataccaactcacggattacggagttgaccgacacatggcactaaatcacatgggccacgtggtcttgacttctcaccttcttccactgctcaagaagacagcagagaatggccacgtcgtacgcatatcaaaccaagcgagcaacgcgcatcaatctacacccagcgataccaggttcgagaccttggacgagctgaaccaagatttggggcctatggcgcagtacggacgaagcaagcttgcaggcattctatatgcaagatactttgctagaaaagtgacacaagcaggccatccaaatgtgttgatgaatgccacgcaccctggctttgtcagctcgaagatgagcaaggaggacatcctcgaaccgtatccattagcaggttacgccatggcggtaggcatggaagcgttcaagaaagatcagtttcaaggtgcagtaccgaccatgtatgcggtaacagcaaccaaggagtccggacagtatatctgtccaccagccgtgccggagtcgggcaacgagctagcccaggacgaggcgttagctgaccggctcatggagctgacgagaaaggttgtgatgcagaagacaagacgcgagtcggcggatcaggggtgtccattcgacgacctggttcttcactag

SEQ ID NO: 5951 - protein, 363 aa, Muscodor strobelii
  misc_feature: SGI Peptide ID NO. 561710
  misc_feature (53)..(212): Pfam Id: PF00106 Pfam Desc: short chain dehydrogenase
  misc_feature (53)..(144): Pfam Id: PF00106 Pfam Desc: short chain dehydrogenase
  misc_feature (19)..(363): NCBI GI: 116205579 Blast Desc: CHGG_10673 [Chaetomium globosum CBS 148.51] gi|88176801|gb|EAQ84269.1| CHGG_10673 [Chaetomium globosum CBS 148.51]
  misc_feature (19)..(363): NCBI GI: 171677045 Blast Desc: protein product [Podospora anserina] gi|170936590|emb|CAP61249.1| protein product [Podospora anserina]
  misc_feature (19)..(345): NCBI GI: 46115342 Blast Desc: FG03513.1 [Gibberella zeae PH-1]
  misc_feature (6)..(363): NCBI GI: 3023397 Blast Desc: BLI4_NEUCR RecName: Full= oxidoreductase bli-4, mitochondrial; Flags: Precursor gi|1620435|emb|CAA61670.1| bli-4 protein [Neurospora crassa] gi|9453825|emb|CAB99393.1| alcohol
  misc_feature (19)..(357): NCBI GI: 189195138 Blast Desc: retinol dehydrogenase 12 [Pyrenophora tritici-repentis Pt-1C-BFP] gi|187979786|gb|EDU46412.1| retinol dehydrogenase 12 [Pyrenophora tritici-repentis Pt-1C-BFP]
  misc_feature (6)..(363): NCBI GI: 164423375 Blast Desc: NCU08699 [Neurospora crassa OR74A] gi|157070065|gb|EAA34324.2| conserved [Neurospora crassa OR74A]
  misc_feature (19)..(358): NCBI GI: 154290428 Blast Desc: BC1G_15551 [Botryotinia fuckeliana B05.10] gi|150847722|gb|EDN22915.1| BC1G_15551 [Botryotinia fuckeliana B05.10]
  misc_feature (19)..(359): NCBI GI: 169597747 Blast Desc: SNOG_01661 [Phaeosphaeria nodorum SN15] gi|111070190|gb|EAT91310.1| SNOG_01661 [Phaeosphaeria nodorum SN15]
  misc_feature (23)..(359): NCBI GI: 256725320 Blast Desc: NECHADRAFT_83083 [Nectria haematococca mpVI 77-13-4]
  misc_feature (19)..(271): NCBI GI: 261357128 Blast Desc: retinol dehydrogenase [Verticillium albo-atrum VaMs.102]
  misc_feature (49)..(322): SWISSPROT Homolog: EC 1.1.1.100 3-oxoacyl-[acyl-carrier-protein] reductase
MRSSFPYQATVLSSYSTQMDAIKNAIGENFGGPASKLSTHQFSLDDVPDLSDKVAVVTGGSEGIGYGCTHTLLRHNIARVYILSVSEEVVKNTKAAIADELGKSAADKTKWYQCDLADWKKTKDVAEEIKKDTDRLDILINNAARGIMTYQLTDYGVDRHMALNHMGHVVLTSHLLPLLKKTAENGHVVRISNQASNAHQSTPSDTRFETLDELNQDLGPMAQYGRSKLAGILYARYFARKVTQAGHPNVLMNATHPGFVSSKMSKEDILEPYPLAGYAMAVGMEAFKKDQFQGAVPTMYAVTATKESGQYICPPAVPESGNELAQDEALADRLMELTRKVVMQKTRRESADQGCPFDDLVLH

SEQ ID NO: 5952 - DNA, 1095 bp, Muscodor strobelii
  misc_feature: SGI cDNA ID NO. 561711
  misc_feature: Encodes the peptide sequence at SEQ ID NO 5953
atgatgaaatatgatgccgaccatcgcaagaaatccttccgtccggagaggattaaccttcattatgatcgacttcataacccggataactgttttcatatccgcttagaatggatgaatgtgactgccaagctcatcgaggatgcgttgaagaattggggcgccattgccagcacacatgggcttcgtctagttgaagtacccatcaccgaagcttgcaggattaatgagataaatcctttcagacgaccattccggttcaaacttgcacttccgccgccgacacaacgaccgtcgacgtattacgattcggattcattcagcccgcagccacaaccagcgaaatatttctatcatattgctcttcttaaaaagtttgactacgtgctcgactacgaagccgccaataatttcccaagtaatgtagatgtgagctattcgtggggaaagccagacttcaagtactcacagtatatacaccgctcgggggccacaatggtagaaatcacagatgagggcgactttctcgtcgttgctaatcgaatctataccaacagagtcgtggcacagcaaaatcatacacacatgcgccctgaaccgacacccaacgaccgagtgggtagactattgagtagcagtcatgcatatacgaatcacggtgctgttgaaactgcgccagttgcatctcccctgacacgacccgtcctttttgcaccttcaggcgccagagtactacctctggacgcgtcaccgtcacctgcccgcaatatgcctatggcaagatccggggtcacttcagcacctgcttttcctgagcctgagcaacttaaagatgaactcatggaattctgcgccgataagaacgctcttgaagttttttatagggagactctcgagaaaggaatcgagacgccctcttttcacccttcagaggcgagtgctgttccagatgttggcataccaagtcttggtttgcctccgggtatccttaatgcaggcggcaacgcggacgtactcggtactcccagtccccgaatgaataatcctggtttagcaaactcgctattcttcaggcgagggagtgtgcaacattaa

SEQ ID NO: 5953 - protein, 364 aa, Muscodor strobelii
  misc_feature: SGI Peptide ID NO. 561711
  misc_feature (1)..(364): NCBI GI: 256726957 Blast Desc: NECHADRAFT_33271 [Nectria haematococca mpVI 77-13-4]
  misc_feature (1)..(364): NCBI GI: 46136511 Blast Desc: FG09771.1 [Gibberella zeae PH-1]
  misc_feature (1)..(361): NCBI GI: 261352548 Blast Desc: vacuolar membrane-associated protein iml-1 [Verticillium albo-atrum VaMs.102]
  misc_feature (1)..(338): NCBI GI: 74616915 Blast Desc: vacuolar membrane-associated protein iml-1 [Verticillium albo-atrum VaMs.102]
  misc_feature (1)..(338): NCBI GI: 164423807 Blast Desc: NCU07710 [Neurospora crassa OR74A] gi|157070240|gb|EAA33060.2| conserved [Neurospora crassa OR74A]
  misc_feature (1)..(364): NCBI GI: 145607309 Blast Desc: MGG_04160 [Magnaporthe grisea 70-15] gi|158514085|sp|A4R596.1|IML1_MAGGR RecName: Full=Vacuolar membrane-associated protein IML1 gi|145014893|gb|EDJ99461.1|
  misc_feature (2)..(296): NCBI GI: 171690578 Blast Desc: protein product [Podospora anserina] gi|170945237|emb|CAP71348.1| protein product [Podospora anserina]
  misc_feature (1)..(296): NCBI GI: 116196056 Blast Desc: CHGG_04626 [Chaetomium globosum CBS 148.51] gi|121932601|sp|Q2H0S0.1|IML1_CHAGB RecName: Full=Vacuolar membrane-associated protein IML1 gi|88180539|gb|EAQ88007.1| CBS
  misc_feature (1)..(329): NCBI GI: 169611162 Blast Desc: SNOG_08690 [Phaeosphaeria nodorum SN15] gi|160702236|gb|EAT83858.2| SNOG_08690 [Phaeosphaeria nodorum SN15]
  misc_feature (9)..(329): NCBI GI: 189206095 Blast Desc: vacuolar membrane-associated protein iml1 [Pyrenophora tritici-repentis Pt-1C-BFP] gi|187975475|gb|EDU42101.1| vacuolar membrane-associated protein iml1 [Pyrenophora tritici-repentis
MMKYDADHRKKSFRPERINLHYDRLHNPDNCFHIRLEWMNVTAKLIEDALKNWGAIASTHGLRLVEVPITEACRINEINPFRRPFRFKLALPPPTQRPSTYYDSDSFSPQPQPAKYFYHIALLKKFDYVLDYEAANNFPSNVDVSYSWGKPDFKYSQYIHRSGATMVEITDEGDFLVVANRIYTNRVVAQQNHTHMRPEPTPNDRVGRLLSSSHAYTNHGAVETAPVASPLTRPVLFAPSGARVLPLDASPSPARNMPMARSGVTSAPAFPEPEQLKDELMEFCADKNALEVFYRETLEKGIETPSFHPSEASAVPDVGIPSLGLPPGILNAGGNADVLGTPSPRMNNPGLANSLFFRRGSVQH

SEQ ID NO: 5954 - DNA, 1719 bp, Muscodor strobelii
  misc_feature: SGI cDNA ID NO. 561712
  misc_feature: Encodes the peptide sequence at SEQ ID NO 5955
atggagaaagtcaatctgatgaaaataaagacgatggcgcataagcatggaagaaatgatgaatctgcgactgccaagttcaaccctttccgacgtttcgactggaagacaagtcgccgcagtgatacctggaatggaaggcaagaggacagggatattaatgacgccgaggaaggtttacatcacagccagacatctcctgcaaggataggggacgacgcaaattcacaacagagtgagcaagccgatccaacaagtcaaggcgagtcggcaacgacagccgtgggaagctcatccagccaaaacgggattcatggaatcagaaaacgtggaacaaacaagtcatccagctctgagaagggtaggggcggtcccgatgacaagaagtatcccccaaagggccagttcacattcaagaaccaaatccagcgaaccctcttcagttcctggatcaatattctactactggctgctcccgttggtattgccttgtggcagcttcagctcggtggacctgctatcttcgttgtcaacttcattgcgattattcccctagccgctctgctgagtgaagccacagagcaaatcgcgatgcgtaccggtgagacgattggcggcttgatcaacgcaacattcggcaatgctgttgagctcattgtcgccattatcgcacttatcgacggccaagttactgttgtccaaacttcgcttgttggcagtatcttgtccaacttgctcctggtcctcggcttctgcttcctttgtggaggtttcaatcggccggaacagttctttaacaccactgtcgctcagaccgctgccagcttgctcgcccttgctgttgccagcttaattgtgccaaccatattttcgcacacgccggatttctacactgatgatgaggtcacgtcactcccgagttatgcggttcctcaactctcccatggcgttgcaatcattctgctccttgtctacggttcatatcttttctttcagctcaagacacacagtgacatgtttgctgaagaaagtcagaaagtcgcgacgaagccagtcttcaagaggggctcagatgaccagctgcatagtgtctctgccggtgttggggtgtctgggaacgcccttctcgccggctacaatgggcataacgatcagccggtgatgcaaagccctccccgaacaccccatgacgaggaagaagaggatgatgatgaacctgaggagccacagctgcacttttgggtggccgttgccgccctaactatatacactgtgattatcgctctctgttccgaaggtctggtcagcggtatcgattcgatcaaaggttccatcagcgaggaattcatcggccttattcttctgccaattgtcggcaacgcttgtgaacatgccactgcggttaccgttgcagtcaaagacaaaatggatcttgcgattggtgtcgccatcgggtcgtcgatgcaggttgcgttattcctgataccgcttcttgttattatcggatggggtattggcaatgaggatatgacactggccttcgataccttccagattgtcgtactgttcgtggctgtcctgcttgtcaattatctaattggcgatggaaagagtcactggctagaaggtgttcagctgattactctctacgtgatcattgcactctgtgccttctactatcccaatggtactggtgtttctccaggtggatcggagtaa

SEQ ID NO: 5955 - protein, 572 aa, Muscodor strobelii
  misc_feature: SGI Peptide ID NO. 561712
  misc_feature (425)..(557): Pfam Id: PF01699 Pfam Desc: Sodium/calcium exchanger protein
  misc_feature (180)..(332): Pfam Id: PF01699 Pfam Desc: Sodium/calcium exchanger protein
  misc_feature (1)..(554): NCBI GI: 46136511 Blast Desc: FG09771.1 [Gibberella zeae PH-1]
  misc_feature (1)..(561): NCBI GI: 116196054 Blast Desc: CHGG_04625 [Chaetomium globosum CBS 148.51] gi|88180538|gb|EAQ88006.1| CHGG_04625 [Chaetomium globosum CBS 148.51]
  misc_feature (132)..(558): NCBI GI: 171690580 Blast Desc: protein product [Podospora anserina] gi|170945238|emb|CAP71349.1| protein product [Podospora anserina]
  misc_feature (1)..(561): NCBI GI: 39944296 Blast Desc: MGG_04159 [Magnaporthe grisea 70-15] gi|145014892|gb|EDJ99460.1| MGG_04159 [Magnaporthe grisea 70-15]
  misc_feature (132)..(558): NCBI GI: 256727531 Blast Desc: NECHADRAFT_3338 [Nectria haematococca mpVI 77-13-4]
  misc_feature (107)..(567): NCBI GI: 240106009 Blast Desc: calcium/proton exchanger family protein [Coccidioides posadasii C735 delta SOWgp]
  misc_feature (14)..(561): NCBI GI: 225558416 Blast Desc: vacuolar H+/Ca2+ exchanger [Ajellomyces capsulatus G186AR]
  misc_feature (5)..(567): NCBI GI: 156031373 Blast Desc: SS1G_14108 [Sclerotinia sclerotiorum 1980] gi|154699510|gb|EDN99248.1| SS1G_14108 [Sclerotinia sclerotiorum 1980]
  misc_feature (28)..(560): NCBI GI: 67901046 Blast Desc: AN7510.2 [Aspergillus nidulans FGSC A4] gi|40742900|gb|EAA62090.1| AN7510.2 [Aspergillus nidulans FGSC A4] gi|259483823|tpe|CBF79529.1| TPA: Vacuolar Ca(2+)/H(+) FGSC
  misc_feature (5)..(518): NCBI GI: 164423805 Blast Desc: NCU07711 [Neurospora crassa OR74A] gi|157070239|gb|EAA33061.2| conserved [Neurospora crassa OR74A]
MEKVNLMKIKTMAHKHGRNDESATAKFNPFRRFDWKTSRRSDTWNGRQEDRDINDAEEGLHHSQTSPARIGDDANSQQSEQADPTSQGESATTAVGSSSSQNGIHGIRKRGTNKSSSSEKGRGGPDDKKYPPKGQFTFKNQIQRTLFSSWINILLLAAPVGIALWQLQLGGPAIFVVNFIAIIPLAALLSEATEQIAMRTGETIGGLINATFGNAVELIVAIIALIDGQVTVVQTSLVGSILSNLLLVLGFCFLCGGFNRPEQFFNTTVAQTAASLLALAVASLIVPTIFSHTPDFYTDDEVTSLPSYAVPQLSHGVAIILLLVYGSYLFFQLKTHSDMFAEESQKVATKPVFKRGSDDQLHSVSAGVGVSGNALLAGYNGHNDQPVMQSPPRTPHDEEEEDDDEPEEPQLHFWVAVAALTIYTVIIALCSEGLVSGIDSIKGSISEEFIGLILLPIVGNACEHATAVTVAVKDKMDLAIGVAIGSSMQVALFLIPLLVIIGWGIGNEDMTLAFDTFQIVVLFVAVLLVNYLIGDGKSHWLEGVQLITLYVIIALCAFYYPNGTGVSPGGSE

SEQ ID NO: 5956 - DNA, 3572 bp, Muscodor strobelii
  misc_feature: SGI EST ID NO. CUFF.15340.2
  misc_feature: Variant of the nucleotide sequence at SEQ ID NO 5954
cgctaagttgcgccgtcactgctttcagaggtgtcatcgtgcgcttagaactactacaaatttgctgtcgattagagaccacttttttgttctccacgagatgccgctttgagccacaatgatgatgaatagcaccgcgaaaggctcccccacaattgcgttgcatccatgattcgatcaggcacaagcgtgtagaaagtggaagccacagccatttgcaccaattgcaagcatccttcctcgccttgatcccatccgatcccatctcgtcattcaacacgggcattcaaactgtcattcattcccagtcactctctggcgcccgagccatccaatcccttgtagtaataccgcgttccccgagtccactggcttgtttcataatcaaattctactgtttgcatgcgcatggagtcatcgtttacgatagagaactctatattagcatccactcaacaacgtcctacatagttgtggcaatccctgcgcgctttcccttgaatacttcccaaacccgagatcgcaactcagtaaattgccacgacgtgaatctgctctacgtgtactacacactgtcgcaacgtcgcgcagtttgggcgcacctcagaacagagcacatgacgcaaagattttcgcgtcgttcccatcactgcacacattgagccatttctcttcgcagacggggagtagtgcacggattcgtcacgtcatccaccaatcttcgtgtcgatctagtgtcttcgcaacaataacgcaataaaaagttgctactacaatatttggaaatatcactgacaatggagaaagtcaatctgatgaaaataaagacgatggcgcataagcatggaagaaatgatgaatctgcgactgccaagttcaaccctttccgacgtttcgactggaagacaagtcgccgcagtgatacctggaatggaaggcaagaggacagggatattaatgacgccgaggaaggtttacatcacagccagacatctcctgcaaggataggggacgacgcaaattcacaacagagtgagcaagccgatccaacaagtcaaggcgagtcggcaacgacagccgtgggaagctcatccagccaaaacgggattcatggaatcagaaaacgtggaacaaacaagtcatccagctctgagaagggtaggggcggtcccgatgacaagaagtatcccccaaagggccagttcacattcaagaaccaaatccagcgaaccctcttcagttcctggatcaatattctactactggctgctcccgttggtattgccttgtggcagcttcagctcggtggacctgctatcttcgttgtcaacttcattgcgattattcccctagccgctctgctgagtgaagccacagagcaaatcgcgatgcgtaccggtgagacgattggcggcttgatcaacgcaacattcggcaatgctgttgagctcattgtcgccattatcgcacttatcgacggccaagttactgttgtccaaacttcgcttgttggcagtatcttgtccaacttgctcctggtcctcggcttctgcttcctttgtggaggtttcaatcggccggaacagttctttaacaccactgtcgctcagaccgctgccagcttgctcgcccttgctgttgccagcttaattgtgccaaccatattttcgcacacgccggatttctacactgatgatgaggtcacgtcactcccgagttatgcggttcctcaactctcccatggcgttgcaatcattctgctccttgtctacggttcatatcttttctttcagctcaagacacacagtgacatgtttgctgaagaaagtcagaaagtcgcgacgaagccagtcttcaagaggggctcagatgaccagctgcatagtgtctctgccggtgttggggtgtctgggaacgcccttctcgccggctacaatgggcataacgatcagccggtgatgcaaagccctccccgaacaccccatgacgaggaagaagaggatgatgatgaacctgaggagccacagctgcacttttgggtggccgttgccgccctaactatatacactgtgattatcgctctctgttccgaaggtctggtcagcggtatcgattcgatcaaaggttccatcagcgaggaattcatcggccttattcttctgccaattgtcggcaacgcttgtgaacatgccactgcggttaccgttgcagtcaaagacaaaatggatcttgcgattggtgtcgccatcgggtcgtcgatgcaggttgcgttattcctgataccgcttcttgttattatcggatggggtattggcaatgaggatatgacactggccttcgataccttccagattgtcgtactgttcgtggctgtcctgcttgtcaattatctaattggcgatggaaagagtcactggctagaaggtgttcagctgattactctctacgtgatcattgcactctgtgccttctactatcccaatggtactggtgtttctccaggtggatcggagtaatgttttttctcaatatctctgtcgaccaggcgtggaccgcggacccaaggaacttacctgagaatttccatcgatccaaccacgagtctgccatcagggttctctagaactcgacgctttgaaacccttcttgaaaagctgcgtgattgctccaccgcgtagaaccaggaaagcgatgctcgcaataccttaagatattcgccgcgctcgcactactcgttctcaaacaagtcatgagattagaaagcggcggactcgaccgattttatatgaaatgacgtttttacatctgcgagcagcacgcttacttcaacttcggttcgccttgtacaaattcaacggtacattgtttaatgtcagcctacaatatcaaatacactaattgtggactatatcctcgactgctcgcctgcgtcgcaccagtaaccccgctgtctgcgcctgttcgaggccaaactcgaagcgcaaattcatctcagtatcgacggatcaaccaccatgtgggaaaacaggaaggatatggagcctggcgttcggagttgcattgtcggaaatgtagtcactcgctttgatttctttctgtttttcttgtacccttccaaaataacgagaaacttgcgcagtttttcaattcaaattgaacctgcgtgctactttttttctcctatgtcgatgcaaaagtcattccgacagatacgaaacgatacccccttttgcgatagggaacttaggaaaggtctacttctgtgttgcaaacaatttcgaggtggttgatcgctatttgaactgtataccactagtttcagaaggtctagagaagctaaagcacacgctactgaatagatcttgttgacgacattcaatgtgtaataagtagttcctgtagactcgagaccgttcgctccagattcccccgccgatgccgtgctcatgggcatttgaacgtcattcctgtctgtgtctagaaacttgggatctcgtacacacttgagaaagtcagattgtaatacgaatcttgattatctaattgtagaattatagagccacccattcacc

SEQ ID NO: 5957 - DNA, 678 bp, Muscodor strobelii
  misc_feature: SGI cDNA ID NO. 561713
  misc_feature: Encodes the peptide sequence at SEQ ID NO 5958
atgaaagtcctcatcgtcggagcctcaggcctaataggaagcgcagcgctatcccaatgtctctcacacccaaaaatcacacaagtcatcgccttcgtacggcgggatctaccagccgaattcacaaaggaacccaaacttcaatgtataacacacagagatttctcctcgtggcccgaggatctcctccgctcacacgtagatgccgcaggaatgatatgggcaatgggaacatataaaggcgacgaaaaagcagacttcgaataccccctcacattcatgtcctccatgtctcgcgccctctcatctgggtccccgcggccggtattccgctacgtccagctcagtggtaaattcgtacgtcaggatcaagaaaagcgactctggtttctcgaagtgccgcggaaattaaaaggacgcctcgaaaccgaagccctagcctttcaaaaccaatatcccgccatatggcggactcttatcgttaagcccggcggcgtggtccctttcgttccgaacttgttcgcgacggtcatgggcgagaactggtgtgtgaggaacgaggaattgggtgctttcatgacgcatcttgtcgtggacggtgataaggaggatgatattactgagaacgccaggatcgttaggaaaggcagggagatattgaggggagaagggagatga

SEQ ID NO: 5958 - protein, 225 aa, Muscodor strobelii
  misc_feature: SGI Peptide ID NO. 561713
  misc_feature (1)..(220): NCBI GI: 256724806 Blast Desc: NECHADRAFT_84476 [Nectria haematococca mpVI 77-13-4]
  misc_feature (1)..(221): NCBI GI: 46111965 Blast Desc: FG02864.1 [Gibberella zeae PH-1]
  misc_feature (53)..(210): NCBI GI: 145608556 Blast Desc: MGG_12801 [Magnaporthe grisea 70-15] gi|145016023|gb|EDK00513.1| MGG_12801 [Magnaporthe grisea 70-15]
  misc_feature (1)..(225): NCBI GI: 189207012 Blast Desc: conserved [Pyrenophora tritici-repentis Pt-1C-BFP] gi|187975933|gb|EDU42559.1| conserved [Pyrenophora tritici-repentis Pt-1C-BFP]
  misc_feature (72)..(220): NCBI GI: 261357572 Blast Desc: conserved [Verticillium albo-atrum VaMs.102]
  misc_feature (1)..(214): NCBI GI: 255956831 Blast Desc: Pc21g21970 [Penicillium chrysogenum Wisconsin 54-1255] gi|211590879|emb|CAP97094.1| Pc21g21970 [Penicillium chrysogenum Wisconsin 54-1255]
  misc_feature (1)..(214): NCBI GI: 115402317 Blast Desc: [Aspergillus terreus NIH2624] gi|114189081|gb|EAU30781.1| [Aspergillus terreus NIH2624]
  misc_feature (1)..(218): NCBI GI: 259483149 Blast Desc: TPA: nucleoside-diphosphate-sugar epimerase, (AFU_orthologue; AFUA_8G07320) [Aspergillus nidulans FGSC A4]
  misc_feature (1)..(213): NCBI GI: 119485873 Blast Desc: nucleoside-diphosphate-sugar epimerase, [Neosartorya fischeri NRRL 181] gi|119410435|gb|EAW20382.1| nucleoside-diphosphate-sugar epimerase, [Neosartorya fischeri
  misc_feature (1)..(213): NCBI GI: 121709657 Blast Desc: nucleoside-diphosphate-sugar epimerase, [Aspergillus clavatus NRRL 1] gi|119400630|gb|EAW11055.1| nucleoside-diphosphate-sugar epimerase, [Aspergillus clavatus 1]
MKVLIVGASGLIGSAALSQCLSHPKITQVIAFVRRDLPAEFTKEPKLQCITHRDFSSWPEDLLRSHVDAAGMIWAMGTYKGDEKADFEYPLTFMSSMSRALSSGSPRPVFRYVQLSGKFVRQDQEKRLWFLEVPRKLKGRLETEALAFQNQYPAIWRTLIVKPGGVVPFVPNLFATVMGENWCVRNEELGAFMTHLVVDGDKEDDITENARIVRKGREILRGEGR

SEQ ID NO: 5959 - DNA, 358 bp, Muscodor strobelii
  misc_feature: SGI EST ID NO. CUFF.15003.0
  misc_feature: Variant of the nucleotide sequence at SEQ ID NO 5957
cggaaattaaaaggacgcctcgaaaccgaagccctagcctttcaaaaccaatatcccgccatatggcggactcttatcgttaagcccggcggcgtggtccctttcgttccgaacttgttcgcgacggtcatgggcgagaactggtgtgtgaggaacgaggaattgggtgctttcatgacgcatcttgtcgtggacggtgataaggaggatgatattactgagaacgccaggatcgttaggaaaggcagggagatattgaggggagaagggagatgagcagtaggctactgatctcttttgtagtgtatgatagtgataagcagtgcgtgaatttcgtatagccctatcacattcagac

SEQ ID NO: 5960 - DNA, 1434 bp, Muscodor strobelii
  misc_feature: SGI cDNA ID NO. 561714
  misc_feature: Encodes the peptide sequence at SEQ ID NO 5961
atgtcgataccgggcttgggcaatcttgccccttcgaccatccctgtcgctgccgcctcgtcgaccgccccggctgccacgacggtgcacacgctcgagcccttctgggagtaccgcttcgaggtgccccatggctcgaccctcaccgtcaagctcctgtccggcaccgcggagagagacggcaccgagctcgcccccaacactccctacagctttgtagccgtcaagtccaagatcaacacctggcatggctgctccctcgaggtcaccgccccgcccaccggccccttcgatgcctacacttcggagcccacagccgatgagacgccgctcgtcagctacctgaacctgcacttcaagctccagtccctgcgcgccgctgcccgcaaggctggcgagctcgggccccgtgtcctcgtcgtcgggccccccaactcgggcaagtcgacgctcgtgcgcaccttgacctcctgggccacgcgcgcggggtcccagcccatggtcgtcaacaccgactgccgcgagggcatgctgaccttgcccggcaccctcagcgccgccgtctttgccaccctgatcgacatcaccactgaatggggcagcctgcccagcagcggagcgagctctatcccggtcaagctccctctcgcctactactacggtctaccccagccagacgacaaccccaagctttacaagcgtctactcggtcgcctggccatcgcggctacctcccgcctgtcagaggatccggacgtcaagtctgcaggtatcttgattgatactggcggtgtaccgactggagctaagacccccgtgtactatgacttcctggcccatatcgtggccgaatactcggtcaacatcgtcgttgtattggggtccgagcgcattggcagcgagatgcagaagcgcttcgccggacagaccacgagcgttggtgagactgtcactgtcgtttccttggacaagtctggtggctgcgttgagcgcgatgtcggcttcatgcagcagacccgcgaggccgccattcgagattacttctttggtaatgccaagatgacactcagtcctttcacccaacaggtggattttagctccgtgtccatatggaggatcaatgagacctcatccaaagcttcggccgaagatagcatcgctcaggatgatgcagtagatatgcccttagatatgctcgagaaagccgagccgtccctgatgatgcaaaactgcgtcttggcggttgcctatgcatcggtgcatgatgcgccggacaccatccgcgatgccaatattatggggtttgtatatgttgcggatgtcgacgagaagcgccgccgactgcgtattttgggacccgtttccgcacgccttggcgatcgccctctcctctggggatcttggcccgaacacatggtgaacctgctcatataa

SEQ ID NO: 5961 - protein, 477 aa, Muscodor strobelii
  misc_feature: SGI Peptide ID NO. 561714
  misc_feature (176)..(473): Pfam Id: PF06807 Pfam Desc: Pre-mRNA cleavage complex II protein Clp1
  misc_feature (215)..(373): Pfam Id: PF06807 Pfam Desc: Pre-mRNA cleavage complex II protein Clp1
  misc_feature (1)..(476): NCBI GI: 154303687 Blast Desc: BC1G_08728 [Botryotinia fuckeliana B05.10] gi|238055297|sp|A6S936.1|CLP1_BOTFB RecName: Full=Protein clp1 gi|150854522|gb|EDN29714.1| BC1G_08728 [Botryotinia fuckeliana
  misc_feature (1)..(476): NCBI GI: 261352735 Blast Desc: CLP1 [Verticillium albo-atrum VaMs.102]
  misc_feature (1)..(476): NCBI GI: 256727914 Blast Desc: [Nectria haematococca mpVI 77-13-4]
  misc_feature (1)..(476): NCBI GI: 46121235 Blast Desc: FG04996.1 [Gibberella zeae PH-1]
  misc_feature (1)..(476): NCBI GI: 189205859 Blast Desc: mRNA cleavage and polyadenylation factor IA/II complex [Pyrenophora tritici-repentis Pt-1C-BFP] gi|187975357|gb|EDU41983.1| mRNA cleavage and polyadenylation
  misc_feature (1)..(476): NCBI GI: 145601355 Blast Desc: MGG_08804 [Magnaporthe grisea 70-15] gi|238055149|sp|A4QQE0.1|CLP1_MAGGR RecName: Full=Protein CLP1 gi|145009360|gb|EDJ94071.1| MGG_08804 [Magnaporthe grisea 70-15]
  misc_feature (1)..(476): NCBI GI: 169621716 Blast Desc: SNOG_14068 [Phaeosphaeria nodorum SN15] gi|121934698|sp|Q0U2G5.1|CLP1_PHANO RecName: Full=Protein CLP1 gi|111057573|gb|EAT78693.1| SNOG_14068 [Phaeosphaeria nodorum
  misc_feature (1)..(476): NCBI GI: 116195476 Blast Desc: CHGG_04336 [Chaetomium globosum CBS 148.51] gi|121783695|sp|Q2H1L0.1|CLP1_CHAGB RecName: Full=Protein CLP1 gi|88180249|gb|EAQ87717.1| CHGG_04336 [Chaetomium globosum CBS
  misc_feature (1)..(476): NCBI GI: 115401536 Blast Desc: conserved [Aspergillus terreus NIH2624] gi|114190297|gb|EAU31997.1| conserved [Aspergillus terreus NIH2624]
  misc_feature (1)..(476): NCBI GI: 238055341 Blast Desc: conserved [Aspergillus terreus NIH2624] gi|114190297|gb|EAU31997.1| conserved [Aspergillus terreus NIH2624]
  misc_feature (32)..(453): SWISSPROT Homolog: EC 2.7.1.78 Polynucleotide 5'-hydroxyl-kinase
MSIPGLGNLAPSTIPVAAASSTAPAATTVHTLEPFWEYRFEVPHGSTLTVKLLSGTAERDGTELAPNTPYSFVAVKSKINTWHGCSLEVTAPPTGPFDAYTSEPTADETPLVSYLNLHFKLQSLRAAARKAGELGPRVLVVGPPNSGKSTLVRTLTSWATRAGSQPMVVNTDCREGMLTLPGTLSAAVFATLIDITTEWGSLPSSGASSIPVKLPLAYYYGLPQPDDNPKLYKRLLGRLAIAATSRLSEDPDVKSAGILIDTGGVPTGAKTPVYYDFLAHIVAEYSVNIVVVLGSERIGSEMQKRFAGQTTSVGETVTVVSLDKSGGCVERDVGFMQQTREAAIRDYFFGNAKMTLSPFTQQVDFSSVSIWRINETSSKASAEDSIAQDDAVDMPLDMLEKAEPSLMMQNCVLAVAYASVHDAPDTIRDANIMGFVYVADVDEKRRRLRILGPVSARLGDRPLLWGSWPEHMVNLLI

SEQ ID NO: 5962 - DNA, 1927 bp, Muscodor strobelii
  misc_feature: SGI EST ID NO. CUFF.15007.0
  misc_feature: Variant of the nucleotide sequence at SEQ ID NO 5960
gctgccgcagtagtagctaccttacatagatatttcgatagtggaccatcctctgtcactctttgtttctgagattacctgctcggtagcgctgcatcgatcgagtcgccctgttaccgtcatatctcgagcggaagaagagtgccagccaagtcgaagagaccgctgcccatgttggaaatgaggtagtgggcgccatgtcgataccgggcttgggcaatcttgccccttcgaccatccctgtcgctgccgcctcgtcgaccgccccggctgccacgacggtgcacacgctcgagcccttctgggagtaccgcttcgaggtgccccatggctcgaccctcaccgtcaagctcctgtccggcaccgcggagagagacggcaccgagctcgcccccaacactccctacagctttgtagccgtcaagtccaagatcaacacctggcatggctgctccctcgaggtcaccgccccgcccaccggccccttcgatgcctacacttcggagcccacagccgatgagacgccgctcgtcagctacctgaacctgcacttcaagctccagtccctgcgcgccgctgcccgcaaggctggcgagctcgggccccgtgtcctcgtcgtcgggccccccaactcgggcaagtcgacgctcgtgcgcaccttgacctcctgggccacgcgcgcggggtcccagcccatggtcgtcaacaccgactgccgcgagggcatgctgaccttgcccggcaccctcagcgccgccgtctttgccaccctgatcgacatcaccactgaatggggcagcctgcccagcagcggagcgagctctatcccggtcaagctccctctcgcctactactacggtctaccccagccagacgacaaccccaagctttacaagcgtctactcggtcgcctggccatcgcggctacctcccgcctgtcagaggatccggacgtcaagtctgcaggtatcttgattgatactggcggtgtaccgactggagctaagacccccgtgtactatgacttcctggcccatatcgtggccgaatactcggtcaacatcgtcgttgtattggggtccgagcgcattggcagcgagatgcagaagcgcttcgccggacagaccacgagcgttggtgagactgtcactgtcgtttccttggacaagtctggtggctgcgttgagcgcgatgtcggcttcatgcagcagacccgcgaggccgccattcgagattacttctttggtaatgccaagatgacactcagtcctttcacccaacaggtggattttagctccgtgtccatatggaggatcaatgagacctcatccaaagcttcggccgaagatagcatcgctcaggatgatgcagtagatatgcccttagatatgctcgagaaagccgagccgtccctgatgatgcaaaactgcgtcttggcggttgcctatgcatcggtgcatgatgcgccggacaccatccgcgatgccaatattatggggtttgtatatgttgcggatgtcgacgagaagcgccgccgactgcgtattttgggacccgtttccgcacgccttggcgatcgccctctcctctggggatcttggcccgaacacatggtgaacctgctcatataatgccataggtgagatatgtttcgactgagggatatgaattctattaaagaaatgcgccctttggcgttcgcgacctacacgacctacacgaccacatgcatttcaaaggttgtgagggtcagtaagaatggaataatggcgtatctatccttacgcttgacagacctgggggcggatgaactccgtgtactcccccatgcccgtcactgtgcaattgcaagtaggcagatagagaaattaattgaaatcaagtgtctccatatatcatctttcggagcgaccgtattataccagag

SEQ ID NO: 5963 - DNA, 1326 bp, Muscodor strobelii
  misc_feature: SGI cDNA ID NO. 561715
  misc_feature: Reduced expression when VOC is produced
  misc_feature: Encodes the peptide sequence at SEQ ID NO 5964
atggccaccgacctgaaacgatcacaaccgtcgtctcccgatatgtctgccacacgcgacttgaagcgcgttagaagcgcgcctctcaagccgcgggaagtgcccaagcaggaggatctggtcgattacaactatgccgtggccggccacgacggcacaatgtgtgatgccgacggcgagctgttcgtcaagccatgtactcagtccgaagtggacttctacgaatctgcaaagcaacatcccgactttaatgagctaatgcccgtatactgcggcgacctggccttgctagatacctccaccgctgccactattcatgcacagctgcccgacttgattcagcattccgatatccccacatccctcaagaaggagctgcagtcacacttgcatgtagacatagcgcagattccagtagcagtggacggcaatgccgacgcaacgttggatggtgcgcagtggatacctaacaagaacaagcgcatcaagaccaaccgcgccattgccctgctcaatcagtcttacggctttaagaagcccaacatcatggatgcgaagctcggataccgactgtgggcggacgatgcccctcagaaaaagaaggagcgcttcgatcagatcacggccgagacaactcacaagaacttcggcttccgagttgcaggcatgcaggtctacaagggttccacggtcgaatccgaactgaacgaagggggtttcaggatctatgacaaggactggggccgttttaccgtcaatgacgaaaatctagtggaatcttgcaggaaatacatcttcaatgaggctgctggaattgatgaggagctgggcaagctggttgctggcctctttgcgaacgatcttcaaagggtacaggaagtactagaaaaggaggagagtcggatgtattcttccagcttactctttgtcttcgagggggatggcaaggccttgcgagcggccattgacgaactcaaaggcgacgagggagaaaggcaacgcgttgcggtagaggcgaacgcgccagctggtaagagaacgacgacagtccgaaacgttggcgccaactctagagtggacagcggcatcgatatgggcgaggatgagctgaaatttgtggcagagacagttcctcggcgtacgttggacgaactggacgatgaggacgacgacgacgagtcagagatgtcggcatttcctcatatatacacgctgaagctgatcgactttgcccatgccgactggacccctgggcaaggccccgacgagaacgtgctcatgggggtgagaagcctcgtgaagatattcgaacaactctcagcttag

SEQ ID NO: 5964 - protein, 441 aa, Muscodor strobelii
  misc_feature: SGI Peptide ID NO. 561715
  misc_feature (94)..(437): Pfam Id: PF03770 Pfam Desc: Inositol polyphosphate kinase
  misc_feature (293)..(437): Pfam Id: PF03770 Pfam Desc: Inositol polyphosphate kinase
  misc_feature (175)..(231): Pfam Id: PF03770 Pfam Desc: Inositol polyphosphate kinase
  misc_feature (34)..(439): NCBI GI: 256727913 Blast Desc: NECHADRAFT_46324 [Nectria haematococca mpVI 77-13-4]
  misc_feature (32)..(440): NCBI GI: 46121239 Blast Desc: FG04998.1 [Gibberella zeae PH-1]
  misc_feature (34)..(441): NCBI GI: 261352738 Blast Desc: inositol polyphosphate multikinase [Verticillium albo-atrum VaMs.102]
  misc_feature (32)..(440): NCBI GI: 170940265 Blast Desc: protein product [Podospora anserina]
  misc_feature (29)..(440): NCBI GI: 145601357 Blast Desc: MGG_14150 [Magnaporthe grisea 70-15] gi|145009361|gb|EDJ94072.1| MGG_14150 [Magnaporthe grisea 70-15]
  misc_feature (54)..(440): NCBI GI: 164425170 Blast Desc: NCU06315 [Neurospora crassa OR74A] gi|157070817|gb|EAA33341.2| conserved [Neurospora crassa OR74A]
  misc_feature (32)..(440): NCBI GI: 116195474 Blast Desc: CHGG_04335 [Chaetomium globosum CBS 148.51] gi|88180248|gb|EAQ87716.1| CHGG_04335 [Chaetomium globosum CBS 148.51]
  misc_feature (32)..(440): NCBI GI: 154303685 Blast Desc: BC1G_08727 [Botryotinia fuckeliana B05.10] gi|150854521|gb|EDN29713.1| BC1G_08727 [Botryotinia fuckeliana B05.10]
  misc_feature (32)..(324): NCBI GI: 156049329 Blast Desc: SS1G_08371 [Sclerotinia sclerotiorum 1980] gi|154692770|gb|EDN92508.1| SS1G_08371 [Sclerotinia sclerotiorum 1980]
  misc_feature (21)..(441): NCBI GI: 145255262 Blast Desc: An18g04520 [Aspergillus niger] gi|134084500|emb|CAK43254.1| protein product [Aspergillus niger]
  misc_feature (45)..(314): SWISSPROT Homolog: EC 2.7.1.151 Inositol-polyphosphate multikinase
  misc_feature: Useful for introducing or modulating the production of volatile compounds
MATDLKRSQPSSPDMSATRDLKRVRSAPLKPREVPKQEDLVDYNYAVAGHDGTMCDADGELFVKPCTQSEVDFYESAKQHPDFNELMPVYCGDLALLDTSTAATIHAQLPDLIQHSDIPTSLKKELQSHLHVDIAQIPVAVDGNADATLDGAQWIPNKNKRIKTNRAIALLNQSYGFKKPNIMDAKLGYRLWADDAPQKKKERFDQITAETTHKNFGFRVAGMQVYKGSTVESELNEGGFRIYDKDWGRFTVNDENLVESCRKYIFNEAAGIDEELGKLVAGLFANDLQRVQEVLEKEESRMYSSSLLFVFEGDGKALRAAIDELKGDEGERQRVAVEANAPAGKRTTTVRNVGANSRVDSGIDMGEDELKFVAETVPRRTLDELDDEDDDDESEMSAFPHIYTLKLIDFAHADWTPGQGPDENVLMGVRSLVKIFEQLSA

SEQ ID NO: 5965 - DNA, 2316 bp, Muscodor strobelii
  misc_feature: SGI EST ID NO. CUFF.15390.1
  misc_feature: Variant of the nucleotide sequence at SEQ ID NO 5963
ctgtgactttgcggtcacggcccgtcggcatggccctgtatcgcattgctgcatcccatggctgcacgcctattcccacctgcacgtttcccttttctgtatcgtttccctgaacatgtgccacggcaaagtgattataactccgtctgagcaaccgcttcgtcaccttcgtcgtcactgccctcttctcaatcaccctgctcctctgcccatcgacgcccgacacactacatatacttacttcccttgatgccaccaagtcccttttgacaactgttgcggcacacccctcccgtccgtgtcgtcatcgcccaccgttgccagttgctctctcttattggcctcgcctcgcacaaagaccggttacaaccatctccaccacgtcgactaactgcctagccgccaccgtccgcattcgcacaagccagccacagatcaatgggccacccgcgtatttaagtcccgtttcgacctgtgcacccgaccgcacctcattgacatggccaccgacctgaaacgatcacaaccgtcgtctcccgatatgtctgccacacgcgacttgaagcgcgttagaagcgcgcctctcaagccgcgggaagtgcccaagcaggaggatctggtcgattacaactatgccgtggccggccacgacggcacaatgtgtgatgccgacggcgagctgttcgtcaagccatgtactcagtccgaagtggacttctacgaatctgcaaagcaacatcccgactttaatgagctaatgcccgtatactgcggcgacctggccttgctagatacctccaccgctgccactattcatgcacagctgcccgacttgattcagcattccgatatccccacatccctcaagaaggagctgcagtcacacttgcatgtagacatagcgcagattccagtagcagtggacggcaatgccgacgcaacgttggatggtgcgcagtggatacctaacaagaacaagcgcatcaagaccaaccgcgccattgccctgctcaatcagtcttacggctttaagaagcccaacatcatggatgcgaagctcggataccgactgtgggcggacgatgcccctcagaaaaagaaggagcgcttcgatcagatcacggccgagacaactcacaagaacttcggcttccgagttgcaggcatgcaggtctacaagggttccacggtcgaatccgaactgaacgaagggggtttcaggatctatgacaaggactggggccgttttaccgtcaatgacgaaaatctagtggaatcttgcaggaaatacatcttcaatgaggctgctggaattgatgaggagctgggcaagctggttgctggcctctttgcgaacgatcttcaaagggtacaggaagtactagaaaaggaggagagtcggatgtattcttccagcttactctttgtcttcgagggggatggcaaggccttgcgagcggccattgacgaactcaaaggcgacgagggagaaaggcaacgcgttgcggtagaggcgaacgcgccagctggtaagagaacgacgacagtccgaaacgttggcgccaactctagagtggacagcggcatcgatatgggcgaggatgagctgaaatttgtggcagagacagttcctcggcgtacgttggacgaactggacgatgaggacgacgacgacgagtcagagatgtcggcatttcctcatatatacacgctgaagctgatcgactttgcccatgccgactggacccctgggcaaggccccgacgagaacgtgctcatgggggtgagaagcctcgtgaagatattcgaacaactctcagcttagaggctgtagagacatcggggcatggtcagcgcctggcgtgcaccaaaatagactttctggcttggtagactttcaaaaagaggcgatctcggagttctaggtaatgttggtggctttacacgagggttttgggcgaaacaggcgttcacaaggtcgcatggagtttcttgacgatgatatacccctcgttgcattgttccatcatagcagactcaaataggagaggatcttaggggggccacgaaaagtcgaactgattacaataaaacttgctacgcaactagcaccgcctttgcctgtcctttgaatacccaagctctgttagaaacccacgacaagtggcagacctgaatcggccacttatccgagttattgtggcctcttgcattatttgctctactctcttactcactttcctcctagacttgctatctatcaatccgagttctgtgagacgagatgctgcatatcatgacatgggatgatgccag

SEQ ID NO: 5966 - DNA, 1377 bp, Muscodor strobelii
  misc_feature: SGI cDNA ID NO. 561716
  misc_feature: Encodes the peptide sequence at SEQ ID NO 5967
atgccgatcgatactcaagtcggcgcctcccagcctgaggctgatgtgcagcatcacgcggacaattcggatagccatgccgacgctgagaaggaggcaggtgtaggcgttagctctaatagcgaggtcaagaagaagaagagaaagaaaagaccgaagggcaagaaaggcaccggattcgaggagtattacgccgattctcctacgacgcctgaggaagccaagcacgagaagaacgaactctatcaccccacaaaaccattcgcggatcgcatcgtaacctgtattcagcgctttcgcgctcgccgtcgtctagactcagagcggactaacctgttcaacaaatatctgttcttaggaggaattgatacctcccagcgtcaatttggcggcgtcacacaagacaaagatcttctcgcagaggcagacagcgaacagattcgtgaaatgaccgcaatcgacaggattggcggtagccaacgtttttaccctggccctgagtcggaggactgggaagttgacttcgaggtcgttgtgaaggggtttctctctcgcacgatcccagacacgtgggggattgatagaagacttattgagaccggagcagaactcgtcaagaacttccttaactacgttctcatgcatgacgtatgtcctgaatacgaggacaatatcttgagagctcactatatctgtgaggttgctccggccgagttcgccagagctcagaatattgcccatgggctgccagattccgttaatcagggtgcccacgccctattctgtgaaggcagagctcagattatggactctaacgacaagaaactcgtggaagatctccgccaggccatgattctcactcatacaggtgaccataccaaagtccgcaatccttcaagcatcgagatcatctctacagaggagaaaccctacgaagttgtgggtatcctacgccctcgcaaacggaacatcaaacttgtcgaagagactatgaagccggagtacccagacttcgtggccttgagagtcggtctcctcatcgtcaagcctgctatcatcgctcatgagttcggcaataagttgcgccctgatcaagtcaacttagactccaagaaagaggtattcatgattgaagatgagatcttgatcaatttcacgaacgggatgaagatacgaatgacagtttgtgagacaaacgcggatttcaacttcatcaaaagtgtacaagaagttcgcgtctcgttcgacacgctcctggcccagtcactcatggttggctggaaggaacctgtggtcaatactcgggaggccccctcgattcacgatccagctgccgaggatcgggctctgagcgctgaagcgcgagttgacgactaa

SEQ ID NO: 5967 - protein, 458 aa, Muscodor strobelii
  misc_feature: SGI Peptide ID NO. 561716
  misc_feature (47)..(430): Pfam Id: PF09692 Pfam Desc: Argonaute siRNA chaperone (ARC) complex subunit Arb1
  misc_feature (47)..(250): Pfam Id: PF09692 Pfam Desc: Argonaute siRNA chaperone (ARC) complex subunit Arb1
  misc_feature (375)..(430): Pfam Id: PF09692 Pfam Desc: Argonaute siRNA chaperone (ARC) complex subunit Arb1
  misc_feature (56)..(455): NCBI GI: 256728081 Blast Desc: NECHADRAFT_95338 [Nectria haematococca mpVI 77-13-4]
  misc_feature (55)..(442): NCBI GI: 116195472 Blast Desc: CHGG_04334 [Chaetomium globosum CBS 148.51] gi|88180247|gb|EAQ87715.1| CHGG_04334 [Chaetomium globosum CBS 148.51]
  misc_feature (56)..(443): NCBI GI: 46121237 Blast Desc: FG04997.1 [Gibberella zeae PH-1]
  misc_feature (58)..(445): NCBI GI: 85108457 Blast Desc: NCU06316 [Neurospora crassa OR74A] gi|28924187|gb|EAA33342.1| [Neurospora crassa OR74A]
  misc_feature (70)..(442): NCBI GI: 170940266 Blast Desc: protein product [Podospora anserina]
  misc_feature (56)..(446): NCBI GI: 145601359 Blast Desc: MGG_14151 [Magnaporthe grisea 70-15] gi|145009362|gb|EDJ94073.1| MGG_14151 [Magnaporthe grisea 70-15]
  misc_feature (22)..(457): NCBI GI: 239611935 Blast Desc: conserved [Ajellomyces dermatitidis ER-3]
  misc_feature (55)..(430): NCBI GI: 225558332 Blast Desc: conserved [Ajellomyces capsulatus G186AR]
  misc_feature (22)..(457): NCBI GI: 261201824 Blast Desc: conserved [Ajellomyces dermatitidis SLH14081] gi|239590223|gb|EEQ72804.1| conserved [Ajellomyces dermatitidis SLH14081]
  misc_feature (3)..(430): NCBI GI: 240106780 Blast Desc: CPC735_015660 [Coccidioides posadasii C735 delta SOWgp]
MPIDTQVGASQPEADVQHHADNSDSHADAEKEAGVGVSSNSEVKKKKRKKRPKGKKGTGFEEYYADSPTTPEEAKHEKNELYHPTKPFADRIVTCIQRFRARRRLDSERTNLFNKYLFLGGIDTSQRQFGGVTQDKDLLAEADSEQIREMTAIDRIGGSQRFYPGPESEDWEVDFEVVVKGFLSRTIPDTWGIDRRLIETGAELVKNFLNYVLMHDVCPEYEDNILRAHYICEVAPAEFARAQNIAHGLPDSVNQGAHALFCEGRAQIMDSNDKKLVEDLRQAMILTHTGDHTKVRNPSSIEIISTEEKPYEVVGILRPRKRNIKLVEETMKPEYPDFVALRVGLLIVKPAIIAHEFGNKLRPDQVNLDSKKEVFMIEDEILINFTNGMKIRMTVCETNADFNFIKSVQEVRVSFDTLLAQSLMVGWKEPVVNTREAPSIHDPAAEDRALSAEARVDD

SEQ ID NO: 5968 - DNA, 1620 bp, Muscodor strobelii
  misc_feature: SGI EST ID NO. CUFF.15027.0
  misc_feature: Variant of the nucleotide sequence at SEQ ID NO 5966
ctgatgtgcagcatcacgcggacaattcggatagccatgccgacgctgagaaggaggcaggtgtaggcgttagctctaatagcgaggtcaagaagaagaagagaaagaaaagaccgaagggcaagaaaggcaccggattcgaggagtattacgccgattctcctacgacgcctgaggaagccaagcacgagaagaacgaactctatcaccccacaaaaccattcgcggatcgcatcgtaacctgtattcagcgctttcgcgctcgccgtcgtctagactcagagcggactaacctgttcaacaaatatctgttcttaggaggaattgatacctcccagcgtcaatttggcggcgtcacacaagacaaagatcttctcgcagaggcagacagcgaacagattcgtgaaatgaccgcaatcgacaggattggcggtagccaacgtttttaccctggccctgagtcggaggactgggaagttgacttcgaggtcgttgtgaaggggtttctctctcgcacgatcccagacacgtgggggattgatagaagacttattgagaccggagcagaactcgtcaagaacttccttaactacgttctcatgcatgacgtatgtcctgaatacgaggacaatatcttgagagctcactatatctgtgaggttgctccggccgagttcgccagagctcagaatattgcccatgggctgccagattccgttaatcagggtgcccacgccctattctgtgaaggcagagctcagattatggactctaacgacaagaaactcgtggaagatctccgccaggccatgattctcactcatacaggtgaccataccaaagtccgcaatccttcaagcatcgagatcatctctacagaggagaaaccctacgaagttgtgggtatcctacgccctcgcaaacggaacatcaaacttgtcgaagagactatgaagccggagtacccagacttcgtggccttgagagtcggtctcctcatcgtcaagcctgctatcatcgctcatgagttcggcaataagttgcgccctgatcaagtcaacttagactccaagaaagaggtattcatgattgaagatgagatcttgatcaatttcacgaacgggatgaagatacgaatgacagtttgtgagacaaacgcggatttcaacttcatcaaaagtgtacaagaagttcgcgtctcgttcgacacgctcctggcccagtcactcatggttggctggaaggaacctgtggtcaatactcgggaggccccctcgattcacgatccagctgccgaggatcgggctctgagcgctgaagcgcgagttgacgactaattcggagaagtacgggcgactaggaggaggaggcaaaaaatcacaggagagaatcaggtgggtagccaggctccgctcaggtcaatggtacagaacgcaagggagcgaataagtaaggcggtggacggatgtgttgtcaacccaggatcttttcggcctgtaacctgccagactcgccagacggtttttgagacagtgcgggattcagtcattcgacctccgcgttgcttccgtgctttaaggtatttaacattaaaggtacctaacccaatgatgaatgtgt

SEQ ID NO: 5969 - DNA, 3834 bp, Muscodor strobelii
  misc_feature: SGI cDNA ID NO. 561717
  misc_feature: Encodes the peptide sequence at SEQ ID NO 5970
atggttggaactggtccttccggtgcgggggacgttattggtcttaacgtccacgatgttgtcgaaccaactgatgaggcacccaccacggaggctgcgagtgaaaagggagcaactgcagaccctaatcacgtagttggcgacgagaattaccctgctccgaccgaagaggaggaaaagactctgcgtaaagtggcagatcatgttccctggacagcttggctattgtgcctcgtagagttagctgagaggacctcttactatggaaccaatgccgttttcagcaattatattcaatttccacttccagagggtggcaacggcagtggtgcaattaatcctaacgacccagaaacacctgctggtgcactcgggctgggcggccaggcggcttccggagtcgtcctagcatacgttttcatagcttatgtcattccgatatttggcgcctggtgggctgacaccaaagttggccgcttcaaagctatggtctacggcactatcattggaggggttgctcatgtgatcctaattggcggcgccgcgccggctcttttaaaagcgggaaagggagcaggccccttttttgttggtctcatacttcttgctcttggggctggaatatttaaaccgaatgtagcacccaccttcgtcgatcagtatactcatcaacgcaagtatacgaaggtcctgaagagcggcgagaaggtgcttgttgatcccgagactactatttcctacatgcttcttatctactacgcttgtatcaaccttggtgccttcatacaaatcggatcggtctacatcgagaagtatcgcggctactggcttacctttttagtgccgggcatcatctatttcctcctgcctccgctactggctgtcctctacaaacgtactgttcgaacgccaccacagggttctgacctgacaaatttcgtgaagattactatatcggcactaaagaaaagtaaaggaaaagtattttctgggagactctggcacaatgtcaagccatcaacccttgctgagagtggtgaggcggttacatactcggagaaagatgtgagcgactgtcagagaacatgggaagctatcacgatctttgcctatatccctatatggttacttaacgacggcggtgttggctccgtgtctagctaccaagcagcaggcatgacaacgtacggggctcctaacgatctcttgagtgccttcaatcctatgtccagtggcggatttatgccacaagcccttgatgtcacatcatatgagcttgcctacgctagagctcctccgcacatgaaggcgactgttctatctctatttctgtttatgactgctttgagtggtgctttgggagaaatccttatacccgccatcagagatccgacactcatctgggcatgggccgcacctgccattgccctcttcgtacaaacgatcatctttgtctggaggcatcgcggagtaaatgacgatacatttattacccatgaagaagactttgtgcccgaggccaagacgctcgacgaaaacactgaggagaacaagagctcatcatggatttccttacccgagcccgatttgttctctttacactgctttatttctctacgctcattgccggaactgaaacacgtaagtcacacgtccatggcaagcagatgtaacgaggcagattctaatctcattctagtcaaaccctgggcttttgagcctctagctcttggatccatccatccacagggatggctcctgaatgctttgaattcctacgcggatggattgcccggccacatgttctcagaggccaaccaaaccgacggtcgtcgtttctacagtttctacgtattacatctaaatattgggatcttatctcaagccacgggtctccacacgataatattaaaaggacgggaaactaatatgggatctttcttactaccaggtgaatcgccttggctccaacagcaaggaggaaagacagcagagtatggtggtctcaatgaagcacttccctactggtttaacggcttagtcccactggcgtattcgttgcaaaacaaggagctcatggcccaagttcatcaagtcgcgcaaacggttctcggcctgcaagcggatgatggctggcttggtccggaggactttctgggacaagagagagtactttggggtcgatacccctttctcctcggactaacacagcttgccgaagccaactcgacctggtcggaccagattgtaaatagtctacaaaagtttatcaagctagctcatgatagtctcgacagcggtgacggatacaacaaatgcaaagcgcccgagagctgcatgtgggcccaaactcgtgtcgccgacttcatgatcacgattcagtggctactcgagaatcattcatctgaccaagatgatttgctgtgggataccctgaatcgactacatcatctgaatggctacaaatgggaagaatggtatgtcgatggtgtctatcaggacgttgtaaccgagccaagtgcaagcaaatggtacttcgggtttacgcatggagtcaatgttggccaaggcctcaaatcgccagctgttgtatggcgtttcacccacaacgagtcgctattagacactgcaaacaaggcggttgatgtcaccacgaaatatcattcttcaccgtctggcagcattctaggcgacgaaattctgcgagatcgtaaaccttacatgggcagtgagctatgcacagcagtggaaacaggttactcgttctcttacttgtatcacgccacgggtgtcaatgcattcgcagacacagcagagagggtgtatttcaacgccatcccggcgcagacggcgcacagcggctggggccatcaatacatggaccaacccaatcagccgtttgcccaatattcgcctgggtgggacattttcacaacatctaataatggcgcggcgactgtttatggtcttgaaccaacgtatccctgttgtaccgtgaaccatccacagggcttaccgaagttgaacacgcacagctgggcacgggtaggcgatgttggtcttgcccacatgcttctagtacccagccatgtccagacgaccattggagggcaccccgtgacaatagcttgcaacactagctatccattcaatgggcaactgacttacagcatcaacaccgagaccgactttgaactgcaccttcgagtcccggagtggcactcgggagcaagtgtcgcgacgagtcaaaccatctctaatgtcgttgacaccgtcgcaccgggtaacaagactggaatgcacagcatcaacatcacttcaggggaaactattgtcacttatacaatcgacatgaaaccacgagtcgagccacgagacaatggcgctgtttcggtctatgtgggcagtctactgttttcgctggatataggtccaatcacagaaactagcacactcccatatggattcaacaatgggggtggtcaaggaatggactggataccattcagcgaggcacgagactactcgtattcaagcgcaagcccgtggaatgttgcaattgaccctaatacactagtcttccacggcatgagccctcacgacgagcttcccaaggatcctttcgactacggaagccaaacagtttggatacaagtgcagggatgtacggtcaagtggcaaatgctaaagcacctgacgcccgattcacccccaaagaatccagagtgtgttggcgatgtgaagacttacgcaatgcgaccatacggcgcttcgaaagtccacatgtcggagctccccgtcatgggtcaggccaataaagcagttggcaaatga

SEQ ID NO: 5970 - protein, 1277 aa, Muscodor strobelii
  misc_feature: SGI Peptide ID NO. 561717
  misc_feature (604)..(1140): Pfam Id: PF07944 Pfam Desc: glycosyl hydrolase of function (DUF1680)
  misc_feature (160)..(613): Pfam Id: PF00854 Pfam Desc: POT family
  misc_feature (76)..(415): Pfam Id: PF07690 Pfam Desc: Major Facilitator Superfamily
  misc_feature (160)..(222): Pfam Id: PF00854 Pfam Desc: POT family
  misc_feature (3)..(457): NCBI GI: 256728818 Blast Desc: NECHADRAFT_79827 [Nectria haematococca mpVI 77-13-4]
  misc_feature (561)..(1271): NCBI GI: 226294202 Blast Desc: conserved [Paracoccidioides brasiliensis Pb18]
  misc_feature (561)..(1271): NCBI GI: 225684544 Blast Desc: conserved [Paracoccidioides brasiliensis Pb03]
  misc_feature (561)..(1271): NCBI GI: 226278932 Blast Desc: conserved [Paracoccidioides brasiliensis Pb01]
  misc_feature (52)..(453): NCBI GI: 46127187 Blast Desc: FG07971.1 [Gibberella zeae PH-1]
  misc_feature (569)..(1268): NCBI GI: 240106974 Blast Desc: CPC735_017630 [Coccidioides posadasii C735 delta SOWgp]
  misc_feature (569)..(1268): NCBI GI: 119174877 Blast Desc: CIMG_09386 [Coccidioides immitis RS]
  misc_feature (547)..(1271): NCBI GI: 115433739 Blast Desc: [Aspergillus terreus NIH2624] gi|114189858|gb|EAU31558.1| [Aspergillus terreus NIH2624]
  misc_feature (562)..(1268): NCBI GI: 242761794 Blast Desc: conserved [Talaromyces stipitatus ATCC 10500] gi|218723446|gb|EED22863.1| conserved [Talaromyces stipitatus ATCC 10500]
  misc_feature (537)..(1268): NCBI GI: 121711034 Blast Desc: ACLA_094060 [Aspergillus clavatus NRRL 1] gi|119401283|gb|EAW11707.1| ACLA_094060 [Aspergillus clavatus NRRL 1]
MVGTGPSGAGDVIGLNVHDVVEPTDEAPTTEAASEKGATADPNHVVGDENYPAPTEEEEKTLRKVADHVPWTAWLLCLVELAERTSYYGTNAVFSNYIQFPLPEGGNGSGAINPNDPETPAGALGLGGQAASGVVLAYVFIAYVIPIFGAWWADTKVGRFKAMVYGTIIGGVAHVILIGGAAPALLKAGKGAGPFFVGLILLALGAGIFKPNVAPTFVDQYTHQRKYTKVLKSGEKVLVDPETTISYMLLIYYACINLGAFIQIGSVYIEKYRGYWLTFLVPGIIYFLLPPLLAVLYKRTVRTPPQGSDLTNFVKITISALKKSKGKVFSGRLWHNVKPSTLAESGEAVTYSEKDVSDCQRTWEAITIFAYIPIWLLNDGGVGSVSSYQAAGMTTYGAPNDLLSAFNPMSSGGFMPQALDVTSYELAYARAPPHMKATVLSLFLFMTALSGALGEILIPAIRDPTLIWAWAAPAIALFVQTIIFVWRHRGVNDDTFITHEEDFVPEAKTLDENTEENKSSSWISLPEPDLFSLHCFISLRSLPELKHVSHTSMASRCNEADSNLILVKPWAFEPLALGSIHPQGWLLNALNSYADGLPGHMFSEANQTDGRRFYSFYVLHLNIGILSQATGLHTIILKGRETNMGSFLLPGESPWLQQQGGKTAEYGGLNEALPYWFNGLVPLAYSLQNKELMAQVHQVAQTVLGLQADDGWLGPEDFLGQERVLWGRYPFLLGLTQLAEANSTWSDQIVNSLQKFIKLAHDSLDSGDGYNKCKAPESCMWAQTRVADFMITIQWLLENHSSDQDDLLWDTLNRLHHLNGYKWEEWYVDGVYQDVVTEPSASKWYFGFTHGVNVGQGLKSPAVVWRFTHNESLLDTANKAVDVTTKYHSSPSGSILGDEILRDRKPYMGSELCTAVETGYSFSYLYHATGVNAFADTAERVYFNAIPAQTAHSGWGHQYMDQPNQPFAQYSPGWDIFTTSNNGAATVYGLEPTYPCCTVNHPQGLPKLNTHSWARVGDVGLAHMLLVPSHVQTTIGGHPVTIACNTSYPFNGQLTYSINTETDFELHLRVPEWHSGASVATSQTISNVVDTVAPGNKTGMHSINITSGETIVTYTIDMKPRVEPRDNGAVSVYVGSLLFSLDIGPITETSTLPYGFNNGGGQGMDWIPFSEARDYSYSSASPWNVAIDPNTLVFHGMSPHDELPKDPFDYGSQTVWIQVQGCTVKWQMLKHLTPDSPPKNPECVGDVKTYAMRPYGASKVHMSELPVMGQANKAVGK

SEQ ID NO: 5971 - DNA, 1538 bp, Muscodor strobelii
  misc_feature: SGI EST ID NO. CUFF.15059.0
  misc_feature: Variant of the nucleotide sequence at SEQ ID NO 5969
gtcggacatcaatttgcatatcttttcttgttgggtaatgcgccttctctcattgggcaatatcttcgcgagatagcatcgcaatgatcagtggcagggtatcgcgagggtgccacccgagcaccgttggaggatcattaatacgtacagtatgctgtagaaactctcgagtctcggttagaaatttcgtaatatgacttcgtatatatattttcgcgaaccttcactgttgacttcgttctgatttgtctatgacgcctggatcctccgtcctatcaggcttgtcattacaactacatcacagatttgccgacaatggttggaactggtccttccggtgcgggggacgttattggtcttaacgtccacgatgttgtcgaaccaactgatgaggcacccaccacggaggctgcgagtgaaaagggagcaactgcagaccctaatcacgtagttggcgacgagaattaccctgctccgaccgaagaggaggaaaagactctgcgtaaagtggcagatcatgttccctggacagcttggctattgtgcctcgtagagttagctgagaggacctcttactatggaaccaatgccgttttcagcaattatattcaatttccacttccagagggtggcaacggcagtggtgcaattaatcctaacgacccagaaacacctgctggtgcactcgggctgggcggccaggcggcttccggagtcgtcctagcatacgttttcatagcttatgtcattccgatatttggcgcctggtgggctgacaccaaagttggccgcttcaaagctatggtctacggcactatcattggaggggttgctcatgtgatcctaattggcggcgccgcgccggctcttttaaaagcgggaaagggagcaggccccttttttgttggtctcatacttcttgctcttggggctggaatatttaaaccgaatgtagcacccaccttcgtcgatcagtatactcatcaacgcaagtatacgaaggtcctgaagagcggcgagaaggtgcttgttgatcccgagactactatttcctacatgcttcttatctactacgcttgtatcaaccttggtgccttcatacaaatcggatcggtctacatcgagaagtatcgcggctactggcttacctttttagtgccgggcatcatctatttcctcctgcctccgctactggctgtcctctacaaacgtactgttcgaacgccaccacagggttctgacctgacaaatttcgtgaagattactatatcggcactaaagaaaagtaaaggaaaagtattttctgggagactctggcacaatgtcaagccatcaacccttgctgagagtggtgaggcggttacatactcggagaaagatgtgagcgactgtcagagaacatgggaagctatcacgatctttgcctatatccctatatggttacttaacgacggcggtgttggctccgtgtctagctaccaagcagcaggcatgacaacgtacggggctcctaacgatctcttgagtgccttcaatcc

SEQ ID NO: 5972 - DNA, 219 bp, Muscodor strobelii
  misc_feature: SGI cDNA ID NO. 561718
  misc_feature: Encodes the peptide sequence at SEQ ID NO 5973
atggccgccacccttgcggagaagagattgcaagttctcaacgaattcttcgagagggatgaagatcgaagattcgtctgcgaacagcaaattggacaaggcggccagagctatgtgtacaaagtcaggtgtgagttgcaatttacttcgaccaacagacatgagcgaagcccgagtaccaaggagattgagggttggtttctgatggcgacgctttga

SEQ ID NO: 5973 - protein, 72 aa, Muscodor strobelii
  misc_feature: SGI Peptide ID NO. 561718
MAATLAEKRLQVLNEFFERDEDRRFVCEQQIGQGGQSYVYKVRCELQFTSTNRHERSPSTKEIEGWFLMATL

SEQ ID NO: 5974 - DNA, 2703 bp, Muscodor strobelii
  misc_feature: SGI cDNA ID NO. 561720
  misc_feature: Encodes the peptide sequence at SEQ ID NO 5975
atgccgtccgagaaatcccactacgagccgccaccgcccatcccgacctacgatgaagccacgggtggcagctcgtcatcctcccggccccaatggccgccatcgccctctcccgtcgaccccagatccgaccgcgacgccgaaacccattcgcttctacctcacgacaccccatcagatcggccaaggcggccaccaaccggataccagcctccgtatgtagaatccgacgacgagggctcggaatggagcctcgaggatgacgatagcgagacgcacgaggctacgcaggtgcgaagggagatggaagagctggaggtcgaagatccgctttacggctcttcctccgcagctccttcgtcttggactaagcggatacgtttctcgggcttctccttgccacgttggaaatggtggctccctcgcatcactgtccgacttcctcgacggagcgacacatctgacgaccagaacgacgcgacgaccgagacgcgcctgagatggagactgccgagtctgaatagcggcgccgcctttctgctgctcggccgcatcatcgctttatttctagtactagggttcatctatcttcttttcatgagcgatctcttcacgagtgtgggcaagcgactaggcagccagatgttcgatccagaagacgtgcgcaaattcgtccagttaaacatcgacccagacaacatgagggatgggttacgtcactacaccggcttttcgcatttggcaggcaccgagggcgactacgctctcgccatggatgtccacaacagtttcttgaagaacggcttcgacaaagtgtccgtggatgaatactttgtctatctcaattatccaagagaagatggtcgcgccattcagatcatgtctccagatgggaagacggccacctggacggccgcactggaagagatggatgttggaggcgcaataagcggccatcagaccctcgcatttcatggccactccaagtctggagatgtaaaaggccccttgatctacgccaactatggctcgagagccgacttcaagaagctcctagacagcggcatcgacacgaaaggcgcaattgccctggtgcgctactatggcacgcaaactgaccgtgcactaaaagtcaaggctgcagagatggctggttttgccggttgcattatttacagtgatcctgccgatgatgggttccggaaaggcgaacccgctccaaagggccgctatatgccctcagatggtgtccagaggggtgcggttagcttgatgagctgggtcatcggcgatgtgctcacccctggctgggagagcacacagggaaccgccagaatgaagatcgagcagacaaaaggtcttgtgaagatcccgagtcttcccattgcttggcgagacgcccaagtgctccttcagcatctcaggggctttggagaaccttgcccagagaattggaaaggtggcgtgcccaaagtggattggtggacgggcaactcctcttcccccattgtacgtctccaaaacgagcaagatgagaacgaaatgcaaagcatctggaatatctacggcaagattgaaggtgtcgagcagggcgagaagtctatcatgatcggcaatcaccgcgatgcatgggcattcggggccacggatcccaactcgggcactgcagtcatgctggaggttgcgcgcgtctttggcgaacttgtgtcaagaggctggcggccacttcgttctatcgagtttatgagctgggatgcggaagagtacaatatgattggaagcaccgagttcgtcgagaaaaatctgaagactctacaacaggatggtttcgcctatatcaatctcgatgcagccatttccggtcaagaattccatgctgccgggtcgccaatgttccgaaagctcatacccaaggttctcgagagggtgttcgatccggtcgcaaatgcaagccttctcgctctctgggagggacgaaaggcggatctcgagtctttgggatccgggagcgactatgttgcttttcaagacatcgcaggaactagctcgctcgacatccggttcgatggagaggctcatccttaccactcttcttatgacaacttcgagttcatggagaatgttgccgaccctggtttcttttatcacggcttgttgggtcaggttttgggactgctaatccttgagcttgctgaaagacctatcatgccattcgacatgggtaattacgcgctgagtctcggtcgctacgtgcacgatttatgggattgggtcgacaaaaagggcatcaataaaggcaaaactccaaaaatcaatctgaaccctctcaaggatgcggcagacagcgtccggactactatggagcaattcgaaaaatgggagccctattgggaacaaaacattattgccaataatggttgggaacccacgggtttgactgcacgacgaaccgactacaacggtcgcatggccaaattcgagacggacttgctggaccttgagcccgaaggcggtataccaaatcggactcagttcaagcatgtcattttcggcccgcagctttggtctgggtatgacgaggcttattttcccgcaattcgggatgtcatcgaagccaaagactgggctctagcacagtccatcattgacaaaactgcaaggatcatcaagaatgcggcaacagctcttgtttcgacctcctaa

SEQ ID NO: 5975 - protein, 900 aa, Muscodor strobelii
  misc_feature: SGI Peptide ID NO. 561720
  misc_feature (328)..(423): Pfam Id: PF02225 Pfam Desc: PA domain
  misc_feature (533)..(712): Pfam Id: PF04389 Pfam Desc: Peptidase family M28
  misc_feature (762)..(899): Pfam Id: PF04253 Pfam Desc: Transferrin receptor-like dimerisation domain
  misc_feature (328)..(400): Pfam Id: PF02225 Pfam Desc: PA domain
  misc_feature (533)..(703): Pfam Id: PF04389 Pfam Desc: Peptidase family M28
  misc_feature (814)..(899): Pfam Id: PF04253 Pfam Desc: Transferrin receptor-like dimerisation domain
  misc_feature (1)..(900): NCBI GI: 256721965 Blast Desc: NECHADRAFT_104651 [Nectria haematococca mpVI 77-13-4]
  misc_feature (1)..(897): NCBI GI: 85108335 Blast Desc: NCU06285 [Neurospora crassa OR74A] gi|28924156|gb|EAA33311.1| conserved [Neurospora crassa OR74A]
  misc_feature (1)..(898): NCBI GI: 171691496 Blast Desc: protein product [Podospora anserina] gi|170945696|emb|CAP71809.1| protein product [Podospora anserina]
  misc_feature (1)..(896): NCBI GI: 46111751 Blast Desc: FG02757.1 [Gibberella zeae PH-1]
  misc_feature (1)..(900): NCBI GI: 39940304 Blast Desc: MGG_05088 [Magnaporthe grisea 70-15] gi|145010658|gb|EDJ95314.1| MGG_05088 [Magnaporthe grisea 70-15]
  misc_feature (1)..(896): NCBI GI: 154314700 Blast Desc: BC1G_04059 [Botryotinia fuckeliana B05.10] gi|150848681|gb|EDN23874.1| BC1G_04059 [Botryotinia fuckeliana B05.10]
  misc_feature (2)..(896): NCBI GI: 116195438 Blast Desc: CHGG_04317 [Chaetomium globosum CBS 148.51] gi|88180230|gb|EAQ87698.1| CHGG_04317 [Chaetomium globosum CBS 148.51]
  misc_feature (34)..(783): NCBI GI: 261357676 Blast Desc: glutamate carboxypeptidase [Verticillium albo-atrum VaMs.102]
  misc_feature (13)..(896): NCBI GI: 240108299 Blast Desc: N-acetylated-alpha-linked acidic dipeptidase, [Coccidioides posadasii C735 delta SOWgp]
  misc_feature (13)..(896): NCBI GI: 119187161 Blast Desc: CIMG_03628 [Coccidioides immitis RS]
  misc_feature (232)..(899): SWISSPROT Homolog: EC 3.4.17.21 Glutamate carboxypeptidase II
MPSEKSHYEPPPPIPTYDEATGGSSSSSRPQWPPSPSPVDPRSDRDAETHSLLPHDTPSDRPRRPPTGYQPPYVESDDEGSEWSLEDDDSETHEATQVRREMEELEVEDPLYGSSSAAPSSWTKRIRFSGFSLPRWKWWLPRITVRLPRRSDTSDDQNDATTETRLRWRLPSLNSGAAFLLLGRIIALFLVLGFIYLLFMSDLFTSVGKRLGSQMFDPEDVRKFVQLNIDPDNMRDGLRHYTGFSHLAGTEGDYALAMDVHNSFLKNGFDKVSVDEYFVYLNYPREDGRAIQIMSPDGKTATWTAALEEMDVGGAISGHQTLAFHGHSKSGDVKGPLIYANYGSRADFKKLLDSGIDTKGAIALVRYYGTQTDRALKVKAAEMAGFAGCIIYSDPADDGFRKGEPAPKGRYMPSDGVQRGAVSLMSWVIGDVLTPGWESTQGTARMKIEQTKGLVKIPSLPIAWRDAQVLLQHLRGFGEPCPENWKGGVPKVDWWTGNSSSPIVRLQNEQDENEMQSIWNIYGKIEGVEQGEKSIMIGNHRDAWAFGATDPNSGTAVMLEVARVFGELVSRGWRPLRSIEFMSWDAEEYNMIGSTEFVEKNLKTLQQDGFAYINLDAAISGQEFHAAGSPMFRKLIPKVLERVFDPVANASLLALWEGRKADLESLGSGSDYVAFQDIAGTSSLDIRFDGEAHPYHSSYDNFEFMENVADPGFFYHGLLGQVLGLLILELAERPIMPFDMGNYALSLGRYVHDLWDWVDKKGINKGKTPKINLNPLKDAADSVRTTMEQFEKWEPYWEQNIIANNGWEPTGLTARRTDYNGRMAKFETDLLDLEPEGGIPNRTQFKHVIFGPQLWSGYDEAYFPAIRDVIEAKDWALAQSIIDKTARIIKNAATALVSTS

SEQ ID NO: 5976 - DNA, 5173 bp, Muscodor strobelii
  misc_feature: SGI EST ID NO. CUFF.15444.1
  misc_feature: Variant of the nucleotide sequence at SEQ ID NO 5974
ccgtgtcgcatccctcccaacctaatctcgacagtgcatcttgactcgacacaccaccctggaagtgcctgcacatctcaaaggctagccaaccttacggtacacaaccatcaacatcccgcttcgttccatttccgtcaccgtcaccgtcaccatcaccaatcgttcccccacgacgtcgccagctccttagaattgctccctctgtctattctctatatttacgtttctctgcttcgctgccgagcagcccgttgctggacccgatgcgctgcttagccactcttgatcgctttccttaatccccttaatgcactcctttatcgcgactatccggcctgtctatcgttcactgtctatccatcctcgtccaacgccgttccatcggcctatatacatgcaacatactccctgccgctcctgatttctatgcacatacatacatcccacgtataattccgaattcgtgcctcagcgccaaccccgacgatgccgtccgagaaatcccactacgagccgccaccgcccatcccgacctacgatgaagccacgggtggcagctcgtcatcctcccggccccaatggccgccatcgccctctcccgtcgaccccagatccgaccgcgacgccgaaacccattcgcttctacctcacgacaccccatcagatcggccaaggcggccaccaaccggataccagcctccgtatgtagaatccgacgacgagggctcggaatggagcctcgaggatgacgatagcgagacgcacgaggctacgcaggtgcgaagggagatggaagagctggaggtcgaagatccgctttacggctcttcctccgcagctccttcgtcttggactaagcggatacgtttctcgggcttctccttgccacgttggaaatggtggctccctcgcatcactgtccgacttcctcgacggagcgacacatctgacgaccagaacgacgcgacgaccgagacgcgcctgagatggagactgccgagtctgaatagcggcgccgcctttctgctgctcggccgcatcatcgctttatttctagtactagggttcatctatcttcttttcatgagcgatctcttcacgagtgtgggcaagcgactaggcagccagatgttcgatccagaagacgtgcgcaaattcgtccagttaaacatcgacccagacaacatgagggatgggttacgtcactacaccggcttttcgcatttggcaggcaccgagggcgactacgctctcgccatggatgtccacaacagtttcttgaagaacggcttcgacaaagtgtccgtggatgaatactttgtctatctcaattatccaagagaagatggtcgcgccattcagatcatgtctccagatgggaagacggccacctggacggccgcactggaagagatggatgttggaggcgcaataagcggccatcagaccctcgcatttcatggccactccaagtctggagatgtaaaaggccccttgatctacgccaactatggctcgagagccgacttcaagaagctcctagacagcggcatcgacacgaaaggcgcaattgccctggtgcgctactatggcacgcaaactgaccgtgcactaaaagtcaaggctgcagagatggctggttttgccggttgcattatttacagtgatcctgccgatgatgggttccggaaaggcgaacccgctccaaagggccgctatatgccctcagatggtgtccagaggggtgcggttagcttgatgagctgggtcatcggcgatgtgctcacccctggctgggagagcacacagggaaccgccagaatgaagatcgagcagacaaaaggtcttgtgaagatcccgagtcttcccattgcttggcgagacgcccaagtgctccttcagcatctcaggggctttggagaaccttgcccagagaattggaaaggtggcgtgcccaaagtggattggtggacgggcaactcctcttcccccattgtacgtctccaaaacgagcaagatgagaacgaaatgcaaagcatctggaatatctacggcaagattgaaggtgtcgagcagggcgagaagtctatcatgatcggcaatcaccgcgatgcatgggcattcggggccacggatcccaactcgggcactgcagtcatgctggaggttgcgcgcgtctttggcgaacttgtgtcaagaggctggcggccacttcgttctatcgagtttatgagctgggatgcggaagagtacaatatgattggaagcaccgagttcgtcgagaaaaatctgaagactctacaacaggatggtttcgcctatatcaatctcgatgcagccatttccggtcaagaattccatgctgccgggtcgccaatgttccgaaagctcatacccaaggttctcgagagggtgttcgatccggtcgcaaatgcaagccttctcgctctctgggagggacgaaaggcggatctcgagtctttgggatccgggagcgactatgttgcttttcaagacatcgcaggaactagctcgctcgacatccggttcgatggagaggctcatccttaccactcttcttatgacaacttcgagttcatggagaatgttgccgaccctggtttcttttatcacggcttgttgggtcaggttttgggactgctaatccttgagcttgctgaaagacctatcatgccattcgacatgggtaattacgcgctgagtctcggtcgctacgtgcacgatttatgggattgggtcgacaaaaagggcatcaataaaggcaaaactccaaaaatcaatctgaaccctctcaaggatgcggcagacagcgtccggactactatggagcaattcgaaaaatgggagccctattgggaacaaaacattattgccaataatggttgggaacccacgggtttgactgcacgacgaaccgactacaacggtcgcatggccaaattcgagacggacttgctggaccttgagcccgaaggcggtataccaaatcggactcagttcaagcatgtcattttcggcccgcagctttggtctgggtatgacgaggcttattttcccgcaattcgggatgtcatcgaagccaaagactgggctctagcacagtccatcattgacaaaactgcaaggatcatcaagaatgcggcaacagctcttgtttcgacctcctaacccaacgtttttgcacatgactactattataatgtacgattaccaccattattagcttatctgaattaaggcatggcttggcgtttgggtgttgttttgggtcggtctgtacgctaattgcgagaccatgcacgcgtctcggaaaagggttcggacaatagcggatattttggaattgaggtcgaagacgagttactcgttacacgctccgcactgctgcgctaactaccgcacggcgtcgaaaattaagctcatttggttctatgctctcgcgccccttgaatgctggtctgggatgcttatgagaagcgtcacttgtccattgtaaccgagtgtttcttgaagtccgagtcagatcggagacaaaacagcaaccggattggagaagaggcgccagcaattgatggagaactaagaggagcgcgtgatttgtcaatggcccgatagtactagactagtcgttgccaacaataagcccaactgcatgaactacggtctcggctatccgcatggaacaattgcaatcacgcaacgagtacctaaagcaagtaatctctcgaagagtgcttataactagcggccgcttgacattgcgataatggcaatagcagtcgtggtgcggaatcggatcgaccccctgccaagattacgatacctccgcggtgggttatgtgcttccgagggagtgctcatgagccggaccttctataacgataagtcttcgagaatcgaagaatcaactgaaacgggggcaggtcaataagtgagaacgacaatggattccaaaggcggaagtaaatggctatctgtcagatcgcgtggtctatatggtccaccccttgcaccgcgttgacgccaacggaggagtaccttgctggcatgggaagacagcatcggcgtgacggccaacagacatctcacataatattaacatctctcgaaaatataatgctgaacatatttccttcttgccaagccaatacatattcactgtctctttcattttcctaccttgtgaagtcccaaagttctactacatgataagcagccatgtcttctcctctcgtgacgcttccagccgagctgcggttgatgatatatgcccatctcttcaacaccggtgacgcggagcaaggcaaaaagaagaagctatcgattcgcaacgacgatcggccatcattgctagctacaggcgaaccaccaagacttcgaaaaagatattacgtgatcgatcggtccctccacaggcaatgctacgaaacgacttacaccctcgtgactaagtccacggtcttgtgcgcaccgctcatgcgcgtgaacagacttctgtacgaagagaccgccgcattggtatacggagaacacatcttcgattttgggcccgacgccgaggccgtggcgccgtttctatcggatcttacaccgtcgagtcggaacatgatcaagcatgttgagctgaggaaagcgccttattacgagaccgagacggataggttcgagtggagggctatgtgcatgtaccttcgggaccatgcgctcatcgagacgttgaggcttgttgtacaggctggaagaccctcgagcgactgggagggcccgaaggagatgagttgtgaggaattgggattgttattgggcctgaagtttgattgtttggattggattacgcatattgcgacgctaaagggtattagggatattgagattgtgcccgagtttttctatgcggcgccgccgcagagtacgaatatgcttattggtgctgcgctcgccggatcgattgagaatgggttgacgacgcttttgagacggaagttgggtttgtctgagaatcgtgaagcccgtgcaatgctgtagctaaggcacactacacgaggtagcaatatgattttgacgattatagcaacgataaatttcacatttacctactgagacttagctactattctctatttttgaagccatccttacgtaagacatc

SEQ ID NO: 5977 - DNA, 807 bp, Muscodor strobelii
  misc_feature: SGI cDNA ID NO. 561721
  misc_feature: Elevated expression when VOC is produced
  misc_feature: Encodes the peptide sequence at SEQ ID NO 5978
atgtcttctcctctcgtgacgcttccagccgagctgcggttgatgatatatgcccatctcttcaacaccggtgacgcggagcaaggcaaaaagaagaagctatcgattcgcaacgacgatcggccatcattgctagctacaggcgaaccaccaagacttcgaaaaagatattacgtgatcgatcggtccctccacaggcaatgctacgaaacgacttacaccctcgtgactaagtccacggtcttgtgcgcaccgctcatgcgcgtgaacagacttctgtacgaagagaccgccgcattggtatacggagaacacatcttcgattttgggcccgacgccgaggccgtggcgccgtttctatcggatcttacaccgtcgagtcggaacatgatcaagcatgttgagctgaggaaagcgccttattacgagaccgagacggataggttcgagtggagggctatgtgcatgtaccttcgggaccatgcgctcatcgagacgttgaggcttgttgtacaggctggaagaccctcgagcgactgggagggcccgaaggagatgagttgtgaggaattgggattgttattgggcctgaagtttgattgtttggattggattacgcatattgcgacgctaaagggtattagggatattgagattgtgcccgagtttttctatgcggcgccgccgcagagtacgaatatgcttattggtgctgcgctcgccggatcgattgagaatgggttgacgacgcttttgagacggaagttgggtttgtctgagaatcgtgaagcccgtgcaatgctgtag

SEQ ID NO: 5978 - protein, 268 aa, Muscodor strobelii
  misc_feature: SGI Peptide ID NO. 561721
  misc_feature (5)..(258): NCBI GI: 256721963 Blast Desc: NECHADRAFT_100780 [Nectria haematococca mpVI 77-13-4]
  misc_feature (3)..(258): NCBI GI: 261357674 Blast Desc: conserved [Verticillium albo-atrum VaMs.102]
  misc_feature (5)..(258): NCBI GI: 46111747 Blast Desc: FG02755.1 [Gibberella zeae PH-1]
  misc_feature (87)..(256): NCBI GI: 154314694 Blast Desc: BC1G_04056 [Botryotinia fuckeliana B05.10] gi|150848678|gb|EDN23871.1| BC1G_04056 [Botryotinia fuckeliana B05.10]
  misc_feature (2)..(223): NCBI GI: 189204380 Blast Desc: [Pyrenophora tritici-repentis Pt-1C-BFP] gi|187985624|gb|EDU51112.1| [Pyrenophora tritici-repentis Pt-1C-BFP]
  misc_feature: Useful for introducing or modulating the production of volatile compounds
MSSPLVTLPAELRLMIYAHLFNTGDAEQGKKKKLSIRNDDRPSLLATGEPPRLRKRYYVIDRSLHRQCYETTYTLVTKSTVLCAPLMRVNRLLYEETAALVYGEHIFDFGPDAEAVAPFLSDLTPSSRNMIKHVELRKAPYYETETDRFEWRAMCMYLRDHALIETLRLVVQAGRPSSDWEGPKEMSCEELGLLLGLKFDCLDWITHIATLKGIRDIEIVPEFFYAAPPQSTNMLIGAALAGSIENGLTTLLRRKLGLSENREARAML

SEQ ID NO: 5979 - DNA, 5227 bp, Muscodor strobelii
  misc_feature: SGI EST ID NO. CUFF.15444.0
  misc_feature: Variant of the nucleotide sequence at SEQ ID NO 5977
ccgtgtcgcatccctcccaacctaatctcgacagtgcatcttgactcgacacaccaccctggaagtgcctgcacatctcaaaggctagccaaccttacggtacacaaccatcaacatcccgcttcgttccatttccgtcaccgtcaccgtcaccatcaccaatcgttcccccacgacgtcgccagctccttagaattgctccctctgtctattctctatatttacgtttctctgcttcgctgccgagcagcccgttgctggacccgatgcgctgcttagccactcttgatcgctttccttaatccccttaatgcactcctttatcgcgactatccggcctgtctatcgttcactgtctatccatcctcgtccaacgccgttccatcggcctatatacatgcaacatactccctgccgctcctgatttctatgcacatacatacatcccacgtataattccgaattcgtgcctcagcgccaaccccgacgatgccgtccgagaaatcccactacgagccgccaccgcccatcccgacctacgatgaagccacgggtggcagctcgtcatcctcccggccccaatggccgccatcgccctctcccgtcgaccccagatccgaccgcgacgccgaaacccattcgcttctacctcacgacaccccatcagatcggccaaggcggccaccaaccggataccagcctccgtatgtagaatccgacgacgagggctcggaatggagcctcgaggatgacgatagcgagacgcacgaggctacgcaggtgcgaagggagatggaagagctggaggtcgaagatccgctttacggctcttcctccgcagctccttcgtcttggactaagcggatacgtttctcgggcttctccttgccacgttggaaatggtggctccctcgcatcactgtccgacttcctcgacggagcgacacatctgacgaccagaacgacgcgacgaccgagacgcgcctgagatggagactgccgagtctgaatagcggcgccgcctttctgctgctcggccgcatcatcgctttatttctagtactagggttcatctatcttcttttcatgagcgatctcttcacgagtgtgggcaagcgactaggcagccagatgttcgatccagaagacgtgcgcaaattcgtccagttaaacatcgacccagacaacatgagggatgggttacgtcactacaccggcttttcgcatttggcaggcaccgagggcgactacgctctcgccatggatgtccacaacagtttcttgaagaacggcttcgacaaagtgtccgtggatgaatactttgtctatctcaattatccaagagaagatggtcgcgccattcagatcatgtctccagatgggaagacggccacctggacggccgcactggaagagatggatgttggaggcgcaataagcggccatcagaccctcgcatttcatggccactccaagtctggagatgtaaaaggccccttgatctacgccaactatggctcgagagccgacttcaagaagctcctagacagcggcatcgacacgaaaggcgcaattgccctggtgcgctactatggcacgcaaactgaccgtgcactaaaagtcaaggctgcagagatggctggttttgccggttgcattatttacagtgatcctgccgatgatgggttccggaaaggcgaacccgctccaaagggccgctatatgccctcagatggtgtccagaggggtgcggttagcttgatgagctgggtcatcggcgatgtgctcacccctggctgggagagcacacagggaaccgccagaatgaagatcgagcagacaaaaggtcttgtgaagatcccgagtcttcccattgcttggcgagacgcccaagtgctccttcagcatctcaggggctttggagaaccttgcccagagaattggaaaggtggcgtgcccaaagtggattggtggacgggcaactcctcttcccccattgtacgtctccaaaacgagcaagatgagaacgaaatgcaaagcatctggaatatctacggcaagattgaaggtgtcgagcagggcgagaagtctatcatgatcggcaatcaccgcgatgcatgggcattcggggccacggatcccaactcgggcactgcagtcatgctggaggttgcgcgcgtctttggcgaacttgtgtcaagaggctggcggccacttcgttctatcgagtttatgagctgggatgcggaagagtacaatatgattggaagcaccgagttcgtcgagaaaaatctgaagactctacaacaggatggtttcgcctatatcaatctcgatgcagccatttccggtcaagaattccatgctgccgggtcgccaatgttccgaaagctcatacccaaggttctcgagagggtgttcgatccggtcgcaaatgcaagccttctcgctctctgggagggacgaaaggcggatctcgagtctttgggatccgggagcgactatgttgcttttcaagacatcgcaggaactagctcgctcgacatccggttcgatggagaggctcatccttaccactcttcttatgacaacttcgagttcatggagaatgttgccgaccctggtttcttttatcacggcttgttgggtcaggttttgggactgctaatccttgagcttgctgaaagacctatcatgccattcgacatgggtaattacgcgctgagtctcggtcgctacgtgcacgatttatgggattgggtcgacaaaaagggcatcaataaaggcaaaactccaaaaatcaatctgaaccctctcaaggatgcggcagacagcgtccggactactatggagcaattcgaaaaatgggagccctattgggaacaaaacattattgccaataatggttgggaacccacgggtttgactgcacgacgaaccgactacaacggtcgcatggccaaattcgagacggacttgctggaccttgagcccgaaggcggtgtacgtgtattattgttcccgcgttcatgatttttgcttacaccgttcttatagataccaaatcggactcagttcaagcatgtcattttcggcccgcagctttggtctgggtatgacgaggcttattttcccgcaattcgggatgtcatcgaagccaaagactgggctctagcacagtccatcattgacaaaactgcaaggatcatcaagaatgcggcaacagctcttgtttcgacctcctaacccaacgtttttgcacatgactactattataatgtacgattaccaccattattagcttatctgaattaaggcatggcttggcgtttgggtgttgttttgggtcggtctgtacgctaattgcgagaccatgcacgcgtctcggaaaagggttcggacaatagcggatattttggaattgaggtcgaagacgagttactcgttacacgctccgcactgctgcgctaactaccgcacggcgtcgaaaattaagctcatttggttctatgctctcgcgccccttgaatgctggtctgggatgcttatgagaagcgtcacttgtccattgtaaccgagtgtttcttgaagtccgagtcagatcggagacaaaacagcaaccggattggagaagaggcgccagcaattgatggagaactaagaggagcgcgtgatttgtcaatggcccgatagtactagactagtcgttgccaacaataagcccaactgcatgaactacggtctcggctatccgcatggaacaattgcaatcacgcaacgagtacctaaagcaagtaatctctcgaagagtgcttataactagcggccgcttgacattgcgataatggcaatagcagtcgtggtgcggaatcggatcgaccccctgccaagattacgatacctccgcggtgggttatgtgcttccgagggagtgctcatgagccggaccttctataacgataagtcttcgagaatcgaagaatcaactgaaacgggggcaggtcaataagtgagaacgacaatggattccaaaggcggaagtaaatggctatctgtcagatcgcgtggtctatatggtccaccccttgcaccgcgttgacgccaacggaggagtaccttgctggcatgggaagacagcatcggcgtgacggccaacagacatctcacataatattaacatctctcgaaaatataatgctgaacatatttccttcttgccaagccaatacatattcactgtctctttcattttcctaccttgtgaagtcccaaagttctactacatgataagcagccatgtcttctcctctcgtgacgcttccagccgagctgcggttgatgatatatgcccatctcttcaacaccggtgacgcggagcaaggcaaaaagaagaagctatcgattcgcaacgacgatcggccatcattgctagctacaggcgaaccaccaagacttcgaaaaagatattacgtgatcgatcggtccctccacaggcaatgctacgaaacgacttacaccctcgtgactaagtccacggtcttgtgcgcaccgctcatgcgcgtgaacagacttctgtacgaagagaccgccgcattggtatacggagaacacatcttcgattttgggcccgacgccgaggccgtggcgccgtttctatcggatcttacaccgtcgagtcggaacatgatcaagcatgttgagctgaggaaagcgccttattacgagaccgagacggataggttcgagtggagggctatgtgcatgtaccttcgggaccatgcgctcatcgagacgttgaggcttgttgtacaggctggaagaccctcgagcgactgggagggcccgaaggagatgagttgtgaggaattgggattgttattgggcctgaagtttgattgtttggattggattacgcatattgcgacgctaaagggtattagggatattgagattgtgcccgagtttttctatgcggcgccgccgcagagtacgaatatgcttattggtgctgcgctcgccggatcgattgagaatgggttgacgacgcttttgagacggaagttgggtttgtctgagaatcgtgaagcccgtgcaatgctgtagctaaggcacactacacgaggtagcaatatgattttgacgattatagcaacgataaatttcacatttacctactgagacttagctactattctctatttttgaagccatccttacgtaagacatc

SEQ ID NO: 5980 - DNA, 1647 bp, Muscodor strobelii
  misc_feature: SGI cDNA ID NO. 561722
  misc_feature: Elevated expression when VOC is produced
  misc_feature: Encodes the peptide sequence at SEQ ID NO 5981
atgggcagcgcactctccacacttagacggctctttgacggagtctttaacaaagtcataccaacttcatcccagatggctacgatagcgggaattagtggcgcacaatttatgccagggaataccctctacgatgataacaaataccaatacgcgacttccacctatggtgtagagagagacctgaaccccgggctcatagtgcagccactcaataaagaggatatcgtaaggactctgaaatatgccaaggagaagaaagttgctgtcgctataaagactggtggtcaccagtattccggtgcgagctcgacatcggcgcccaacatccaactagatttagagaagacattcagagcgccatcagatcgggctatctttcgcaaagacggcaaagcttatgctcgtacgagcgtcagctggagtctcggagagttcaatgcgtggctcgcagagaacaaggtcttcgtgccccatggacaatgcactgaggtccatcttggcggtcatgttcaatcaggaggttacggccagctagctcgcagctttgggctccttggagaccaagtcttgtctttagagatcattgactccgatggcaataccaaagaagttacgaaagccagcgacccagacctattcttcgcgttcctcggcggcagtcctggaaatttcggcgtgttgactcatttcacaatccaagctcaccaagacgaggactataatgggtctagagggatgaaagcaatgtacttctacgacaccaaggtgctaaagcgcttgttagacattctagtagagatgtccgacgacgaaaatttcccacggaactacgatttgtgtatcagcgtattgagctcggcattcccgcttcttgatctatgcccaggtctagacgaacacatggcccgtaaacatccagaggttcgcagctttgagttgtatggtgagaacggactcatcgcatggccacgagccatcgcggtttatgcgcaatgggttccattcgagagcggtgacaagtgcgacatgtcatggttcgatcgtatcaaagagggctcagactggatactaggcgacaacgacgttaacgaaaagcctatgtcggagctcactggcgactggatcttccgaaacgtgcgcgagttcgagaagccctacgtcaaacgaacgtattccaccaactcacgcacactcggcaaagacggctgggcagaatgggccgtcagccgcatcgacgcaattgtacgtccggagcataaccgctgctggctgtcggcgcagttgcaatgcttcggcggcaagaactccatgttcacgcggaatgccgacaacggcaccgcgtacagctggcgagatacgagcatcgggtgcacaatggactgtttccatgaaccagagacgaaagttcgtgcagaggattggcagaaggtcaatgacgaggaagcgattgggcccaatggtatattctccaagaaggatcgtcgtgtgctttggggttcgtacggtgattggaatctcgacaatgtctgggattgctactacgatgatcgcgccaaatatgagcgattgcagaagatacgaaaagccgcagatccatatggaacttttactccaaacccattttgcgtgaagcgtgctgcatag

SEQ ID NO: 5981 - protein, 548 aa, Muscodor strobelii
  misc_feature: SGI Peptide ID NO. 561722
  misc_feature (64)..(206): Pfam Id: PF01565 Pfam Desc: FAD binding domain
  misc_feature (37)..(546): NCBI GI: 156059208 Blast Desc: SS1G_03616 [Sclerotinia sclerotiorum 1980] gi|154701403|gb|EDO01142.1| SS1G_03616 [Sclerotinia sclerotiorum 1980]
  misc_feature (26)..(544): NCBI GI: 46115502 Blast Desc: FG03593.1 [Gibberella zeae PH-1]
  misc_feature (26)..(545): NCBI GI: 256725307 Blast Desc: NECHADRAFT_104924 [Nectria haematococca mpVI 77-13-4]
  misc_feature (179)..(545): NCBI GI: 256727279 Blast Desc: NECHADRAFT_33361 [Nectria haematococca mpVI 77-13-4]
  misc_feature (270)..(545): NCBI GI: 46138347 Blast Desc: FG10688.1 [Gibberella zeae PH-1]
  misc_feature (218)..(534): NCBI GI: 169617497 Blast Desc: SNOG_11928 [Phaeosphaeria nodorum SN15] gi|160703421|gb|EAT80972.2| SNOG_11928 [Phaeosphaeria nodorum SN15]
  misc_feature (22)..(236): NCBI GI: 196155155 Blast Desc: FAD linked oxidase, N-terminal [Alteromonas macleodii 'Deep ecotype'] gi|196110934|gb|ACG64650.1| FAD linked oxidase, N-terminal [Alteromonas macleodii 'Deep ecotype']
  misc_feature (30)..(231): NCBI GI: 260430906 Blast Desc: FAD linked oxidase domain protein [Silicibacter lacuscaerulensis ITI-1157] gi|260418347|gb|EEX11605.1| FAD linked oxidase domain protein [Silicibacter lacuscaerulensis ITI-1157]
  misc_feature (42)..(234): NCBI GI: 169848644 Blast Desc: CC1G_09292 [Coprinopsis cinerea okayama7#130] gi|116507920|gb|EAU90815.1| CC1G_09292 [Coprinopsis cinerea okayama7#130]
  misc_feature (22)..(291): NCBI GI: 13475728 Blast Desc: oxidoreductase [Mesorhizobium loti MAFF303099] gi|14026484|dbj|BAB53081.1| oxidoreductase [Mesorhizobium loti MAFF303099]
  misc_feature (23)..(285): SWISSPROT Homolog: EC 1.5.3.6 (R)-6-hydroxynicotine oxidase
  misc_feature: Useful for introducing or modulating the production of volatile compounds
MGSALSTLRRLFDGVFNKVIPTSSQMATIAGISGAQFMPGNTLYDDNKYQYATSTYGVERDLNPGLIVQPLNKEDIVRTLKYAKEKKVAVAIKTGGHQYSGASSTSAPNIQLDLEKTFRAPSDRAIFRKDGKAYARTSVSWSLGEFNAWLAENKVFVPHGQCTEVHLGGHVQSGGYGQLARSFGLLGDQVLSLEIIDSDGNTKEVTKASDPDLFFAFLGGSPGNFGVLTHFTIQAHQDEDYNGSRGMKAMYFYDTKVLKRLLDILVEMSDDENFPRNYDLCISVLSSAFPLLDLCPGLDEHMARKHPEVRSFELYGENGLIAWPRAIAVYAQWVPFESGDKCDMSWFDRIKEGSDWILGDNDVNEKPMSELTGDWIFRNVREFEKPYVKRTYSTNSRTLGKDGWAEWAVSRIDAIVRPEHNRCWLSAQLQCFGGKNSMFTRNADNGTAYSWRDTSIGCTMDCFHEPETKVRAEDWQKVNDEEAIGPNGIFSKKDRRVLWGSYGDWNLDNVWDCYYDDRAKYERLQKIRKAADPYGTFTPNPFCVKRAA

SEQ ID NO: 5982 - DNA, 1030 bp, Muscodor strobelii
  misc_feature: SGI EST ID NO. CUFF.15070.0
  misc_feature: Variant of the nucleotide sequence at SEQ ID NO 5980
cgcgcaataccggtctgtagagaaatgatgaaatatataattgtaggcgtcgatggcttatgaatcaggatggtaaacttcgttcggtgttacgataatcgaaatgggcagcgcactctccacacttagacggctctttgacggagtctttaacaaagtcataccaacttcatcccagatggctacgatagcgggaattagtggcgcacaatttatgccagggaataccctctacgatgataacaaataccaatacgcgacttccacctatggtgtagagagagacctgaaccccgggctcatagtgcagccactcaataaagaggatatcgtaaggactctgaaatatgccaaggagaagaaagttgctgtcgctataaagactggtggtcaccagtattccggtgcgagctcgacatcggcgcccaacatccaactagatttagagaagacattcagagcgccatcagatcgggctatctttcgcaaagacggcaaagcttatgctcgtacgagcgtcagctggagtctcggagagttcaatgcgtggctcgcagagaacaaggtcttcgtgccccatggacaatgcactgaggtccatcttggcggtcatgttcaatcaggaggttacggccagctagctcgcagctttgggctccttggagaccaagtcttgtctttagagatcattgactccgatggcaataccaaagaagttacgaaagccagcgacccagacctattcttcgcgttcctcggcggcagtcctggaaatttcggcgtgttgactcatttcacaatccaagctcaccaagacgaggactataatgggtctagagggatgaaagcaatgtacttctacgacaccaaggtgctaaagcgcttgttagacattctagtagagatgtccgacgacgaaaatttcccacggaactacgatttgtgtatcagcgtattgagctcggcattcccgcttcttgatctatgcccaggtctagacgaacacatggcccgtaaacatccagaggtt

SEQ ID NO: 5983 - DNA, 1638 bp, Muscodor strobelii
  misc_feature: SGI cDNA ID NO. 561723
  misc_feature: Elevated expression when VOC is produced
  misc_feature: Encodes the peptide sequence at SEQ ID NO 5984
atgggactacagcagcagaacggcgctgagcatgagggcccggtcgacttagagcaggacctagccggcgttgaggtccgattgccgaccccaccgcccatgtccgcatcgccgccgcgcttgctcgtcattggtgccgggtcgcgaggcagagtatacgctagatgttcactatcgtcgagtaacggtgtgatagtcgccgtcgcggagcccgacgcatataagcgtcaagatttcgtcaagaacttcatatgggatcaaaagacttccgcccctccggagggatccagtttctcacattggaaggaatttgtcgcgtgggaactagatcgccgcgaacgagagaaggccggtcagtcggttccggagggcgtcgatgctgtattcatctgtgtacgtgatgaactgcaccgcgatgtcatcatggatcttgctcctttggatctccatatactttgcgaaaagccgcttgccaccaccctcgatgactgcaccggcatatatcacgagttagccaagcgtcagactaccaaggtcttttcaatcgggcatgtcatgagatactccccacacaacacaatgctacgcaagttaatacttgaggacaatgcaattggcagcatccttagtgtgaaccacacagaaccggtcggctactggcattttgcacatagttacgtccgtggaaattggcgtaaagagtcgacaactgctccatcgctactgacaaaaagttgccatgacattgacatcatcctttggctcatgtgctcacctccgcctggatcacaagaaactgcacatttgccaagctccgtctcgtcagcagggtctttacaattctttaggaagggtagaaagcccaaaaccgctggcgccgctactaactgcctatcttgcccagccgaaccagattgtatttactcaagcaagagaatttaccatggatcgagacatctaggagtcagtactggcaatactcggtggccgatcagtgtagtgcttcccgatatcgagagttctgggggcgacattggtcaggctcaggccaaaatgctgtcaatactagccgaggactatgataaatcaacccctcaggaggagatcgacagtaagaactggtggggacgttgcgtctttgagtccgacaacgatgtgtgtgacgaacaagtggtgacgatcacgtgggaagacgagcctcttccatcctcaagttccgtggcacaggatgcgttggggacaagaggcgctaagcaggcgacgttccacatgattgcgcagaccaagaaacagtgtcaacgttatacgtatgtgtacggtactgagggagagatctatgcagactcgagcacgatcaccgtcgaggatttcaaaacctgcacgaccaagacgtacaagcctaagctggaaagcctaggtcatggtggcggcgatcatggcctcacaagacagtttgtactcgctgtcgataaggtgaagaatcatggctggaaggcgcaggatgcacagcgcgaattcattggttgcgatcttgaggaaatcataagaagtcatgctttagtattcgcggcggaggaagcgaggcgagacaagcaaacggtcgactggaaggcgtggtggaataagaatgttacttga

SEQ ID NO: 5984 - protein, 545 aa, Muscodor strobelii
  misc_feature: SGI Peptide ID NO. 561723
  misc_feature (39)..(184): Pfam Id: PF01408 Pfam Desc: Oxidoreductase family, NAD-binding Rossmann fold
  misc_feature (119)..(184): Pfam Id: PF01408 Pfam Desc: Oxidoreductase family, NAD-binding Rossmann fold
  misc_feature (35)..(544): NCBI GI: 171680371 Blast Desc: protein product [Podospora anserina] gi|170939812|emb|CAP65038.1| protein product [Podospora anserina]
  misc_feature (40)..(544): NCBI GI: 116206840 Blast Desc: CHGG_02713 [Chaetomium globosum CBS 148.51] gi|88183310|gb|EAQ90778.1| CHGG_02713 [Chaetomium globosum CBS 148.51]
  misc_feature (34)..(544): NCBI GI: 256735311 Blast Desc: [Nectria haematococca mpVI 77-13-4]
  misc_feature (34)..(544): NCBI GI: 164422372 Blast Desc: NCU10059 [Neurospora crassa OR74A] gi|157069563|gb|EAA34469.2| conserved [Neurospora crassa OR74A]
  misc_feature (28)..(545): NCBI GI: 156062030 Blast Desc: SS1G_01129 [Sclerotinia sclerotiorum 1980] gi|154696467|gb|EDN96205.1| SS1G_01129 [Sclerotinia sclerotiorum 1980]
  misc_feature (34)..(542): NCBI GI: 46105713 Blast Desc: FG00389.1 [Gibberella zeae PH-1]
  misc_feature (40)..(544): NCBI GI: 145603051 Blast Desc: MGG_13811 [Magnaporthe grisea 70-15] gi|145011379|gb|EDJ96035.1| MGG_13811 [Magnaporthe grisea 70-15]
  misc_feature (37)..(544): NCBI GI: 189204616 Blast Desc: streptomycin biosynthesis protein StrI [Pyrenophora tritici-repentis Pt-1C-BFP] gi|187985742|gb|EDU51230.1| streptomycin biosynthesis protein StrI [Pyrenophora Pt-1C-BFP]
  misc_feature (27)..(544): NCBI GI: 46117400 Blast Desc: FG04542.1 [Gibberella zeae PH-1]
  misc_feature (28)..(541): NCBI GI: 225556489 Blast Desc: streptomycin biosynthesis protein StrI [Ajellomyces capsulatus G186AR]
  misc_feature: Useful for introducing or modulating the production of volatile compounds
MGLQQQNGAEHEGPVDLEQDLAGVEVRLPTPPPMSASPPRLLVIGAGSRGRVYARCSLSSSNGVIVAVAEPDAYKRQDFVKNFIWDQKTSAPPEGSSFSHWKEFVAWELDRREREKAGQSVPEGVDAVFICVRDELHRDVIMDLAPLDLHILCEKPLATTLDDCTGIYHELAKRQTTKVFSIGHVMRYSPHNTMLRKLILEDNAIGSILSVNHTEPVGYWHFAHSYVRGNWRKESTTAPSLLTKSCHDIDIILWLMCSPPPGSQETAHLPSSVSSAGSLQFFRKGRKPKTAGAATNCLSCPAEPDCIYSSKRIYHGSRHLGVSTGNTRWPISVVLPDIESSGGDIGQAQAKMLSILAEDYDKSTPQEEIDSKNWWGRCVFESDNDVCDEQVVTITWEDEPLPSSSSVAQDALGTRGAKQATFHMIAQTKKQCQRYTYVYGTEGEIYADSSTITVEDFKTCTTKTYKPKLESLGHGGGDHGLTRQFVLAVDKVKNHGWKAQDAQREFIGCDLEEIIRSHALVFAAEEARRDKQTVDWKAWWNKNVT

SEQ ID NO: 5985 - DNA, 2299 bp, Muscodor strobelii
  misc_feature: SGI EST ID NO. CUFF.15123.0
  misc_feature: Variant of the nucleotide sequence at SEQ ID NO 5983
tagctagaatgctaacgcagtagcatcggatagtcgcagtggattatcgttgcttggattctatgccccgcgccgaagctaatctatctcgtgttgtcaactggctcagagaagcagtcgttgctgagtggatgaatagatattctcggctgcccaacaagccatttcattctacagatcctaatcgcatcgcatgcactcactttactctagagatggtactttcttatttcttagtattgttagctatatcacgctaacacatactgtcgtaacatactggagagcgccacgatctgaagtagtctccatttagttgcttgactaagggagtttcttaatcgatcgagttcacctagctatctttcactacatctctttccaagcttgcctaccgttcctcccgttagagtcaatatgggactacagcagcagaacggcgctgagcatgagggcccggtcgacttagagcaggacctagccggcgttgaggtccgattgccgaccccaccgcccatgtccgcatcgccgccgcgcttgctcgtcattggtgccgggtcgcgaggcagagtatacgctagatgttcactatcgtcgagtaacggtgtgatagtcgccgtcgcggagcccgacgcatataagcgtcaagatttcgtcaagaacttcatatgggatcaaaagacttccgcccctccggagggatccagtttctcacattggaaggaatttgtcgcgtgggaactagatcgccgcgaacgagagaaggccggtcagtcggttccggagggcgtcgatgctgtattcatctgtgtacgtgatgaactgcaccgcgatgtcatcatggatcttgctcctttggatctccatatactttgcgaaaagccgcttgccaccaccctcgatgactgcaccggcatatatcacgagttagccaagcgtcagactaccaaggtcttttcaatcgggcatgtcatgagatactccccacacaacacaatgctacgcaagttaatacttgaggacaatgcaattggcagcatccttagtgtgaaccacacagaaccggtcggctactggcattttgcacatagttacgtccgtggaaattggcgtaaagagtcgacaactgctccatcgctactgacaaaaagttgccatgacattgacatcatcctttggctcatgtgctcacctccgcctggatcacaagaaactgcacatttgccaagctccgtctcgtcagcagggtctttacaattctttaggaagggtagaaagcccaaaaccgctggcgccgctactaactgcctatcttgcccagccgaaccagattgtatttactcaagcaagagaatttaccatggatcgagacatctaggagtcagtactggcaatactcggtggccgatcagtgtagtgcttcccgatatcgagagttctgggggcgacattggtcaggctcaggccaaaatgctgtcaatactagccgaggactatgataaatcaacccctcaggaggagatcgacagtaagaactggtggggacgttgcgtctttgagtccgacaacgatgtgtgtgacgaacaagtggtgacgatcacgtgggaagacgagcctcttccatcctcaagttccgtggcacaggatgcgttggggacaagaggcgctaagcaggcgacgttccacatgattgcgcagaccaagaaacagtgtcaacgttatacgtatgtgtacggtactgagggagagatctatgcagactcgagcacgatcaccgtcgaggatttcaaaacctgcacgaccaagacgtacaagcctaagctggaaagcctaggtcatggtggcggcgatcatggcctcacaagacagtttgtactcgctgtcgataaggtgaagaatcatggctggaaggcgcaggatgcacagcgcgaattcattggttgcgatcttgaggaaatcataagaagtcatgctttagtattcgcggcggaggaagcgaggcgagacaagcaaacggtcgactggaaggcgtggtggaataagaatgttacttgatgtaaaataactagcttaggtgcttttgcgaagaaccggcatatttcgcagatactagtaggtacttcatcccagttactttacattatactattgctgggctcagtatgtgctcaacttccaacgccggttctgggacgcccgatcgagccatgctgttataatcattacggtttgttcgtaatctcgttagttcagtatcttttccttcttctgcaattcgttacgagttcacagatgccgg

SEQ ID NO: 5986 - DNA, 891 bp, Muscodor strobelii
  misc_feature: SGI cDNA ID NO. 561724
  misc_feature: Encodes the peptide sequence at SEQ ID NO 5987
atgtctgactctcagttcacagagggacacacagtacccgttacacatcaggaattccccggcaaggaacacaagctaccaatccaggctcagtatgatatgctacccgatgatgaagggggttatcagaagtacagagcggctggaaaactagaaggcaagaaagcgattattacaggcggcgactcgggcattggacgagcaaccgctctcctttttgccatggagggagccgatgtcttcatcgcttatcttcctgacgaggagaaagacgcacaagagacaaagaagctcgtggaaagtcacgatcgagcctgtcacttacatgcaaccgatctcacaagccaagaaaactgcaaaaagcttgttgctgaggcaatgaaagccatgggcgctatcaacatcctgttcaacaacgcagcgtatcaaatgatgaccaaagacattctcgacataaccgaagatcagtggttacatactttcaacacaaatatccatccattgttctatttgtcgaagtacacgctaccacatatgaagcatggagatacgattgtgaacaatgctagcatcaatgcatatgttggtcgacctgacttactagactacacatcgacgaaaggtgctatcgtttctttcacgcgtgggcttagcaatcagttcgtctctaaaggcattcgtgtgaatgctgttgcgccggggccggtttggacgccattgattcctgcaacgatgaacgaggaggcacaaaagtctttcacgagcccaatggggcgcccttcgcagccgagcgagattgcgacatgtgttgtgtttcttgcgtctaaggatagttcctcgatcagtggacagacgatacactgcaatggtggcacgattgtcaatggttag

SEQ ID NO: 5987 - protein, 296 aa, Muscodor strobelii
  misc_feature: SGI Peptide ID NO. 561724
  misc_feature (54)..(222): Pfam Id: PF00106 Pfam Desc: short chain dehydrogenase
  misc_feature (2)..(296): NCBI GI: 116180250 Blast Desc: CHGG_00753 [Chaetomium globosum CBS 148.51] gi|88185050|gb|EAQ92518.1| CHGG_00753 [Chaetomium globosum CBS 148.51]
  misc_feature (1)..(296): NCBI GI: 171687963 Blast Desc: protein product [Podospora anserina] gi|170943943|emb|CAP69595.1| protein product [Podospora anserina]
  misc_feature (5)..(296): NCBI GI: 189196160 Blast Desc: 3-oxoacyl-(acyl-carrier-protein) reductase [Pyrenophora tritici-repentis Pt-1C-BFP] gi|187980297|gb|EDU46923.1| 3-oxoacyl-(acyl-carrier-protein)
  misc_feature (1)..(296): NCBI GI: 46107390 Blast Desc: FG00578.1 [Gibberella zeae PH-1]
  misc_feature (1)..(296): NCBI GI: 85111072 Blast Desc: NCU09821 [Neurospora crassa OR74A] gi|28925488|gb|EAA34525.1| NCU09821 [Neurospora crassa OR74A]
  misc_feature (1)..(296): NCBI GI: 256735215 Blast Desc: [Nectria haematococca mpVI 77-13-4]
  misc_feature (2)..(296): NCBI GI: 169604570 Blast Desc: SNOG_05299 [Phaeosphaeria nodorum SN15] gi|111066570|gb|EAT87690.1| SNOG_05299 [Phaeosphaeria nodorum SN15]
  misc_feature (6)..(292): NCBI GI: 156048963 Blast Desc: SS1G_08188 [Sclerotinia sclerotiorum 1980] gi|154692587|gb|EDN92325.1| SS1G_08188 [Sclerotinia sclerotiorum 1980]
  misc_feature (2)..(294): NCBI GI: 154295431 Blast Desc: BC1G_13194 [Botryotinia fuckeliana B05.10] gi|150844062|gb|EDN19255.1| BC1G_13194 [Botryotinia fuckeliana B05.10]
  misc_feature (4)..(296): NCBI GI: 255954513 Blast Desc: Pc21g09730 [Penicillium chrysogenum Wisconsin 54-1255] gi|211589720|emb|CAP95870.1| Pc21g09730 [Penicillium chrysogenum Wisconsin 54-1255]
  misc_feature (50)..(294): SWISSPROT Homolog: EC 1.1.1.100 3-oxoacyl-[acyl-carrier-protein] reductase
MSDSQFTEGHTVPVTHQEFPGKEHKLPIQAQYDMLPDDEGGYQKYRAAGKLEGKKAIITGGDSGIGRATALLFAMEGADVFIAYLPDEEKDAQETKKLVESHDRACHLHATDLTSQENCKKLVAEAMKAMGAINILFNNAAYQMMTKDILDITEDQWLHTFNTNIHPLFYLSKYTLPHMKHGDTIVNNASINAYVGRPDLLDYTSTKGAIVSFTRGLSNQFVSKGIRVNAVAPGPVWTPLIPATMNEEAQKSFTSPMGRPSQPSEIATCVVFLASKDSSSISGQTIHCNGGTIVNG

SEQ ID NO: 5988 - DNA, 1386 bp, Muscodor strobelii
  misc_feature: SGI EST ID NO. CUFF.15095.0
  misc_feature: Variant of the nucleotide sequence at SEQ ID NO 5986
cagacatattctatacaggcactcttgacgatcgtcctggaatttgcatttgcctgcatacgaacttctgttcacgaccttgagacgcagcctatatcatgtctgactctcagttcacagagggacacacagtacccgttacacatcaggaattccccggcaaggaacacaagctaccaatccaggctcagtatgatatgctacccgatgatgaagggggttatcagaagtacagagcggctggaaaactagaaggcaagaaagcgattattacaggcggcgactcgggcattggacgagcaaccgctctcctttttgccatggagggagccgatgtcttcatcgcttatcttcctgacgaggagaaagacgcacaagagacaaagaagctcgtggaaagtcacgatcgagcctgtcacttacatgcaaccgatctcacaagccaagaaaactgcaaaaagcttgttgctgaggcaatgaaagccatgggcgctatcaacatcctgttcaacaacgcagcgtatcaaatgatgaccaaagacattctcgacataaccgaagatcagtggttacatactttcaacacaaatatccatccattgttctatttgtcgaagtacacgctaccacatatgaagcatggagatacgattgtgaacaatgctagcatcaatgcatatgttggtcgacctgacttactagactacacatcgacgaaaggtgctatcgtttctttcacgcgtgggcttagcaatcagttcgtctctaaaggcattcgtgtgaatgctgttgcgccggggccggtttggacgccattgattcctgcaacgatgaacgaggaggcacaaaagtctttcacgagcccaatggtataaccttcgcctgccttttaccatatagttctgtattacaatttgctgacactgcgggtttataggggcgcccttcgcagccgagcgagattgcgacatgtgttgtgtttcttgcgtctaaggatagttcctcgatcagtggacagacgatacactgcaatggtggcacgattgtcaatggttagatgtatttgtgctaagtcgggttgttaatagtattaaaaggagatgtaggaggcgaaacctctcccttcgcaacctccatactactagtagaggaccaaacctcccatcatgaacaactaggaatatgaaatccaatatcaagtctgcaatccacttctcgtacgcgtcctgcctaacacttcatcatttacaatagccgaaggaagaaaatgaagaccgagcagtgttgtgtcatttttcgatctccacttactgttatgtagccttggcatgtgaataaaactgatgcaactgcgatagaacgatatatcgtaaggttgtattaaat

SEQ ID NO: 5989 - DNA, 873 bp, Muscodor strobelii
  misc_feature: SGI cDNA ID NO. 561725
  misc_feature: Reduced expression when VOC is produced
  misc_feature: Encodes the peptide sequence at SEQ ID NO 5990
atggcaggacacacagtacccgttacacatcaggaattccccggcaaggaacacaagctaccaatccaggctcagtatgatatgctacccgatgatgaagggggttatcagaagtacagagcggctggaaaactagaaggcaagaaagcgattattacaggcggcgactcgggcattggacgagcaaccgctctcctttttgccatggagggagccgatgtcttcatcgcttatcttcctgacgaggagaaagacgcacaagagacaaagaagctcgtggaaagtcacgatcgagcctgtcacttacatgcaaccgatctcacaagccaagaaaactgcaaaaagcttgttgctgaggcaatgaaagccatgggcgctatcaacatcctgttcaacaacgcagcgtatcaaatgatgaccaaagacattctcgacataaccgaagatcagtggttacatactttcaacacaaatatccatccattgttctatttgtcgaagtacacgctaccacatatgaagcatggagatacgattgtgaacaatgctagcatcaatgcatatgttggtcgacctgacttactagactacacatcgacgaaaggtgctatcgtttctttcacgcgtgggcttagcaatcagttcgtctctaaaggcattcgtgtgaatgctgttgcgccggggccggtttggacgccattgattcctgcaacgatgaacgaggaggcacaaaagtctttcacgagcccaatggggcgcccttcgcagccgagcgagattgcgacatgtgttgtgtttcttgcgtctaaggatagttcctcgatcagtggacagacgatacactgcaatggtggcacgattgtcaatggttag

SEQ ID NO: 5990 - protein, 290 aa, Muscodor strobelii
  misc_feature: SGI Peptide ID NO. 561725
  misc_feature (48)..(216): Pfam Id: PF00106 Pfam Desc: short chain dehydrogenase
  misc_feature (2)..(290): NCBI GI: 171687963 Blast Desc: protein product [Podospora anserina] gi|170943943|emb|CAP69595.1| protein product [Podospora anserina]
  misc_feature (2)..(290): NCBI GI: 116180250 Blast Desc: CHGG_00753 [Chaetomium globosum CBS 148.51] gi|88185050|gb|EAQ92518.1| CHGG_00753 [Chaetomium globosum CBS 148.51]
  misc_feature (3)..(290): NCBI GI: 189196160 Blast Desc: 3-oxoacyl-(acyl-carrier-protein) reductase [Pyrenophora tritici-repentis Pt-1C-BFP] gi|187980297|gb|EDU46923.1| 3-oxoacyl-(acyl-carrier-protein)
  misc_feature (6)..(290): NCBI GI: 46107390 Blast Desc: FG00578.1 [Gibberella zeae PH-1]
  misc_feature (3)..(290): NCBI GI: 85111072 Blast Desc: NCU09821 [Neurospora crassa OR74A] gi|28925488|gb|EAA34525.1| NCU09821 [Neurospora crassa OR74A]
  misc_feature (6)..(290): NCBI GI: 256735215 Blast Desc: [Nectria haematococca mpVI 77-13-4]
  misc_feature (3)..(290): NCBI GI: 169604570 Blast Desc: SNOG_05299 [Phaeosphaeria nodorum SN15] gi|111066570|gb|EAT87690.1| SNOG_05299 [Phaeosphaeria nodorum SN15]
  misc_feature (3)..(286): NCBI GI: 156048963 Blast Desc: SS1G_08188 [Sclerotinia sclerotiorum 1980] gi|154692587|gb|EDN92325.1| SS1G_08188 [Sclerotinia sclerotiorum 1980]
  misc_feature (3)..(288): NCBI GI: 154295431 Blast Desc: BC1G_13194 [Botryotinia fuckeliana B05.10] gi|150844062|gb|EDN19255.1| BC1G_13194 [Botryotinia fuckeliana B05.10]
  misc_feature (3)..(290): NCBI GI: 255954513 Blast Desc: Pc21g09730 [Penicillium chrysogenum Wisconsin 54-1255] gi|211589720|emb|CAP95870.1| Pc21g09730 [Penicillium chrysogenum Wisconsin 54-1255]
  misc_feature (44)..(288): SWISSPROT Homolog: EC 1.1.1.100 3-oxoacyl-[acyl-carrier-protein] reductase
  misc_feature: Useful for introducing or modulating the production of volatile compounds
MAGHTVPVTHQEFPGKEHKLPIQAQYDMLPDDEGGYQKYRAAGKLEGKKAIITGGDSGIGRATALLFAMEGADVFIAYLPDEEKDAQETKKLVESHDRACHLHATDLTSQENCKKLVAEAMKAMGAINILFNNAAYQMMTKDILDITEDQWLHTFNTNIHPLFYLSKYTLPHMKHGDTIVNNASINAYVGRPDLLDYTSTKGAIVSFTRGLSNQFVSKGIRVNAVAPGPVWTPLIPATMNEEAQKSFTSPMGRPSQPSEIATCVVFLASKDSSSISGQTIHCNGGTIVNG

SEQ ID NO: 5991 - DNA, 1318 bp, Muscodor strobelii
  misc_feature: SGI EST ID NO. CUFF.15095.1
  misc_feature: Variant of the nucleotide sequence at SEQ ID NO 5989
cagacatattctatacaggcactcttgacgatcgtcctggaatttgcatttgcctgcatacgaacttctgttcacgaccttgagacgcagcctatatcatgtctgactctcagttcacagagggacacacagtacccgttacacatcaggaattccccggcaaggaacacaagctaccaatccaggctcagtatgatatgctacccgatgatgaagggggttatcagaagtacagagcggctggaaaactagaaggcaagaaagcgattattacaggcggcgactcgggcattggacgagcaaccgctctcctttttgccatggagggagccgatgtcttcatcgcttatcttcctgacgaggagaaagacgcacaagagacaaagaagctcgtggaaagtcacgatcgagcctgtcacttacatgcaaccgatctcacaagccaagaaaactgcaaaaagcttgttgctgaggcaatgaaagccatgggcgctatcaacatcctgttcaacaacgcagcgtatcaaatgatgaccaaagacattctcgacataaccgaagatcagtggttacatactttcaacacaaatatccatccattgttctatttgtcgaagtacacgctaccacatatgaagcatggagatacgattgtgaacaatgctagcatcaatgcatatgttggtcgacctgacttactagactacacatcgacgaaaggtgctatcgtttctttcacgcgtgggcttagcaatcagttcgtctctaaaggcattcgtgtgaatgctgttgcgccggggccggtttggacgccattgattcctgcaacgatgaacgaggaggcacaaaagtctttcacgagcccaatggggcgcccttcgcagccgagcgagattgcgacatgtgttgtgtttcttgcgtctaaggatagttcctcgatcagtggacagacgatacactgcaatggtggcacgattgtcaatggttagatgtatttgtgctaagtcgggttgttaatagtattaaaaggagatgtaggaggcgaaacctctcccttcgcaacctccatactactagtagaggaccaaacctcccatcatgaacaactaggaatatgaaatccaatatcaagtctgcaatccacttctcgtacgcgtcctgcctaacacttcatcatttacaatagccgaaggaagaaaatgaagaccgagcagtgttgtgtcatttttcgatctccacttactgttatgtagccttggcatgtgaataaaactgatgcaactgcgatagaacgatatatcgtaaggttgtattaaat

SEQ ID NO: 5992 - DNA, 630 bp, Muscodor strobelii
  misc_feature: SGI cDNA ID NO. 561726
  misc_feature: Reduced expression when VOC is produced
  misc_feature: Encodes the peptide sequence at SEQ ID NO 5993
atgacaagtcacaagtatctcggtttcgataccaatggccccggaactacggttttcatcattcaactcgtgtttcttgtcctagcctgggtgacatcgatcatgcgcgcatgggtgaagatcttcattctgaagaaagtcactgttgacgactatctcatgctggtggctcttcttggatactcagtgactgcatatttcactttcagcgccattgtagatggcggtttaggactctccccatctgttctcagcttagacagctcagctgtgagcctcagaggctggtttggcaacatggtcttatcaggaccagtatcggcattgtttcgaatttctatcgctctgttcctcctgcaaatagccgtacttaagtggcatcgagttatccttcaggctataatcacccttgcggccttgaccagcgttatatacttcttcattgtgctattacaatgctctccgccttcttatttctggcaaagattgatggaagggtcatcaggcagttgcagtaaccaaagtgccgtccacgttgcgagcttggtattctgttcattcggcgtagcgacagacttggcgctcggcatccttccagctgcgagtaagcaaagaatatttacttgttga

SEQ ID NO: 5993 - protein, 209 aa, Muscodor strobelii
  misc_feature: SGI Peptide ID NO. 561726
  misc_feature (17)..(201): NCBI GI: 261356809 Blast Desc: conserved [Verticillium albo-atrum VaMs.102]
  misc_feature (11)..(199): NCBI GI: 189205935 Blast Desc: conserved [Pyrenophora tritici-repentis Pt-1C-BFP] gi|187975395|gb|EDU42021.1| conserved [Pyrenophora tritici-repentis Pt-1C-BFP]
  misc_feature (15)..(201): NCBI GI: 261357490 Blast Desc: conserved [Verticillium albo-atrum VaMs.102]
  misc_feature (18)..(199): NCBI GI: 49409616 Blast Desc: polytopic membrane protein [Aspergillus flavus]
  misc_feature (18)..(199): NCBI GI: 169779773 Blast Desc: [Aspergillus oryzae RIB40] gi|83773090|dbj|BAE63218.1| protein product [Aspergillus oryzae]
  misc_feature (12)..(201): NCBI GI: 169763664 Blast Desc: [Aspergillus oryzae RIB40] gi|83770760|dbj|BAE60893.1| protein product [Aspergillus oryzae]
  misc_feature (7)..(137): NCBI GI: 256725237 Blast Desc: NECHADRAFT_88487 [Nectria haematococca mpVI 77-13-4]
  misc_feature (12)..(200): NCBI GI: 121716486 Blast Desc: ACLA_074330 [Aspergillus clavatus NRRL 1] gi|119403979|gb|EAW14396.1| ACLA_074330 [Aspergillus clavatus NRRL 1]
  misc_feature (25)..(199): NCBI GI: 119497783 Blast Desc: NFIA_033180 [Neosartorya fischeri NRRL 181] gi|119413813|gb|EAW23752.1| conserved [Neosartorya fischeri NRRL 181]
  misc_feature (16)..(200): NCBI GI: 156039830 Blast Desc: SS1G_12051 [Sclerotinia sclerotiorum 1980] gi|154696108|gb|EDN95846.1| SS1G_12051 [Sclerotinia sclerotiorum 1980]
  misc_feature: Useful for introducing or modulating the production of volatile compounds
MTSHKYLGFDTNGPGTTVFIIQLVFLVLAWVTSIMRAWVKIFILKKVTVDDYLMLVALLGYSVTAYFTFSAIVDGGLGLSPSVLSLDSSAVSLRGWFGNMVLSGPVSALFRISIALFLLQIAVLKWHRVILQAIITLAALTSVIYFFIVLLQCSPPSYFWQRLMEGSSGSCSNQSAVHVASLVFCSFGVATDLALGILPAASKQRIFTC

SEQ ID NO: 5994 - DNA, 937 bp, Muscodor strobelii
  misc_feature: SGI EST ID NO. CUFF.15120.0
  misc_feature: Variant of the nucleotide sequence at SEQ ID NO 5992
cagcccttggtttgggtctcacgccattgaatttttcttctttcccctctaatgtttatatcgcattgtactggaacggcttgtaaaactgtccaccccgtactctctctataacacccaaatcttccggcacaagtatttctccgcggtgtcaaatacgacatagtgattatatatcgattcagtagcatacagtgctccctcttctgagaacatctcttgttatataaatcgaagcatctatcttgcgcttcgaccctaacgattcggtctcggttccaatttacttctttacttcagcagacgtagtacgctcacggtttcacctatttcgatgacaagtcacaagtatctcggtttcgataccaatggccccggaactacggttttcatcattcaactcgtgtttcttgtcctagcctgggtgacatcgatcatgcgcgcatgggtgaagatcttcattctgaagaaagtcactgttgacgactatctcatgctggtggctcttcttggatactcagtgactgcatatttcactttcagcgccattgtagatggcggtttaggactctccccatctgttctcagcttagacagctcagctgtgagcctcagaggctggtttggcaacatggtcttatcaggaccagtatcggcattgtttcgaatttctatcgctctgttcctcctgcaaatagccgtacttaagtggcatcgagttatccttcaggctataatcacccttgcggccttgaccagcgttatatacttcttcattgtgctattacaatgctctccgccttcttatttctggcaaagattgatggaagggtcatcaggcagttgcagtaaccaaagtgccgtccacgttgcgagcttggtattctgttcattcggcgtagcgacagacttggcgctcggcatccttccagctgcg

SEQ ID NO: 5995 - DNA, 726 bp, Muscodor strobelii
  misc_feature: SGI cDNA ID NO. 561728
  misc_feature: Elevated expression when VOC is produced
  misc_feature: Encodes the peptide sequence at SEQ ID NO 5996
atgcagctgtttactactcttctctctcttgtcgctgcaggcgcctccgccgtgctcgcacagagcactgtgactgggaagcttggagatgcagctgtcgttacgagcaatcctattggaaaggcatccattgcgacgcttcctaatgagcctttctggcaggcaggcaccttgaatggaaacgtcaaaggatccttgaaagccgtttctggtgccaatggagctggtgttgatttcgaagcaacattctcgaatttgccaactgagggagggcctttcacttttcatctgcatgtcgaccccgtaaacagcgaaggcaactgcactgctacactggctcatctcgatcccttcgtacgaggtgaagacccgacatgcgattcatcaagcccaaagacatgccaggttggagaccttagcggcaagtacggcaaaatcacgtcggacccttacactgtcaagttccatgacgacttcacttcgatgcaagaaggcccaggatcttatttccttaatcgcagcctggtcgtccacttcgccaacaaaacgcgaatcacatgtgcaaacttcagtcccgtacaaggaaacggcacatttactcctactagtgctacacccacaccaacggccactactaccccagctcccactgctggtgcaatgatcgtgaaggccaccggaggtctttctctgctttctctcatggtcatgctattctgtctttga

SEQ ID NO: 5996 - protein, 241 aa, Muscodor strobelii
  misc_feature: SGI Peptide ID NO. 561728
  misc_feature (30)..(226): NCBI GI: 46107386 Blast Desc: FG00576.1 [Gibberella zeae PH-1]
  misc_feature (3)..(241): NCBI GI: 154313797 Blast Desc: BC1G_05748 [Botryotinia fuckeliana B05.10] gi|150849330|gb|EDN24523.1| BC1G_05748 [Botryotinia fuckeliana B05.10]
  misc_feature (5)..(195): NCBI GI: 156061403 Blast Desc: SS1G_02845 [Sclerotinia sclerotiorum 1980] gi|154700248|gb|EDN99986.1| SS1G_02845 [Sclerotinia sclerotiorum 1980]
  misc_feature (30)..(215): NCBI GI: 256734498 Blast Desc: NECHADRAFT_74826 [Nectria haematococca mpVI 77-13-4]
  misc_feature (4)..(190): NCBI GI: 145615685 Blast Desc: MGG_13177 [Magnaporthe grisea 70-15] gi|145022470|gb|EDK06490.1| MGG_13177 [Magnaporthe grisea 70-15]
  misc_feature (8)..(211): NCBI GI: 171687569 Blast Desc: protein product [Podospora anserina] gi|170943746|emb|CAP69398.1| protein product [Podospora anserina]
  misc_feature (8)..(211): NCBI GI: 85118171 Blast Desc: NCU03013 [Neurospora crassa OR74A] gi|9367280|emb|CAB97297.1| related to cytosolic Cu/Zn superoxide dismutase [Neurospora crassa] gi|28927207|gb|EAA36163.1| crassa
  misc_feature (7)..(190): NCBI GI: 258568866 Blast Desc: conserved [Uncinocarpus reesii 1704] gi|237906623|gb|EEP81024.1| conserved [Uncinocarpus reesii 1704]
  misc_feature (27)..(222): NCBI GI: 169607627 Blast Desc: SNOG_06872 [Phaeosphaeria nodorum SN15] gi|111064403|gb|EAT85523.1| SNOG_06872 [Phaeosphaeria nodorum SN15]
  misc_feature (23)..(193): NCBI GI: 145608140 Blast Desc: MGG_03350 [Magnaporthe grisea 70-15] gi|145015639|gb|EDK00129.1| MGG_03350 [Magnaporthe grisea 70-15]
  misc_feature: Useful for introducing or modulating the production of volatile compounds
MQLFTTLLSLVAAGASAVLAQSTVTGKLGDAAVVTSNPIGKASIATLPNEPFWQAGTLNGNVKGSLKAVSGANGAGVDFEATFSNLPTEGGPFTFHLHVDPVNSEGNCTATLAHLDPFVRGEDPTCDSSSPKTCQVGDLSGKYGKITSDPYTVKFHDDFTSMQEGPGSYFLNRSLVVHFANKTRITCANFSPVQGNGTFTPTSATPTPTATTTPAPTAGAMIVKATGGLSLLSLMVMLFCL

SEQ ID NO: 5997 - DNA, 1715 bp, Muscodor strobelii
  misc_feature: SGI EST ID NO. CUFF.15152.0
  misc_feature: Variant of the nucleotide sequence at SEQ ID NO 5995
ggctcacggcaggcaggtgtgggtattccaatataaaatagattgattgcgttgtgtttttgtcacataccattgctagctgttattgctattcattcccgcagggatgcatagttccgtattgacgctcagctatccattttaaggcaggctactgctagcagcacgcacgtaaacctttgcttccggatcgactggaatttcaacgtccgatgatgatggcatcgtgtcaccaacagccaacaccccgtcgcactgggaccaatgagtgcgcacaaagatgggtcggtgtctgcaaatgatattcgaaaaacacatgcggctattcggaagccgccagtgaggataatatgaccatctgcgttggcctttaggatggtatttaacatgcagaccccaacatcgattccataggttctttgtccgcgtctacgtcatgacattccgacttcagacctgaagactgtccgctctttgtcgctctcacggctgccattggggagaattggcgctctaggcaccctgcatttgcacattccaattgagcgttctggagctccgagttgttctttccatttcgcagacatcagtaccaaattacgactgcccttgtatatctcctagatactgcaccccgccacacttccattttcccattgggaacaacattgaatctggccagaatttttaccatatacaaaggacgcaaatcatctaacgttctattttccacattgcgccagtaggaagaacttcgtcacctgagccctcgtgccaacgttgaaagcgccaacagcctgaaccaacaaacttcacacaatgcagctgtttactactcttctctctcttgtcgctgcaggcgcctccgccgtgctcgcacagagcactgtgactgggaagcttggagatgcagctgtcgttacgagcaatcctattggaaaggcatccattgcgacgcttcctaatgagcctttctggcaggcaggcaccttgaatggaaacgtcaaaggatccttgaaagccgtttctggtgccaatggagctggtgttgatttcgaagcaacattctcgaatttgccaactgagggagggcctttcacttttcatctgcatgtcgaccccgtaaacagcgaaggcaactgcactgctacactggctcatctcgatcccttcgtacgaggtgaagacccgacatgcgattcatcaagcccaaagacatgccaggttggagaccttagcggcaagtacggcaaaatcacgtcggacccttacactgtcaagttccatgacgacttcacttcgatgcaagaaggcccaggatcttatttccttaatcgcagcctggtcgtccacttcgccaacaaaacgcgaatcacatgtgcaaacttcagtcccgtacaaggaaacggcacatttactcctactagtgctacacccacaccaacggccactactaccccagctcccactgctggtgcaatgatcgtgaaggccaccggaggtctttctctgctttctctcatggtcatgctattctgtctttgataggaatagtgggttcttaggcgtgtctaatgggtagacatttttgattgcgagagagagagaaaaagggtgcagactattcagtagaggaataggccgtagggtcacttaatactcgtagctgagcaagcattaaaaataatataggagagaattccacgtcactggct

SEQ ID NO: 5998 - DNA, 981 bp, Muscodor strobelii
  misc_feature: SGI cDNA ID NO. 561729
  misc_feature: Encodes the peptide sequence at SEQ ID NO 5999
atgacgaccgaagagaaattcgtgtggggcaaagaaattcccgttccggctcacctcatcacatacgttgatgatgaggtcgtttcaaagttgccaccgggcacgcaaattctaggcataagtcctagtggtgcatcttattgggcccgaactgcgaaaattgacgcggccgatacagacggcaatgagagtccattcttcatcaaggtccatattggagatcatggtagaaagatggcgtccggagaatttgaggctatgaagcgtttggactttgttggtcccgcgattgtcgcggagcctatgggatggggaatatacgagagcaacagagatgcatcattcttcgtatgtcgctattacgagctatctggagacattcctgacgtttcggatttccctggactgctggcagagatgcataagtcggagcgagcagtctcacctactggggagtttggatttggtcgagtcactgctggactcgccgccacctttgatttagaacaagagacacatggaccggaggacgaattaactcagctgcgtgaggccatcataacgaaggtcataccgcgtctgctccgacccttggagaccgacggacgcagcattgttcctactttttgccatggagacatgtgggacggcaacgcgtctgtggatgtcaatacaggaaagccgatgatatttgacgctacgcctttgtatgcacacaatgaatatgaactgggcccgatgtggccaacgcgacataagatgacaatggactttatcaacgagtacacgaagtactatcccattgcagagcctgtgggtgatttctacgatcgcatcgtcttatattgcttgaggttcgatcttcacgcatcgtcgttgtattacggggatctcttgcacagaaatatatcgaaagatgcaatgaagatactcgtggagaagtacgccgatggctatgaggggtaccagaaagagagatga

SEQ ID NO: 5999 - protein, 326 aa, Muscodor strobelii
  misc_feature: SGI Peptide ID NO. 561729
  misc_feature (23)..(316): NCBI GI: 240110347 Blast Desc: CPC735_063790 [Coccidioides posadasii C735 delta SOWgp]
  misc_feature (23)..(294): NCBI GI: 169765035 Blast Desc: [Aspergillus oryzae RIB40] gi|83764843|dbj|BAE54987.1| protein product [Aspergillus oryzae]
  misc_feature (23)..(316): NCBI GI: 119180471 Blast Desc: CIMG_08864 [Coccidioides immitis RS]
  misc_feature (20)..(294): NCBI GI: 238503680 Blast Desc: conserved [Aspergillus flavus NRRL3357] gi|220690543|gb|EED46892.1| conserved [Aspergillus flavus NRRL3357]
  misc_feature (13)..(301): NCBI GI: 258563734 Blast Desc: [Uncinocarpus reesii 1704] gi|237908119|gb|EEP82520.1| [Uncinocarpus reesii 1704]
  misc_feature (17)..(284): NCBI GI: 255946231 Blast Desc: Pc20g14050 [Penicillium chrysogenum Wisconsin 54-1255] gi|211588618|emb|CAP86734.1| Pc20g14050 [Penicillium chrysogenum Wisconsin 54-1255]
  misc_feature (9)..(326): NCBI GI: 261356063 Blast Desc: conserved [Verticillium albo-atrum VaMs.102]
  misc_feature (22)..(284): NCBI GI: 145605954 Blast Desc: MGG_11859 [Magnaporthe grisea 70-15] gi|145013692|gb|EDJ98333.1| MGG_11859 [Magnaporthe grisea 70-15]
  misc_feature (21)..(244): NCBI GI: 46135869 Blast Desc: FG09450.1 [Gibberella zeae PH-1]
  misc_feature (23)..(318): NCBI GI: 85114984 Blast Desc: NCU00873 [Neurospora crassa OR74A] gi|28926583|gb|EAA35553.1| conserved [Neurospora crassa OR74A]
MTTEEKFVWGKEIPVPAHLITYVDDEVVSKLPPGTQILGISPSGASYWARTAKIDAADTDGNESPFFIKVHIGDHGRKMASGEFEAMKRLDFVGPAIVAEPMGWGIYESNRDASFFVCRYYELSGDIPDVSDFPGLLAEMHKSERAVSPTGEFGFGRVTAGLAATFDLEQETHGPEDELTQLREAIITKVIPRLLRPLETDGRSIVPTFCHGDMWDGNASVDVNTGKPMIFDATPLYAHNEYELGPMWPTRHKMTMDFINEYTKYYPIAEPVGDFYDRIVLYCLRFDLHASSLYYGDLLHRNISKDAMKILVEKYADGYEGYQKER

SEQ ID NO: 6000 - DNA, 234 bp, Muscodor strobelii
  misc_feature: SGI EST ID NO. CUFF.15135.0
  misc_feature: Variant of the nucleotide sequence at SEQ ID NO 5998
gggatctcttgcacagaaatatatcgaaagatgcaatgaagatactcgtggagaagtacgccgatggctatgaggggtaccagaaagagagatgactggtgtaggtaaacgcttatcgtgcccatcaacacctattgcgttccgtgttcataagaagatgctaggttaatttatgtatttttgagtgtcaatcatgaagctagaatcatctagcacgcacaatatcactttcat

SEQ ID NO: 6001 - DNA, 1119 bp, Muscodor strobelii
  misc_feature: SGI cDNA ID NO. 561730
  misc_feature: Encodes the peptide sequence at SEQ ID NO 6002
atgagcaatggtagcgacgcaatctatttggaccatggcggtgcaacgatctacgctaagtctgcagtcgaagcattcacttcaaaaatgatcaataacttgtacggcaatcctcactcagagaactctccggcaagactctcaggagttgtggtcgatgaagtacgtgcaaagctacttgaattttttggagcaagccccgagcactttgatctagtttttgttgcaaacgccacggccgcgatcaagctcgtagcggaatcatttagagacctcgcagaaaaaagcaaggaacggagcttctggtatggatatcacaaggacagccatacgagcctcgtaggagtccgtgaactcacaaatggacaatctcattgctttcagagcgacgaggatgttgacgaatggctacactctcctgaaagaatcgacacgaatcgccgtcgtattaatagcctcggcctgtttgcttatccagggcaatcaaatatgactggtcggagactgcctctgtcgtggtcatggcgaacccgcgtttcgaattctttgcagaatacttacacactccttgacgctgctgctctagcaatgactttccccatggaaagcatatttcaagatcctgataaggctcctgacttcgttgcgttctccttgtacaagatttttggctttccagatatcggagcattggttattcgaaaacagtcagggcacattctcactttacgaaaatatttcggtgggggaacagtaaccatggcgacgaccttcggagcgccgtggcatcgatctaaagggctgggatctccacagtacgacatacatgagggcttagaggacggaaccgagaataaggacttcggtgacccgaaccgacaaggctcggcgattgctttcaatatattacagtccgacggatcatacgttccgtacaccgacgtagagcgcatagcaaatgatgcaaaaatatacattagatctggtggtgtatgcaaccctggaggaatctcgtctctgcttggatatgaaccatggatgtccgacagagctctaagtgctggtcatcattgcagttcgcacggcataggcatcattaacggaattcccaccgggtag

SEQ ID NO: 6002 - protein, 372 aa, Muscodor strobelii
  misc_feature: SGI Peptide ID NO. 561730
  misc_feature (8)..(340): Pfam Id: PF00266 Pfam Desc: Aminotransferase class-V
  misc_feature (30)..(372): NCBI GI: 171687571 Blast Desc: protein product [Podospora anserina] gi|170943747|emb|CAP69399.1| protein product [Podospora anserina]
  misc_feature (3)..(372): NCBI GI: 46107384 Blast Desc: FG00575.1 [Gibberella zeae PH-1]
  misc_feature (17)..(372): NCBI GI: 154313807 Blast Desc: BC1G_05753 [Botryotinia fuckeliana B05.10] gi|150849335|gb|EDN24528.1| BC1G_05753 [Botryotinia fuckeliana B05.10]
  misc_feature (17)..(372): NCBI GI: 156061409 Blast Desc: SS1G_02848 [Sclerotinia sclerotiorum 1980] gi|154700251|gb|EDN99989.1| SS1G_02848 [Sclerotinia sclerotiorum 1980]
  misc_feature (2)..(283): NCBI GI: 16945380 Blast Desc: related to hxB protein [Neurospora crassa]
  misc_feature (2)..(283): NCBI GI: 164427545 Blast Desc: NCU03011 [Neurospora crassa OR74A] gi|157071788|gb|EAA36161.2| conserved [Neurospora crassa OR74A]
  misc_feature (3)..(283): NCBI GI: 256734499 Blast Desc: NECHADRAFT_65620 [Nectria haematococca mpVI 77-13-4]
  misc_feature (30)..(283): NCBI GI: 145615687 Blast Desc: MGG_05759 [Magnaporthe grisea 70-15] gi|145022471|gb|EDK06491.1| MGG_05759 [Magnaporthe grisea 70-15]
  misc_feature (6)..(372): NCBI GI: 145257488 Blast Desc: An04g03890 [Aspergillus niger] gi|226707516|sp|A2QIK9.1|MOCOS_ASPNC RecName: Full=Molybdenum cofactor sulfurase; Short=MoCo sulfurase; Short=MOS protein
  misc_feature (6)..(372): NCBI GI: 258577627 Blast Desc: UREG_02511 [Uncinocarpus reesii 1704] gi|237903261|gb|EEP77662.1| UREG_02511 [Uncinocarpus reesii 1704]
MSNGSDAIYLDHGGATIYAKSAVEAFTSKMINNLYGNPHSENSPARLSGVVVDEVRAKLLEFFGASPEHFDLVFVANATAAIKLVAESFRDLAEKSKERSFWYGYHKDSHTSLVGVRELTNGQSHCFQSDEDVDEWLHSPERIDTNRRRINSLGLFAYPGQSNMTGRRLPLSWSWRTRVSNSLQNTYTLLDAAALAMTFPMESIFQDPDKAPDFVAFSLYKIFGFPDIGALVIRKQSGHILTLRKYFGGGTVTMATTFGAPWHRSKGLGSPQYDIHEGLEDGTENKDFGDPNRQGSAIAFNILQSDGSYVPYTDVERIANDAKIYIRSGGVCNPGGISSLLGYEPWMSDRALSAGHHCSSHGIGIINGIPTG

SEQ ID NO: 6003 - DNA, 1942 bp, Muscodor strobelii
  misc_feature: SGI EST ID NO. CUFF.15164.0
  misc_feature: Variant of the nucleotide sequence at SEQ ID NO 6001
cgcacatgagcaatggtagcgacgcaatctatttggaccatggcggtgcaacgatctacgctaagtctgcagtcgaagcattcacttcaaaaatgatcaataacttgtacggcaatcctcactcagagaactctccggcaagactctcaggagttgtggtcgatgaagtacgtgcaaagctacttgaattttttggagcaagccccgagcactttgatctagtttttgttgcaaacgccacggccgcgatcaagctcgtagcggaatcatttagagacctcgcagaaaaaagcaaggaacggagcttctggtatggatatcacaaggacagccatacgagcctcgtaggagtccgtgaactcacaaatggacaatctcattgctttcagagcgacgaggatgttgacgaatggctacactctcctgaaagaatcgacacgaatcgccgtcgtattaatagcctcggcctgtttgcttatccagggcaatcaaatatgactggtcggagactgcctctgtcgtggtcatggcgaacccgcgtttcgaattctttgcagaatacttacacactccttgacgctgctgctctagcaatgactttccccatggaaagcatatttcaagatcctgataaggctcctgacttcgttgcgttctccttgtacaagatttttggctttccagatatcggagcattggttattcgaaaacagtcagggcacattctcactttacgaaaatatttcggtgggggaacagtaaccatggcgacgaccttcggagcgccgtggcatcgatctaaagggctgggatctccacagtacgacatacatgagggcttagaggacggaacgttaccttttcatagtatgtgagtaaatactcattgcgaggtggaaagcccacagatcctaggacatctcatagcatggcggctaaagaaacagactaatatgttgtaacgctccagacttgctctcggtgaggcgattgatgtgcatcgacggctttatggtgacatgagaagaatatcggaacactgttcttacctgatcgagagactacacgctggcatgtctagactatgtcataccaattatcagccactatgctatatctacagcgagaataaggacttcggtgacccgaaccgacaaggctcggcgattgctttcaatatattacagtccgacggatcatacgttccgtacaccgacgtagagcgcatagcaaatgatgcaaaaatatacattagatctggtggtgtatgcaaccctggaggaatctcgtctctgcttggatatgaaccatggatgtccgacagagctctaagtgctggtcatcattgcagttcgcacggcataggcatcattaacggaattcccaccggtatcgttcgagcatctatcggagcaatgtcgacaaaaagcgatgtcgatagatttctccaattcttgtgtgcgacattcgttgacggtgggaggaatggcccctcagaatattcagcattgactttaccctctgttgattcgggcgtagcggccgtagaaaatatcacagaaaatcacgttatcgaccccgttacacctcatgataggtcaagacgtcagcaaacgattgcgaagcagccgagcttatcacaacccgcaaaagctaattgggggacgagaaggatcactcagccagtcaagaaactcattcacaagggctcagcacaattcaagtgagagactggcgaacgtattgtcttacggacacaagagagtggcgatcgtagaagctgttggaaatgcgatagacggtaatgcagaaagagcaataatggtatcacattgtgactaattaccaaatagactggtcagtaacgctagtatgtatatatgtcaaaatccttacatcatactccgagaagcaagtcgaattgtcctatggggaaggcctg

SEQ ID NO: 6004 - DNA, 474 bp, Muscodor strobelii
  misc_feature: SGI cDNA ID NO. 561731
  misc_feature: Elevated expression when VOC is produced
  misc_feature: Encodes the peptide sequence at SEQ ID NO 6005
atgtttcagccacacccggaagatcgcctgcatcttagattgcatcgcgctcgctctgtagtcctgaccgcccaagaactagttggcactgagcaaacaacctcaattactctcctcttccccatgattttcgggtggagaaagagaaaaatgcttgctaatctcagctctattaagggggcatatatgcggactgctctctcacagttcagcttcgccctgattattctcaagatcttcacctccgaattctacgcaataggtgcccttttcgctgtgtacggcgcggcagttttgatatgcgcaatatatcgccgatacgaaggcaataggcagttctttagcactacagataatgatggagaaatcaagagccgatttcgtacaagtggtaatagcgtcgtgctcctcacggctctgagtcttggtgcttatgtcgggttacttgttttgacctggcaactggcgacgtaa

SEQ ID NO: 6005 - protein, 157 aa, Muscodor strobelii
  misc_feature: SGI Peptide ID NO. 561731
  misc_feature (1)..(157): NCBI GI: 156061413 Blast Desc: SS1G_02850 [Sclerotinia sclerotiorum 1980] gi|154700253|gb|EDN99991.1| SS1G_02850 [Sclerotinia sclerotiorum 1980]
  misc_feature (1)..(157): NCBI GI: 154313813 Blast Desc: BC1G_05756 [Botryotinia fuckeliana B05.10] gi|150849338|gb|EDN24531.1| BC1G_05756 [Botryotinia fuckeliana B05.10]
  misc_feature (1)..(157): NCBI GI: 256735212 Blast Desc: NECHADRAFT_73376 [Nectria haematococca mpVI 77-13-4]
  misc_feature (3)..(156): NCBI GI: 29150108 Blast Desc: conserved [Neurospora crassa]
  misc_feature (3)..(155): NCBI GI: 171687577 Blast Desc: protein product [Podospora anserina] gi|170943750|emb|CAP69402.1| protein product [Podospora anserina]
  misc_feature (1)..(157): NCBI GI: 189195596 Blast Desc: conserved [Pyrenophora tritici-repentis Pt-1C-BFP] gi|187980015|gb|EDU46641.1| conserved [Pyrenophora tritici-repentis Pt-1C-BFP]
  misc_feature (1)..(155): NCBI GI: 240110674 Blast Desc: CPC735_040960 [Coccidioides posadasii C735 delta SOWgp]
  misc_feature (1)..(132): NCBI GI: 46107404 Blast Desc: FG00585.1 [Gibberella zeae PH-1]
  misc_feature (1)..(155): NCBI GI: 115385815 Blast Desc: conserved [Aspergillus terreus NIH2624] gi|114187901|gb|EAU29601.1| conserved [Aspergillus terreus NIH2624]
  misc_feature (1)..(155): NCBI GI: 119196203 Blast Desc: CIMG_02476 [Coccidioides immitis RS]
  misc_feature: Useful for introducing or modulating the production of volatile compounds
MFQPHPEDRLHLRLHRARSVVLTAQELVGTEQTTSITLLFPMIFGWRKRKMLANLSSIKGAYMRTALSQFSFALIILKIFTSEFYAIGALFAVYGAAVLICAIYRRYEGNRQFFSTTDNDGEIKSRFRTSGNSVVLLTALSLGAYVGLLVLTWQLAT

SEQ ID NO: 6006 - DNA, 1428 bp, Muscodor strobelii
  misc_feature: SGI EST ID NO. CUFF.15192.1
  misc_feature: Variant of the nucleotide sequence at SEQ ID NO 6004
cttatgatagccgttgtatgcctgatctccaatctgcgaatgctagcagattctcggctctctacgtctctgcagccatatcgcccaaaattcgcaacgcaaatatcaggcaaaacgtgcccataatatttgctcgaatcttgcaaacatgtttcagccacacccggaagatcgcctgcatcttagattgcatcgcgctcgctctgtagtcctgaccgcccaagaactagttggcacgtataagatactctcatcctgttcttgaaacagtcgctttctgactttactaatttgataatagtgagcaaacaaccgtttcagttgagcagccagcaaaggctcagagtctctaaggcttttaaagagtcgattcctagctatagcaaatagattgaaaactgacatacttccgtgcacaaggagatcagggctgcgcaaagaacttttgagggggcatatatgcggactgctctctcacagttcagcttcgccctgattattctcaagatcttcacctccgaattctacgcaataggtgcccttttcgctgtgtacggcgcggcagttttgatatgcgcaatatatcgccgatacgaaggcaataggcagttctttagcactacagataatgatggagaaatcaagagccgatttcgtacaagtggtaatagcgtcgtgctcctcacggctctgagtcttggtgcttatgtcgggttacttgttttgacctggcaactggcgacgtaactataggagtccttcggttcgatttggctcacgtcttttgcttcgatatgcgtcgtgagttactactcatagttagcgccataccgagcttaaaatttggactattttgccaacatcgcaattcgtgaccatagcccactggcttgggcctccttgccatcttagtcgcaaccgagtacatttaatgatactagcataaagcaaagccatatttcaagtcaaataaacaagcaagtccaattttattacggcagctttcagctacacctttctcaaatatcatctatgagtaattttggcctaaattcgagtctacacaaagatgtacggtcgcattttcgggctaatttgtaagagtatcaacatcccctcgaatcgaatcggattttcgaaaccccgccgagtctgcacaatgtaaagaagaagaagcgccaagcgatgaaagcctcatcgaaattgtggtaagaaaggcaatatgcaaaagtatgcactcgccaaagagaaagtaaaaatagtacattgaatctattcgggaaagcgttgttaataacgggaccgaccaagccgttattagagcaatcaagatttgaaggcttcttcgtgtagcttcatgggcgacggcgtctttcaataccgtactaaggaccgtgtttgatcgtaggcgggacaattcgaggcaaa

SEQ ID NO: 6007 - DNA, 3330 bp, Muscodor strobelii
  misc_feature: SGI cDNA ID NO. 561732
  misc_feature: Elevated expression when VOC is produced
  misc_feature: Encodes the peptide sequence at SEQ ID NO 6008
atgtcttccatgtatagtacagtatctcccgcatcgcttcacgatctgcgcgagcacaccaacaaccaccagatacctcaccatattgaccaccagtccaaacatcctcgtcaagggcccgtcacaccagagtccaatctcttatcgccttattcatcccatgcccgtggcagcaccgcctcgccgacactgaactcagacacaccagcagacactatctcgacagttgagtataccgagggcccgttcctcggcgccggctttgatgaaggctttgtcctcgaagattggggacagttcgtcgtcaatccaatattaggaaatgtcaacaccaatatcacctaccctctgagtcctaatcagacaccttccatgccatctgaccagattttcgtaaccagcaaacatatcactgtcgacgagccggagcctgcagcaacggtcgactacattgcccaacaggagctattcacagactcggttgattctagtcaatcggatccccagcttacgccagacacaaatcccggaagctggtcaagcgcggagacgccagcgcgaggcgccatcgcaatggtacctcaaagccctcgcgtcaccgtctccatgtggggaaaggaagatgacgaccaagttcaaggcattgatcgatcgtttgcaagtggcgctgagagccccagcactgtacgcccaccccacagcgttgccggagaccttgtgtatgaaacctccctcggaaatttgtcacatgtttctcgtgattttcatggtaattggatgcccaacgcgaccactggacatcgaggtcttgctccgagtgaacgtccacgtgaacaagtccaaagcattaatcaacaagccgcatatcgtgagagagaagagaaaaatcgagaagtcgacgattggatagcacagcaatcaggcggcgacgtgggcgagcgacctgcatttatgatgactagagacaacgatggggacgatggtatcccgtccggtgagatctccttgggaaaccatacggaaaacaaacacattgcagatcaaatttatttccatgtcgatggacaaggtgggccgatcaccgagaccgattttgatttcatgcgacaactccgtacttggaaggactcacctagtattcacgcgattcaatccggggataaacgctatcagccagagacttcacaagcggcgatcgagagattttatcgacagtgtcaagataatgcttcaattgtctcgaaagcggccacttggggcacgcgccgacggagccttcccagcgtcgtcgatgtggaaggcgtactgagtggaaactttttgaaaaagctttctatcagtggcaacaaccattcccgccgaccgagcattctccagagatttcccagccttggccgcaagaacagtaccaatcagcaacggaagcgcaaaggcagcaatgctagtgacttgccccccgaggaatcggatgaccagcttgatcggtacgaatcaaaagatagtcttgcgcccccctcccgtacgtcaagctggggtcttggcaagaagccgacaccaagcttaaacacagctttagtagggatggcaaccagtgccgcttctattgggacacaccatgctcgcagtggatcaatcagtgccactcctattacatcgcctaagagtccattcgcggcgctcactgtacctgttggaaagttgaggagagcccggagtaagaccgacgtatcggcggcttctcacaccggagcctcacattctcatcttgcagaaatgctgagaaaccagggtggaccacctgtagctcgcctggcccgctcacagcctcagaacgagcccgaagacgatgacgatgatgacgacgaagcggctgatgaaatggacttcaaagtcgagccctaccggacagacaacatcgagccaaccttcaacggattcaaggcccatgttctaagactcaatccgaccctcgatggtgctgaaaacatgaacggtttcctggtcgagcggatcgcacatcagctgacaatccgctacaagcagctcttgaatgggaaactgaaacatttgagtcatgttagtaatcaagactgtccggcgggtatttcctgtctgtcgctcggaggcactgtcaaatatcccgatagccgcgggatcgacccattatcaaaccgaggtatctcatccgatgaggatacgacgccgctggaagggggcatcaatatggagagctttccgacaggcattccgatgcctcctgcgacgtcgcttcctgcagaattcgaatgccagctttgtttcacgagcaagaaattcaacaaaccttctgattggaccaagcatgtgcacgaagatgtacagccttttacttgcacttgggatcgctgccgtgaccctaagatgttcaagagaaaggcagattgggttcgtcatgaaaatgaaggccaccgccatctggagtggtggacttgtgatgttgaggactgccgtcataaatgttacagaagagacaactttttgcaacatctggtgcgcgaacacaagttcacggaaccaaagatcaagaccaaagcggcaatcaaaaaggctggcggtgttgatcgtacatggcaaaaggtggagcaatgtcatgtcgagacaacgaagaaaccaatcgaagaaccatgccgcttttgtaataaaacattccctacgtggaagaagctcacagttcacctggcgaagcacatggagcagatcagcctgcctgtcttagagctcgtcaagaataaagagcttgagatcgacaccattatcagtcccgtacacgaccctcctccaagacattttggcatcccaccgacaacaccaatcatcaagactgagcctcagggattcagcccgcaaggcacccatacgaccacaagcaataatgtgatgaattactctacccctccgaatacgatgggattttcccctatccctcggatgcctgtgcaaaatcagttttaccaaccgcaatctcagcaatatggcgacatgtcccaccagccacataacatgatgatgcaggcgcaatatacaccgcaaccgtcatacccagcgatgcctgtaacgtcagctccttacgctccgaacccctatccgatgggtatgtctatgcctgaaacagaaccatttccggtattcgattcccttggcatccaggacacgaccggatctatgccatacaccacaataggtaaccctacactgcatgccgttgatcaatacggcagtaacaagggctcggtctcaccatattcacattctccacatccacatcaaggtggacagttctacaactcatga

SEQ ID NO: 6008 - protein, 1109 aa, Muscodor strobelii
  misc_feature: SGI Peptide ID NO. 561732
  misc_feature (39)..(1107): NCBI GI: 171696100 Blast Desc: protein product [Podospora anserina] gi|170948292|emb|CAP60456.1| protein product [Podospora anserina]
  misc_feature (44)..(1062): NCBI GI: 256734494 Blast Desc: NECHADRAFT_57390 [Nectria haematococca mpVI 77-13-4]
  misc_feature (1)..(1062): NCBI GI: 46107402 Blast Desc: FG00584.1 [Gibberella zeae PH-1]
  misc_feature (269)..(942): NCBI GI: 261355914 Blast Desc: conserved [Verticillium albo-atrum VaMs.102]
  misc_feature (47)..(961): NCBI GI: 156061399 Blast Desc: SS1G_02843 [Sclerotinia sclerotiorum 1980] gi|154700246|gb|EDN99984.1| SS1G_02843 [Sclerotinia sclerotiorum 1980]
  misc_feature (180)..(937): NCBI GI: 85114389 Blast Desc: NCU09252 [Neurospora crassa OR74A] gi|28926478|gb|EAA35451.1| [Neurospora crassa OR74A] gi|38567004|emb|CAE76303.1| [Neurospora crassa]
  misc_feature (47)..(984): NCBI GI: 154313791 Blast Desc: BC1G_05745 [Botryotinia fuckeliana B05.10] gi|150849327|gb|EDN24520.1| BC1G_05745 [Botryotinia fuckeliana B05.10]
  misc_feature (592)..(957): NCBI GI: 145616624 Blast Desc: MGG_01650 [Magnaporthe grisea 70-15] gi|145009216|gb|EDJ93927.1| MGG_01650 [Magnaporthe grisea 70-15]
  misc_feature (253)..(965): NCBI GI: 189203459 Blast Desc: conserved [Pyrenophora tritici-repentis Pt-1C-BFP] gi|187985164|gb|EDU50652.1| conserved [Pyrenophora tritici-repentis Pt-1C-BFP]
  misc_feature (257)..(985): NCBI GI: 240275461 Blast Desc: C2H2 finger domain-containing protein [Ajellomyces capsulatus H143]
  misc_feature: Useful for introducing or modulating the production of volatile compounds
MSSMYSTVSPASLHDLREHTNNHQIPHHIDHQSKHPRQGPVTPESNLLSPYSSHARGSTASPTLNSDTPADTISTVEYTEGPFLGAGFDEGFVLEDWGQFVVNPILGNVNTNITYPLSPNQTPSMPSDQIFVTSKHITVDEPEPAATVDYIAQQELFTDSVDSSQSDPQLTPDTNPGSWSSAETPARGAIAMVPQSPRVTVSMWGKEDDDQVQGIDRSFASGAESPSTVRPPHSVAGDLVYETSLGNLSHVSRDFHGNWMPNATTGHRGLAPSERPREQVQSINQQAAYREREEKNREVDDWIAQQSGGDVGERPAFMMTRDNDGDDGIPSGEISLGNHTENKHIADQIYFHVDGQGGPITETDFDFMRQLRTWKDSPSIHAIQSGDKRYQPETSQAAIERFYRQCQDNASIVSKAATWGTRRRSLPSVVDVEGVLSGNFLKKLSISGNNHSRRPSILQRFPSLGRKNSTNQQRKRKGSNASDLPPEESDDQLDRYESKDSLAPPSRTSSWGLGKKPTPSLNTALVGMATSAASIGTHHARSGSISATPITSPKSPFAALTVPVGKLRRARSKTDVSAASHTGASHSHLAEMLRNQGGPPVARLARSQPQNEPEDDDDDDDEAADEMDFKVEPYRTDNIEPTFNGFKAHVLRLNPTLDGAENMNGFLVERIAHQLTIRYKQLLNGKLKHLSHVSNQDCPAGISCLSLGGTVKYPDSRGIDPLSNRGISSDEDTTPLEGGINMESFPTGIPMPPATSLPAEFECQLCFTSKKFNKPSDWTKHVHEDVQPFTCTWDRCRDPKMFKRKADWVRHENEGHRHLEWWTCDVEDCRHKCYRRDNFLQHLVREHKFTEPKIKTKAAIKKAGGVDRTWQKVEQCHVETTKKPIEEPCRFCNKTFPTWKKLTVHLAKHMEQISLPVLELVKNKELEIDTIISPVHDPPPRHFGIPPTTPIIKTEPQGFSPQGTHTTTSNNVMNYSTPPNTMGFSPIPRMPVQNQFYQPQSQQYGDMSHQPHNMMMQAQYTPQPSYPAMPVTSAPYAPNPYPMGMSMPETEPFPVFDSLGIQDTTGSMPYTTIGNPTLHAVDQYGSNKGSVSPYSHSPHPHQGGQFYNS

SEQ ID NO: 6009 - DNA, 2322 bp, Muscodor strobelii
  misc_feature: SGI cDNA ID NO. 561733
  misc_feature: Encodes the peptide sequence at SEQ ID NO 6010
atggtattatggctggttcgaagctatgcgttatgggcagccactctcgctatctcaggtgtattcggcgataaccttctggtcaccaatgggttcgataattgcaacaacgggtcagacaatgagaccaccatcatggtgaagaacgttgatattcgctacgacaatgccaataaaatggtcatcttcaacgtagcgggctcgaatactaaggaacaaaaggttgaggctactatcgaagtaaaggcatacggccaggtagccttcacacagacattcaagccatgcgacccattgacctttgtagagcagctttgccctgtcccagttggtaacttcgcagcaaatggtagccaaaagatacctcaagaatatgcagataaaattccagcgatcgcatttcagattcccgatatttcagccgacgctactcttacactcaaatcattggatgacaattctacaataggatgtgtccaatcgcagatcaccaatggcaaaactgtcgccatacctgctgtatcatatgtggccgccacgatagcggctggcgcgctcgtgctcaccggtgtaacagcagttggttctgtactatcaggaggtgccggtgccgcagcatcaagcgttggaggtgctggtactatgagcccaagtttcggtgaagttttcggggtgtttcatggcttcgctctgaatggtatgatgtcagcatctctgccgcaagtctacaggtccttttcgaagaattttgctttctctaccggtcttattccttggagagatatgcaaataggaatagataatcttcgttccatgacaggtggcaatcttactagggatagtgtggaggtgctcgaaaaatcgacgctggtgttcccagacgggtctacgtcgagtgccaacggcagcgcaatcttcaagcgtgctgctcaagaattcttcctagcagttcgagagatcaatacgtctatcaactccacggacacgactgatgacggcaacgcagcagaaaccgcaattcgccgagccgtctccgggtttcaggggtatgtgaatatgctgtcggtgccagaatccaacacatttttgacaatcctcgagattgtggccatcgtcgtcggggtcatcatcgttagtattctgctcgttaaagtcatcttggaagcttgggctctattcgggaattttccgaagaagctagtggatttcagaaaacattactggggtagcatcgctcgcgcggtaacctcactaattctacttctgtatggcgtgtgggttctgtattgcgtatatcagtttacgaagggtgattcatgggctgcacagacactcgctgcagtaactcttgccctgtttaccggaattctcgccttcttttcctggaagatttggagtaccgcgaagaagctcaaagaggccgagggagacgtaataggtctgtatgaggacaagcaatattggcgaaagtattcgcttttttacgacagttataagaagtcatgctggtgggctttcattcctgccattgtctatctttttgccaagggaaccgtgattgctgtcacagacggctacgcaatggcgcaaaccatttcttcgctagtcatcgaggcgctgttcctgattctcctgatttggaaccgccccttcgagcgcagggctagcaatgttgtcaatattacgattcaggttgtcagagtgatctctgtaattctgattctcgttttcgtggaggagcttggccttacgcaaacaacgcaaacggtcgccggcgtggcacttattgctgtccaatctgcactggctgtcgctcttgctattctgatcttctggaacgcgatgctttcgctctgcaaacggaacccccaccaaaagcgtatcgaagcaatggagaaggcaatgcagcgtgacactttgacgccactcgatgcgcgcaattctcttttaaaaggttctctcaagacggagtcagttgacggcctagcctcttccagactcagccctatcgcagagagcaaagaacctgccatcgatgtgactcgccgggggtcctcacctcggccgcctctagggatctcgtcggagcgcagcaactctttcttacagcccccgagtcaaagtcggccaatcaccccgagcactccgtgggggcttgaccaaagtcaggagcgcctcatctcacatgcagctcctatacacgtagaccgccagccgacgataccaaatcttgaggggttcggagacggttatgggccggtcgttggtaatggccctcaaagatataatagtaacaataactacaggccgtaccggttatga

SEQ ID NO: 6010 - protein, 773 aa, Muscodor strobelii
  misc_feature: SGI Peptide ID NO. 561733
  misc_feature (12)..(675): Pfam Id: PF06011 Pfam Desc: Transient receptor potential (TRP) ion channel
  misc_feature (19)..(744): NCBI GI: 116181792 Blast Desc: CHGG_01524 [Chaetomium globosum CBS 148.51] gi|88185821|gb|EAQ93289.1| CHGG_01524 [Chaetomium globosum CBS 148.51]
  misc_feature (10)..(690): NCBI GI: 85114393 Blast Desc: NCU09253 [Neurospora crassa OR74A] gi|28926479|gb|EAA35452.1| conserved [Neurospora crassa OR74A] gi|38567005|emb|CAE76304.1| conserved [Neurospora crassa]
  misc_feature (1)..(631): NCBI GI: 171696074 Blast Desc: protein product [Podospora anserina] gi|170948279|emb|CAP60443.1| protein product [Podospora anserina]
  misc_feature (5)..(753): NCBI GI: 256734495 Blast Desc: NECHADRAFT_90086 [Nectria haematococca mpVI 77-13-4]
  misc_feature (4)..(752): NCBI GI: 46107400 Blast Desc: FG00583.1 [Gibberella zeae PH-1]
  misc_feature (21)..(744): NCBI GI: 154308368 Blast Desc: BC1G_08244 [Botryotinia fuckeliana B05.10] gi|150852785|gb|EDN27977.1| BC1G_08244 [Botryotinia fuckeliana B05.10]
  misc_feature (4)..(651): NCBI GI: 225563095 Blast Desc: DUF907 domain-containing protein [Ajellomyces capsulatus G186AR]
  misc_feature (4)..(651): NCBI GI: 154281455 Blast Desc: conserved [Ajellomyces capsulatus NAm1] gi|150411719|gb|EDN07107.1| conserved [Ajellomyces capsulatus NAm1]
  misc_feature (21)..(702): NCBI GI: 225680658 Blast Desc: conserved [Paracoccidioides brasiliensis Pb03]
  misc_feature (20)..(650): NCBI GI: 169600867 Blast Desc: SNOG_03286 [Phaeosphaeria nodorum SN15] gi|160705533|gb|EAT90017.2| SNOG_03286 [Phaeosphaeria nodorum SN15]
MVLWLVRSYALWAATLAISGVFGDNLLVTNGFDNCNNGSDNETTIMVKNVDIRYDNANKMVIFNVAGSNTKEQKVEATIEVKAYGQVAFTQTFKPCDPLTFVEQLCPVPVGNFAANGSQKIPQEYADKIPAIAFQIPDISADATLTLKSLDDNSTIGCVQSQITNGKTVAIPAVSYVAATIAAGALVLTGVTAVGSVLSGGAGAAASSVGGAGTMSPSFGEVFGVFHGFALNGMMSASLPQVYRSFSKNFAFSTGLIPWRDMQIGIDNLRSMTGGNLTRDSVEVLEKSTLVFPDGSTSSANGSAIFKRAAQEFFLAVREINTSINSTDTTDDGNAAETAIRRAVSGFQGYVNMLSVPESNTFLTILEIVAIVVGVIIVSILLVKVILEAWALFGNFPKKLVDFRKHYWGSIARAVTSLILLLYGVWVLYCVYQFTKGDSWAAQTLAAVTLALFTGILAFFSWKIWSTAKKLKEAEGDVIGLYEDKQYWRKYSLFYDSYKKSCWWAFIPAIVYLFAKGTVIAVTDGYAMAQTISSLVIEALFLILLIWNRPFERRASNVVNITIQVVRVISVILILVFVEELGLTQTTQTVAGVALIAVQSALAVALAILIFWNAMLSLCKRNPHQKRIEAMEKAMQRDTLTPLDARNSLLKGSLKTESVDGLASSRLSPIAESKEPAIDVTRRGSSPRPPLGISSERSNSFLQPPSQSRPITPSTPWGLDQSQERLISHAAPIHVDRQPTIPNLEGFGDGYGPVVGNGPQRYNSNNNYRPYRL

SEQ ID NO: 6011 - DNA, 3525 bp, Muscodor strobelii
  misc_feature: SGI EST ID NO. CUFF.15188.0
  misc_feature: Variant of the nucleotide sequence at SEQ ID NO 6009
caccaaatgacaaagacgaactgatgacgatgcaacatgctagctggtatcttcgtcgtctagatcgtcggataactggctgatgatctacagcatgggctctcatgggtcgtcaggggtctccgtcctgaggcaactcctcaagtcttgagtcttttccagccaattactctctatgctcacgattcctcttgcctctaactatatcgccagaccctctttgacttcttctgatcgtatgggcttgcacctttcgtcttcgttttcatctggcgctggctcaccacccattcgtttcaaattatgtgttgaacactacgtcgtattttggtcttggtgtcttgcagacagtgctcgtgggggctctctatgaaagaccaggaacaaagtctatgttcctacgccacgcctatctctcttttttctgtccattatctctttcaatactgctcaacgtgcagataatgtgcttgctttagcacattccattctttcgtggttgatccttggcccattcgttcttgggattttactttcgcctattctttcttgacgagagagtctctttcttcgtggtctgctctttgtccttatctttacctacatacacgcaatacattccgtaatcttgcatctagtgcctctggagcgcagcagatcgaaaattttgatcaaaagagaaaaattcgtactcttcacgaccagtactcgtatctaggatccaggcgattcaacgcagttcagttcaccgaagaaagagcaaggaagagataaaaggcgatcagtgtttggaggattgattttcaagagtttcaagtacattactttgcacgacacggcggtcgattggtaaccgaagatggtattatggctggttcgaagctatgcgttatgggcagccactctcgctatctcaggtgtattcggcgataaccttctggtcaccaatgggttcgataattgcaacaacgggtcagacaatgagaccaccatcatggtgaagaacgttgatattcgctacgacaatgccaataaaatggtcatcttcaacgtagcgggctcgaatactaaggaacaaaaggttgaggctactatcgaagtaaaggcatacggccaggtagccttcacacagacattcaagccatgcgacccattgacctttgtagagcagctttgccctgtcccagttggtaacttcgcagcaaatggtagccaaaagatacctcaagaatatgcagataaaattccagcgatcgcatttcagattcccgatatttcagccgacgctactcttacactcaaatcattggatgacaattctacaataggatgtgtccaatcgcagatcaccaatggcaaaactgtcgccatacctgctgtatcatatgtggccgccacgatagcggctggcgcgctcgtgctcaccggtgtaacagcagttggttctgtactatcaggaggtgccggtgccgcagcatcaagcgttggaggtgctggtactatgagcccaagtttcggtgaagttttcggggtgtttcatggcttcgctctgaatggtatgatgtcagcatctctgccgcaagtctacaggtccttttcgaagaattttgctttctctaccggtcttattccttggagagatatgcaaataggaatagataatcttcgttccatgacaggtggcaatcttactagggatagtgtggaggtgctcgaaaaatcgacgctggtgttcccagacgggtctacgtcgagtgccaacggcagcgcaatcttcaagcgtgctgctcaagaattcttcctagcagttcgagagatcaatacgtctatcaactccacggacacgactgatgacggcaacgcagcagaaaccgcaattcgccgagccgtctccgggtttcaggggtatgtgaatatgctgtcggtgccagaatccaacacatttttgacaatcctcgagattgtggccatcgtcgtcggggtcatcatcgttagtattctgctcgttaaagtcatcttggaagcttgggctctattcgggaattttccgaagaagctagtggatttcagaaaacattactggggtagcatcgctcgcgcggtaacctcactaattctacttctgtatggcgtgtgggttctgtattgcgtatatcagtttacgaagggtgattcatgggctgcacagacactcgctgcagtaactcttgccctgtttaccggaattctcgccttcttttcctggaagatttggagtaccgcgaagaagctcaaagaggccgagggagacgtaataggtctgtatgaggacaagcaatattggcgaaagtattcgcttttttacgacagttataagaagtcatgctggtgggctttcattcctgccattgtctatctttttgccaagggaaccgtgattgctgtcacagacggctacgcaatggcgcaaaccatttcttcgctagtcatcgaggcgctgttcctgattctcctgatttggaaccgccccttcgagcgcagggctagcaatgttgtcaatattacgattcaggttgtcagagtgatctctgtaattctgattctcgttttcgtggaggagcttggccttacgcaaacaacgcaaacggtcgccggcgtggcacttattgctgtccaatctgcactggctgtcgctcttgctattctgatcttctggaacgcgatgctttcgctctgcaaacggaacccccaccaaaagcgtatcgaagcaatggagaaggcaatgcagcgtgacactttgacgccactcgatgcgcgcaattctcttttaaaaggttctctcaagacggagtcagttgacggcctagcctcttccagactcagccctatcgcagagagcaaagaacctgccatcgatgtgactcgccgggggtcctcacctcggccgcctctagggatctcgtcggagcgcagcaactctttcttacagcccccgagtcaaagtcggccaatcaccccgagcactccgtgggggcttgaccaaagtcaggagcgcctcatctcacatgcagctcctatacacgtagaccgccagccgacgataccaaatcttgaggggttcggagacggttatgggccggtcgttggtaatggccctcaaagatataatagtaacaataactacaggccgtaccggttatgatgccagcagtaatgaaagggctgagcggtttgataccaatgtattgacgtgtctacgaaagaacctgtataatagccttccccttgctgtttttgaacttagcgaggcgaactagggagagatacaatgccaatgagccttctaccatcgcagttacttcgggaatctaatagaaattattgatcaagctatagaatactatttggcttacttgtgaaagtccctgctggttagttgtggctgatatcacgcatctctttttcgaatcctccagcgacgattatttctttcctttctcccccattatgctccgtacgcaccctggacaattgctgctgtccatt

SEQ ID NO: 6012 - DNA, 858 bp, Muscodor strobelii
  misc_feature: SGI cDNA ID NO. 561734
  misc_feature: Encodes the peptide sequence at SEQ ID NO 6013
atggactctctcgtcgcccgctacagccgtccggcggccttgcaggacaacgccttcgcagacgaccaacataccgatctacaagatgacatgaccccgagtctgtccctcaagtttgccatgccccccgtcgcacagccctcggcatggttacgtgccgccagcgacgaccgctccaacccccactgccccatcaagatcgcccacggcaccacaaccctcgccttccgcttccagggcggcatcatcgtcgccaccgactcccgcgccaccgccggcaactggatcgcctcccagaccgtcaagaaggtcatcgagatcaacagctgtctgctcggcaccatggccggcggcgccgctgactgccagtactggctcgcctggctcggcatgcagtgccgcctgcacgagctccgccacaagcgccgcatctccgtcgccgccgcctccaagatcctcgccaacctcgtctaccagtacaagggcatgggcctgtccatgggcaccatgtgcgccggcgtcaccccggaggaggggcccgccctctactacatcgactccgacggcacccgcctcgccggtaacctgttctgcgtcggctccggccagacctttgcctacggcgtactcgacgccgagtacaactacgatctaagcgaggaggacgccctcgagctcggccgccgcagcattctcgccgccacccaccgtgacgcctactcgggcggctacatcaacctgtaccacgtcaaggaggaaggatgggtcaagcacggcttcaacgacacgaaccccatcttctggaagacgaagctggacaagggcgagttcaccaacgtcaccagcgccctggactag

SEQ ID NO: 6013 - protein, 285 aa, Muscodor strobelii
  misc_feature: SGI Peptide ID NO. 561734
  misc_feature (67)..(250): Pfam Id: PF00227 Pfam Desc: Proteasome A-type and B-type
  misc_feature (1)..(285): NCBI GI: 39975367 Blast Desc: conserved [Magnaporthe grisea 70-15] gi|145018979|gb|EDK03258.1| conserved [Magnaporthe grisea 70-15]
  misc_feature (1)..(285): NCBI GI: 256732678 Blast Desc: [Nectria haematococca mpVI 77-13-4]
  misc_feature (1)..(285): NCBI GI: 261356253 Blast Desc: proteasome component PRE2 [Verticillium albo-atrum VaMs.102]
  misc_feature (1)..(282): NCBI GI: 171687907 Blast Desc: protein product [Podospora anserina] gi|170943915|emb|CAP69567.1| protein product [Podospora anserina]
  misc_feature (1)..(284): NCBI GI: 46125017 Blast Desc: FG06886.1 [Gibberella zeae PH-1]
  misc_feature (1)..(285): NCBI GI: 85111469 Blast Desc: proteasome component PRE2 precursor [Neurospora crassa OR74A] gi|28925704|gb|EAA34715.1| proteasome component PRE2 precursor [Neurospora crassa OR74A]
  misc_feature (1)..(284): NCBI GI: 154297340 Blast Desc: conserved [Botryotinia fuckeliana B05.10] gi|150858579|gb|EDN33771.1| conserved [Botryotinia fuckeliana B05.10]
  misc_feature (1)..(284): NCBI GI: 156062346 Blast Desc: SS1G_01289 [Sclerotinia sclerotiorum 1980] gi|154696625|gb|EDN96363.1| SS1G_01289 [Sclerotinia sclerotiorum 1980]
  misc_feature (1)..(285): NCBI GI: 116180334 Blast Desc: conserved [Chaetomium globosum CBS 148.51] gi|88185092|gb|EAQ92560.1| conserved [Chaetomium globosum CBS 148.51]
  misc_feature (1)..(285): NCBI GI: 189192022 Blast Desc: proteasome subunit beta type-5 precursor [Pyrenophora tritici-repentis Pt-1C-BFP] gi|187973956|gb|EDU41455.1| proteasome subunit beta type-5 precursor [Pyrenophora Pt-1C-BFP]
  misc_feature (1)..(280): SWISSPROT Homolog: EC 3.4.25.1 Proteasome endopeptidase complex
MDSLVARYSRPAALQDNAFADDQHTDLQDDMTPSLSLKFAMPPVAQPSAWLRAASDDRSNPHCPIKIAHGTTTLAFRFQGGIIVATDSRATAGNWIASQTVKKVIEINSCLLGTMAGGAADCQYWLAWLGMQCRLHELRHKRRISVAAASKILANLVYQYKGMGLSMGTMCAGVTPEEGPALYYIDSDGTRLAGNLFCVGSGQTFAYGVLDAEYNYDLSEEDALELGRRSILAATHRDAYSGGYINLYHVKEEGWVKHGFNDTNPIFWKTKLDKGEFTNVTSALD

SEQ ID NO: 6014 - DNA, 3294 bp, Muscodor strobelii
  misc_feature: SGI EST ID NO. CUFF.15467.1
  misc_feature: Variant of the nucleotide sequence at SEQ ID NO 6012
attgatgctgacgcgtgggaagccagctgcctgccctgggacctctagctggagctgtagcacaacgcccaagttcgagcctcaccaaacgtcaacgacacgacgacacagcacatacttccacctacaacaccagcacaatcaaccctctctccaccaccaccaccaccaccaccgccgccgacttcagtcattttgtgcctcttcttctatccctcggcgtctgtacaccctctcctccgtctagtgccacacactctcctcctcacctgcccctctgccgtcgagatggactctctcgtcgcccgctacagccgtccggcggccttgcaggacaacgccttcgcagacgaccaacataccgatctacaagatgacatgaccccgagtctgtccctcaagtttgccatgccccccgtcgcacagccctcggcatggttacgtgccgccagcgacgaccgctccaacccccactgccccatcaagatcgcccacggcaccacaaccctcgccttccgcttccagggcggcatcatcgtcgccaccgactcccgcgccaccgccggcaactggatcgcctcccagaccgtcaagaaggtcatcgagatcaacagctgtctgctcggcaccatggccggcggcgccgctgactgccagtactggctcgcctggctcggcatgcagtgccgcctgcacgagctccgccacaagcgccgcatctccgtcgccgccgcctccaagatcctcgccaacctcgtctaccagtacaagggcatgggcctgtccatgggcaccatgtgcgccggcgtcaccccggaggaggggcccgccctctactacatcgactccgacggcacccgcctcgccggtaacctgttctgcgtcggctccggccagacctttgcctacggcgtactcgacgccgagtacaactacgatctaagcgaggaggacgccctcgagctcggccgccgcagcattctcgccgccacccaccgtgacgcctactcgggcggctacatcaacctgtaccacgtcaaggaggaaggatgggtcaagcacggcttcaacgacacgaaccccatcttctggaagacgaagctggacaagggcgagttcaccaacgtcaccagcgccctggactaggagccgagcgctgggtctggttctgcatcgacaagcataaagatgggtgttcagatttcatgaggggacgcatacgtacgtggatgacgccaatggcgatcggctcggcttcctacgtcaaaagaggctgaggatagagggtgggctggtttggggcctagacgtatctgcatggggctgtgggtgatgaaaactacacacatgtactactactaaagaaggtaaaggagaagctgctgctgcgccaatcagagaatcatgagaattatacgaccggttatatgaccttcatgctcaaccacgtttgcatgtgttccaaacactgtccagatgacgtgacatggtcgaatgcttcgctcttcactatgaatgatgtctattttacaggttctacaaacttatacatggctgctcacactatatgggcgtcttatacaaatggtgatacacaaatacttcgtacagcttcctaacacccgctatggttcaacccgataccagcccggtagtcctaagatgccaccaccctcggctcgaggatcaagcggccactttcgcgcaacgagaacgtcaaggtcgctccgccacccctgctcatacatctcgatgcccgtccacgcaatcatggccgcgttgtcggtgcaaagcgacacaggtggcgccacaagttggatatcttcaaatcctcgggcgtcaagcatagcgcgcacgacatgccgaagaaacttattactcgctacgccaccggatagtacaatagtcttcacccggtcttctgccttctcgctatcgcgcaacgcaaacaagacgcgactagcaagatgctcaaacgtcaaacgcattacctcgcgcgcaagaagtcgccgctcatcgacatccatctctggacgggcagcgacgactttctgcacgtgaccgttgagaccggagaagtcgtatgtggacgctgcctctgggccctggcccatgagtgctagaggcggtgtcaatgtccagccaaggccggagtcgaagattttaatctcgtctgcacggcgggtgggcgctatgtagttgtagctcggctctggaaatgcgaatttctcgaacatggggccgtacattccggatgttgacccatcggcggatagaacgtctggagggagaatcatgcgcgcgcatttatctatcatgtccccgacggcgatgttgagtgatgtggccaggatggcgtggtcgtttagagactgcgagcggactaacatggtgtggccgccggatacgagaagagacagaaacgggaactctggatgtggcggcgccgggtcgcctgaggtatgattaggagatgctggatgcgccgtgtctgtatcttggtttcggcgtcctaggtcgagcgcatggacaagccgcggtgtcaatgcatgagcttgcatgtggtttacagccagtagaggcacgtcccaggccacagccagtcctttcgccgtgttcagtcctgttgctagattcgacgccatgccgggccctcgtgtgacagacacaaagtcgggcttcatccgcgcccgtccgtcaaccacaaggacgcggttcgcattgtccgcggccgctccccttccgtcattctcgggcaccaagggtaaggaacgtaatgctttctggaccagcggtgctagatgattcgtatgggacacgacggcgttgagggggtgcacgccccggaatgatcggttgtctgaggttatcttgtcgttgaaatgcagtacggcgccgccagaaggggctttgtcgagaacagccacgcaagtgtcatcgcaggagctctcaatggcgagcgttaagagttggcgacgggactgttgagaagcaagcccaggtaccagccgagtcgcatacaaccatgagagaaaaggtcttgatgtgctagacatcaagggaggcgacagactacctcgtaagccatgtctgcgcagtgccatccatattgatctcatgaaaacatctgtaggtaaaatgtgtacaaggaaaggctactagtagatatcacatagagcgtggcattggttgcaagctaagaataatttgcatgacgttgattttttccccaagggctgtaagaatccagggttggagacacattcaagctaccagaaacttttctcgatctaa

SEQ ID NO: 6015 - DNA, 1020 bp, Muscodor strobelii
  misc_feature: SGI cDNA ID NO. 561735
  misc_feature: Reduced expression when VOC is produced
  misc_feature: Encodes the peptide sequence at SEQ ID NO 6016
atggcgtcgaatctagcaacaggactgaacacggcgaaaggactggctgtggcctgggacgtgcctctactggctgtaaaccacatgcaagctcatgcattgacaccgcggcttgtccatgcgctcgacctaggacgccgaaaccaagatacagacacggcgcatccagcatctcctaatcatacctcaggcgacccggcgccgccacatccagagttcccgtttctgtctcttctcgtatccggcggccacaccatgttagtccgctcgcagtctctaaacgaccacgccatcctggccacatcactcaacatcgccgtcggggacatgatagataaatgcgcgcgcatgattctccctccagacgttctatccgccgatgggtcaacatccggaatgtacggccccatgttcgagaaattcgcatttccagagccgagctacaactacatagcgcccacccgccgtgcagacgagattaaaatcttcgactccggccttggctggacattgacaccgcctctagcactcatgggccagggcccagaggcagcgtccacatacgacttctccggtctcaacggtcacgtgcagaaagtcgtcgctgcccgtccagagatggatgtcgatgagcggcgacttcttgcgcgcgaggtaatgcgtttgacgtttgagcatcttgctagtcgcgtcttgtttgcgttgcgcgatagcgagaaggcagaagaccgggtgaagactattgtactatccggtggcgtagcgagtaataagtttcttcggcatgtcgtgcgcgctatgcttgacgcccgaggatttgaagatatccaacttgtggcgccacctgtgtcgctttgcaccgacaacgcggccatgattgcgtggacgggcatcgagatgtatgagcaggggtggcggagcgaccttgacgttctcgttgcgcgaaagtggccgcttgatcctcgagccgagggtggtggcatcttaggactaccgggctggtatcgggttgaaccatag

SEQ ID NO: 6016 - protein, 339 aa, Muscodor strobelii
  misc_feature: SGI Peptide ID NO. 561735
  misc_feature (2)..(295): Pfam Id: PF00814 Pfam Desc: Glycoprotease family
  misc_feature (5)..(41): Pfam Id: PF00814 Pfam Desc: Glycoprotease family
  misc_feature (244)..(295): Pfam Id: PF00814 Pfam Desc: Glycoprotease family
  misc_feature (1)..(334): NCBI GI: 154311078 Blast Desc: BC1G_06657 [Botryotinia fuckeliana B05.10] gi|150851061|gb|EDN26254.1| BC1G_06657 [Botryotinia fuckeliana B05.10]
  misc_feature (9)..(336): NCBI GI: 156034625 Blast Desc: SS1G_13247 [Sclerotinia sclerotiorum 1980] gi|154698651|gb|EDN98389.1| SS1G_13247 [Sclerotinia sclerotiorum 1980]
  misc_feature (1)..(337): NCBI GI: 121711487 Blast Desc: glycoprotease family protein [Aspergillus clavatus NRRL 1] gi|119401510|gb|EAW11933.1| glycoprotease family protein [Aspergillus clavatus NRRL 1]
  misc_feature (1)..(334): NCBI GI: 159123246 Blast Desc: O-SIALOGLYCOPROTEIN ENDOPEPTIDASE [Aspergillus fumigatus A1163]
  misc_feature (1)..(334): NCBI GI: 70987000 Blast Desc: O-SIALOGLYCOPROTEIN ENDOPEPTIDASE [Aspergillus fumigatus Af293] gi|66846615|gb|EAL86947.1| O-SIALOGLYCOPROTEIN ENDOPEPTIDASE [Aspergillus fumigatus Af293]
  misc_feature (1)..(334): NCBI GI: 119482876 Blast Desc: glycoprotease family protein [Neosartorya fischeri NRRL 181] gi|119409621|gb|EAW19569.1| glycoprotease family protein [Neosartorya fischeri NRRL 181]
  misc_feature (1)..(336): NCBI GI: 238482375 Blast Desc: O-sialoglycoprotein endopeptidase, [Aspergillus flavus NRRL3357] gi|220700476|gb|EED56814.1| O-sialoglycoprotein endopeptidase, [Aspergillus flavus NRRL3357]
  misc_feature (1)..(336): NCBI GI: 169765772 Blast Desc: [Aspergillus oryzae RIB40] gi|83765212|dbj|BAE55355.1| protein product [Aspergillus oryzae]
  misc_feature (1)..(334): NCBI GI: 258576361 Blast Desc: conserved [Uncinocarpus reesii 1704] gi|237902628|gb|EEP77029.1| conserved [Uncinocarpus reesii 1704]
  misc_feature (1)..(337): NCBI GI: 115400075 Blast Desc: conserved [Aspergillus terreus NIH2624] gi|114191292|gb|EAU32992.1| conserved [Aspergillus terreus NIH2624]
  misc_feature (1)..(324): SWISSPROT Homolog: EC 3.4.24.57 O-sialoglycoprotein endopeptidase
  misc_feature: Useful for introducing or modulating the production of volatile compounds
MASNLATGLNTAKGLAVAWDVPLLAVNHMQAHALTPRLVHALDLGRRNQDTDTAHPASPNHTSGDPAPPHPEFPFLSLLVSGGHTMLVRSQSLNDHAILATSLNIAVGDMIDKCARMILPPDVLSADGSTSGMYGPMFEKFAFPEPSYNYIAPTRRADEIKIFDSGLGWTLTPPLALMGQGPEAASTYDFSGLNGHVQKVVAARPEMDVDERRLLAREVMRLTFEHLASRVLFALRDSEKAEDRVKTIVLSGGVASNKFLRHVVRAMLDARGFEDIQLVAPPVSLCTDNAAMIAWTGIEMYEQGWRSDLDVLVARKWPLDPRAEGGGILGLPGWYRVEP

SEQ ID NO: 6017 - DNA, 3352 bp, Muscodor strobelii
  misc_feature: SGI EST ID NO. CUFF.15467.0
  misc_feature: Variant of the nucleotide sequence at SEQ ID NO 6015
ttagatcgagaaaagtttctggtagcttgaatgtgtctccaaccctggattcttacagcccttggggaaaaaatcaacgtcatgcaaattattcttagcttgcaaccaatgccacgctctatgtgatatctactagtagcctttccttgtacacattttacctacagatgttttcatgagatcaatatggatggcactgcgcagacatggcttacgaggtagtctgtcgcctcccttgatgtctagcacatcaagaccttttctctcatggttgtatgcgactcggctggtacctgggcttgcttctcaacagtcccgtcgccaactcttaacgctcgccattgagagctcctgcgatgacacttgcgtggctgttctcgacaaagccccttctggcggcgccgtactgcatttcaacgacaagataacctcagacaaccgatcattccggggcgtgcaccccctcaacgccgtcgtgtcccatacgaatcatctagcaccgctggtccagaaagcattacgttccttacccttggtgcccgagaatgacggaaggggagcggccgcggacaatgcgaaccgcgtccttgtggttgacggacgggcgcggatgaagcccgactttgtgtctgtcacacgagggcccggcatggcgtcgaatctagcaacaggactgaacacggcgaaaggactggctgtggcctgggacgtgcctctactggctgtaaaccacatgcaagctcatgcattgacaccgcggcttgtccatgcgctcgacctaggacgccgaaaccaagatacagacacggcgcatccagcatctcctaatcatacctcaggcgacccggcgccgccacatccagagttcccgtttctgtctcttctcgtatccggcggccacaccatgttagtccgctcgcagtctctaaacgaccacgccatcctggccacatcactcaacatcgccgtcggggacatgatagataaatgcgcgcgcatgattctccctccagacgttctatccgccgatgggtcaacatccggaatgtacggccccatgttcgagaaattcgcatttccagagccgagctacaactacatagcgcccacccgccgtgcagacgagattaaaatcttcgactccggccttggctggacattgacaccgcctctagcactcatgggccagggcccagaggcagcgtccacatacgacttctccggtctcaacggtcacgtgcagaaagtcgtcgctgcccgtccagagatggatgtcgatgagcggcgacttcttgcgcgcgaggtaatgcgtttgacgtttgagcatcttgctagtcgcgtcttgtttgcgttgcgcgatagcgagaaggcagaagaccgggtgaagactattgtactatccggtggcgtagcgagtaataagtttcttcggcatgtcgtgcgcgctatgcttgacgcccgaggatttgaagatatccaacttgtggcgccacctgtgtcgctttgcaccgacaacgcggccatgattgcgtggacgggcatcgagatgtatgagcaggggtggcggagcgaccttgacgttctcgttgcgcgaaagtggccgcttgatcctcgagccgagggtggtggcatcttaggactaccgggctggtatcgggttgaaccatagcgggtgttaggaagctgtacgaagtatttgtgtatcaccatttgtataagacgcccatatagtgtgagcagccatgtataagtttgtagaacctgtaaaatagacatcattcatagtgaagagcgaagcattcgaccatgtcacgtcatctggacagtgtttggaacacatgcaaacgtggttgagcatgaaggtcatataaccggtcgtataattctcatgattctctgattggcgcagcagcagcttctcctttaccttctttagtagtagtacatgtgtgtagttttcatcacccacagccccatgcagatacgtctaggccccaaaccagcccaccctctatcctcagcctcttttgacgtaggaagccgagccgatcgccattggcgtcatccacgtacgtatgcgtcccctcatgaaatctgaacacccatctttatgcttgtcgatgcagaaccagacccagcgctcggctcctagtccagggcgctggtgacgttggtgaactcgcccttgtccagcttcgtcttccagaagatggggttcgtgtcgttgaagccgtgcttgacccatccttcctccttgacgtggtacaggttgatgtagccgcccgagtaggcgtcacggtgggtggcggcgagaatgctgcggcggccgagctcgagggcgtcctcctcgcttagatcgtagttgtactcggcgtcgagtacgccgtaggcaaaggtctggccggagccgacgcagaacaggttaccggcgaggcgggtgccgtcggagtcgatgtagtagagggcgggcccctcctccggggtgacgccggcgcacatggtgcccatggacaggcccatgcccttgtactggtagacgaggttggcgaggatcttggaggcggcggcgacggagatgcggcgcttgtggcggagctcgtgcaggcggcactgcatgccgagccaggcgagccagtactggcagtcagcggcgccgccggccatggtgccgagcagacagctgttgatctcgatgaccttcttgacggtctgggaggcgatccagttgccggcggtggcgcgggagtcggtggcgacgatgatgccgccctggaagcggaaggcgagggttgtggtgccgtgggcgatcttgatggggcagtgggggttggagcggtcgtcgctggcggcacgtaaccatgccgagggctgcatcacgagcatcagacacggcactgagtgctcaggatgatggagtacaacgcacctgtgcgacggggggcatggcaaacttgagggacagactcggggtcatgtcatcttgtagatcggtatgttggtcgtctgcgaaggcgttgtcctgcaaggccgccggacggctgtagcgggcgacgagagagtccatctcgacggcagaggggcaggtgaggaggagagtgtgtggcactagacggaggagagggtgtacagacgccgagggatagaagaagaggcacaaaatgactgaagtcggcggcggtggtggtggtggtggtggtggagagagggttgattgtgctggtgttgtaggtggaagtatgtgctgtgtcgtcgtgtcgttgacgtttggtgaggctcgaacttgggcgttgtgctacagctccagctagaggtcccagggcaggcagctggcttcccacgcgtcagcatcaat

SEQ ID NO: 6018 - DNA, 1368 bp, Muscodor strobelii
  misc_feature: SGI cDNA ID NO. 561736
  misc_feature: Encodes the peptide sequence at SEQ ID NO 6019
atgaagggcgagatcctccacctccaccttggccaggctggtactcagctgggtaacagcgcttgggagctgtacctgctcgagcacggccttggacgcgatggccgtcctgaccccgccgccaaagatgtccttgacggtggttcttacgagaccttcttcaccgagaccagcggcggcaaatacgtgccccgctccatcttcgtcgacttggacccttcgcccattgacgagattcgcaccggcgactaccgccagctcttccaccccgagcttctcatcagcggcaaggaggatgcggccaacaactacgcccgtggccactacaccatcggcaaggagatggtcgacagctgccttgagcgcatccgccgtgttgttgacaactgcaactcgctccagggcttcttgattttccactcctttggtggaggtactggttccggtttcggtgctcttctgctcgaacgtatctcggccgagtacggaaagaagtgcaagcttgagttcgccgtctaccctgctcctcgtgtatcaactgccgtcgtggagccctacaatgctgttctgtcgactcacagcaccatcgagaactcggactgcaccttcttggtcgacaacgaggctgtctacgacatctgccgacgcaacctggacatcccccgtcccagctatgagcatctgaaccgcttgattgcccaggtcgtcagctccatcacctcctctttgcgtttcgatggcgctttgaacgtcgatctgaacgagttccagaccaacttggtcccctatcctcgtatccactaccctctcatcagctacgctcctgttgtctcggccgccaagagctcacacgagagcttcaaggtccaggagttaaccttccaatgcttcgagcccaacaaccagatggtggtatgtgacccccgtaacggcaagtacatggccgttgctctgctctaccgtggtgatgtcgtccctcgtgactgtaacgccgccattgctgcgctcaaggccaagtcctcattcaacctcgttgagtggtgccccactggtttcaagctgggcatcaacttccagaagcccatggccgtccctactgcatcgcccagcgacggtggtcttgcctctgtcgatcgctccgtgtccatgttgtccaacaccacagccattgccgaggcctggtctcgtctggattacaagtttgatctcatgtacagcaagcgtgcctttgtccactggtatgtcggtgagggtatggaggaaggcgagttctctgaagctcgtgaggatcttgccgctcttgagaaggactacgaggaggttgctgctgacagcttcgagccggatgagactgaagccgaatactag

SEQ ID NO: 6019 - protein, 455 aa, Muscodor strobelii
  misc_feature: SGI Peptide ID NO. 561736
  misc_feature (48)..(247): Pfam Id: PF00091 Pfam Desc: Tubulin/FtsZ family, GTPase domain
  misc_feature (249)..(399): Pfam Id: PF03953 Pfam Desc: Tubulin/FtsZ family, C-terminal domain
  misc_feature (1)..(455): NCBI GI: 261357609 Blast Desc: tubulin alpha chain [Verticillium albo-atrum VaMs.102]
  misc_feature (1)..(455): NCBI GI: 62287585 Blast Desc: TBA_GLOLA RecName: Full=Tubulin alpha chain; AltName: Full=Alpha-tubulin gi|12963224|gb|AAK11178.1|AF321052_1 alpha-tubulin [Colletotrichum lagenarium]
  misc_feature (2)..(455): NCBI GI: 156063400 Blast Desc: tubulin alpha chain [Sclerotinia sclerotiorum 1980] gi|154697152|gb|EDN96890.1| tubulin alpha chain [Sclerotinia sclerotiorum 1980]
  misc_feature (1)..(455): NCBI GI: 46105847 Blast Desc: TBA2_EMENI TUBULIN ALPHA-2 CHAIN [Gibberella zeae PH-1]
  misc_feature (1)..(455): NCBI GI: 256735306 Blast Desc: [Nectria haematococca mpVI 77-13-4]
  misc_feature (1)..(455): NCBI GI: 171474369 Blast Desc: alpha2-tubulin [Gibberella zeae]
  misc_feature (1)..(455): NCBI GI: 88766389 Blast Desc: alpha-tubulin [Metarhizium anisopliae]
  misc_feature (1)..(455): NCBI GI: 171695270 Blast Desc: protein product [Podospora anserina] gi|170947877|emb|CAP60041.1| protein product [Podospora anserina]
  misc_feature (1)..(455): NCBI GI: 242761379 Blast Desc: tubulin subunit TubB [Talaromyces stipitatus ATCC 10500] gi|218723364|gb|EED22781.1| tubulin subunit TubB [Talaromyces stipitatus ATCC 10500]
  misc_feature (1)..(455): NCBI GI: 164424916 Blast Desc: tubulin alpha chain [Neurospora crassa OR74A] gi|119370534|sp|P38668.3|TBA1_NEUCR RecName: Full=Tubulin alpha-A chain gi|157070713|gb|EAA29668.2| tubulin alpha chain [Neurospora
MKGEILHLHLGQAGTQLGNSAWELYLLEHGLGRDGRPDPAAKDVLDGGSYETFFTETSGGKYVPRSIFVDLDPSPIDEIRTGDYRQLFHPELLISGKEDAANNYARGHYTIGKEMVDSCLERIRRVVDNCNSLQGFLIFHSFGGGTGSGFGALLLERISAEYGKKCKLEFAVYPAPRVSTAVVEPYNAVLSTHSTIENSDCTFLVDNEAVYDICRRNLDIPRPSYEHLNRLIAQVVSSITSSLRFDGALNVDLNEFQTNLVPYPRIHYPLISYAPVVSAAKSSHESFKVQELTFQCFEPNNQMVVCDPRNGKYMAVALLYRGDVVPRDCNAAIAALKAKSSFNLVEWCPTGFKLGINFQKPMAVPTASPSDGGLASVDRSVSMLSNTTAIAEAWSRLDYKFDLMYSKRAFVHWYVGEGMEEGEFSEAREDLAALEKDYEEVAADSFEPDETEAEY

SEQ ID NO: 6020 - DNA, 1984 bp, Muscodor strobelii
  misc_feature: SGI EST ID NO. CUFF.15198.0
  misc_feature: Variant of the nucleotide sequence at SEQ ID NO 6018
ggatagtcgacgtgtatcaaggcaagagcattgaacggctcgccgcttcgtgatccaactccacacagacacgcccacacctcctttttgtcttctccccaacctcagtgagctttgtgtgccctgtgtgccctttgcacagtcctcgccgtgactactacctgcgtaacctatcccgtccatctcttgcctctctaatcccactttcatctacctcgccgtccctacctaaagacagcttcacaatgaagggcgagatcctccacctccaccttggccaggctggtactcagctgggtaacagcgcttgggagctgtacctgctcgagcacggccttggacgcgatggccgtcctgaccccgccgccaaagatgtccttgacggtggttcttacgagaccttcttcaccgagaccagcggcggcaaatacgtgccccgctccatcttcgtcgacttggacccttcgcccattgacgagattcgcaccggcgactaccgccagctcttccaccccgagcttctcatcagcggcaaggaggatgcggccaacaactacgcccgtggccactacaccatcggcaaggagatggtcgacagctgccttgagcgcatccgccgtgttgttgacaactgcaactcgctccagggcttcttgattttccactcctttggtggaggtactggttccggtttcggtgctcttctgctcgaacgtatctcggccgagtacggaaagaagtgcaagcttgagttcgccgtctaccctgctcctcgtgtatcaactgccgtcgtggagccctacaatgctgttctgtcgactcacagcaccatcgagaactcggactgcaccttcttggtcgacaacgaggctgtctacgacatctgccgacgcaacctggacatcccccgtcccagctatgagcatctgaaccgcttgattgcccaggtcgtcagctccatcacctcctctttgcgtttcgatggcgctttgaacgtcgatctgaacgagttccagaccaacttggtcccctatcctcgtatccactaccctctcatcagctacgctcctgttgtctcggccgccaagagctcacacgagagcttcaaggtccaggagttaaccttccaatgcttcgagcccaacaaccagatggtggtatgtgacccccgtaacggcaagtacatggccgttgctctgctctaccgtggtgatgtcgtccctcgtgactgtaacgccgccattgctgcgctcaaggccaagtcctcattcaacctcgttgagtggtgccccactggtttcaagctgggcatcaacttccagaagcccatggccgtccctactgcatcgcccagcgacggtggtcttgcctctgtcgatcgctccgtgtccatgttgtccaacaccacagccattgccgaggcctggtctcgtctggattacaagtttgatctcatgtacagcaagcgtgcctttgtccactggtatgtcggtgagggtatggaggaaggcgagttctctgaagctcgtgaggatcttgccgctcttgagaaggactacgaggaggttgctgctgacagcttcgagccggatgagactgaagccgaatactagacttcttgtttcgacgggcgtatgataccctcgtgggattgtttttgcgacccctgagcctcctggctttggtttcttgatattgcggttgcgagagatataccaattgtcctattcggagtcgcgtaaaggagaaaatggatccaggtcgtggtcaggctactagactttggctttggaggaaagggtggcacatgatcaaaaggcgatcgacgttatgacagaaatgagtctttgatgtctgagatcaagatgtttctaattatctacccccttgtagtttgagtgtttggtcgtttgcgaaaaatggtttgcataaccaccgacaactcccgtggatgatcccatcaattcactttaaaaaacgtaac

SEQ ID NO: 6021 - DNA, 483 bp, Muscodor strobelii
  misc_feature: SGI cDNA ID NO. 561737
  misc_feature: Encodes the peptide sequence at SEQ ID NO 6022
atgtctttccaaaacggctgcgaaagctacgacgtcgaccaaagcggtgtcctcacagcccgttttccaaaacactacggacggccggacgcaaagctcgaccttaacacatgcatcggcatgagctccaacttctggggtccatacctagagtggaactcgtccaacttcacgaactccgtcagcgagatcaagctcttcaaatcctcatggcaagtccagatggagtgtaaactaaaagacggcgggttcctgcccacgagcaagtgggctagtataaatcttgagcagtatattagtatcgatagcaacttccagcttgtgttcagtccgagcgagtatatggctagacagaagaagatggctgatgaagcggccgagagggccaaacagccgcagtcttttactgatggtgttaaggagggctggagccagggtggttggattggggggattgtgggaggaattgggtcgtttttctga

SEQ ID NO: 6022 - protein, 160 aa, Muscodor strobelii
  misc_feature: SGI Peptide ID NO. 561737
  misc_feature (2)..(107): Pfam Id: PF08881 Pfam Desc: CVNH domain
MSFQNGCESYDVDQSGVLTARFPKHYGRPDAKLDLNTCIGMSSNFWGPYLEWNSSNFTNSVSEIKLFKSSWQVQMECKLKDGGFLPTSKWASINLEQYISIDSNFQLVFSPSEYMARQKKMADEAAERAKQPQSFTDGVKEGWSQGGWIGGIVGGIGSFF

SEQ ID NO: 6023 - DNA, 1365 bp, Muscodor strobelii
  misc_feature: SGI cDNA ID NO. 561738
  misc_feature: Encodes the peptide sequence at SEQ ID NO 6024
atgccggtaacaacaaacccccgatttgacttcaacttgttttctgcccgtcctccgccggagcaacgaccgcaaggggaaggatttcacctgcttgatcggagggctctaagccaccctcgtcttccagtttcattccaatctccatcgcagcctcaactcttgcagcctcaaccgcagcctcaatttcaacctcaacctcagcctcccgctcaacctcagatccaatctcaacccctccaacccgaggctaatatgggtatggatctgcttgattttgggtcctttgctcaacctcaggtccaacctcaacccctccaacctcaacccctccaacctcaacccctccaacccgaggcagatatgggcatgaatctgtttgattttgggacctttgatactcccgtctcgcatccagatgctcatcatattcccggacaagccactattccgcctgaccagctgcatatggtatcacagcctacagaaataccaggaattggggactttggcgtgttgatacccagaggtcaagtcatcaacgagccactagtgcctggaggccaagtccacaatgttgccaatgatctcggaacgccagtcccagcccaaagacagccgcaacccccaggaccactcatgccgacggtcactcccacttacaatcccgtgcttgttcctgggagaaatgttacttctgcaggcggggttcaagggccggcaaggacgaaaactgatggaaccccagcgtgccatgcctgtcagcggactctctatcaacaccaaagaacggttgataattgtaattatagagacgcgggggactggtctgtcggctgtgttcgctgtcggaaaatcggtgttgtctgcgtcgtcaacggaatccccatcacgacaaatcccacagtcgagacactcaaggcagattttagtaaagcagagttcaagggctactctcgatgtctgaactgccacggtcgaggcgcaggtcaaatgtggaattgcgatagattgcgaccttgcatctcttgccaagtgaatcgagacatgtatcccaattgccgtgacgtcgcaacaacaaagagaggactgtttttaaaccccgtgcctggcacagatatggacgtctacttcagcacgatgggttggggtcctggtggtcccactgatgcgagacctaatcaacccgtgattcagcctggaccggaccatcatcttaaatggttggtcactcatcccaatgacccaaatctagtaccgatccagggtcctccacccggtggtttcccccagggcggtggttctggtactctttggctatatccaacggcggtagccaacccgatcagtcgatcagtcggatga

SEQ ID NO: 6024 - protein, 454 aa, Muscodor strobelii
  misc_feature: SGI Peptide ID NO. 561738
MPVTTNPRFDFNLFSARPPPEQRPQGEGFHLLDRRALSHPRLPVSFQSPSQPQLLQPQPQPQFQPQPQPPAQPQIQSQPLQPEANMGMDLLDFGSFAQPQVQPQPLQPQPLQPQPLQPEADMGMNLFDFGTFDTPVSHPDAHHIPGQATIPPDQLHMVSQPTEIPGIGDFGVLIPRGQVINEPLVPGGQVHNVANDLGTPVPAQRQPQPPGPLMPTVTPTYNPVLVPGRNVTSAGGVQGPARTKTDGTPACHACQRTLYQHQRTVDNCNYRDAGDWSVGCVRCRKIGVVCVVNGIPITTNPTVETLKADFSKAEFKGYSRCLNCHGRGAGQMWNCDRLRPCISCQVNRDMYPNCRDVATTKRGLFLNPVPGTDMDVYFSTMGWGPGGPTDARPNQPVIQPGPDHHLKWLVTHPNDPNLVPIQGPPPGGFPQGGGSGTLWLYPTAVANPISRSVG

SEQ ID NO: 6025 - DNA, 1286 bp, Muscodor strobelii
  misc_feature: SGI EST ID NO. CUFF.15207.0
  misc_feature: Variant of the nucleotide sequence at SEQ ID NO 6023
cgggatgctctacctcctgaacagccagagctcgagccttatccgagacggtatccgcacactggctatactcctccgcttgctcccgtttcccagttattgccgacaagccaaggggtgttttcaccttacactccttcacgcgctccagctgctcagatgttgccgacaagtcaggggttgttctcaccacctggtgattctcctctgggtgccccaactactcagatgccggtaacaacaaacccccgatttgacttcaacttgttttctgcccgtcctccgccggagcaacgaccgcaaggggaaggatttcacctgcttgatcggagggctctaagccaccctcgtcttccagtttcattccaatctccatcgcagcctcaactcttgcagcctcaaccgcagcctcaatttcaacctcaacctcagcctcccgctcaacctcagatccaatctcaacccctccaacccgaggctaatatgggtatggatctgcttgattttgggtcctttgctcaacctcaggtccaacctcaacccctccaacctcaacccctccaacctcaacccctccaacccgaggcagatatgggcatgaatctgtttgattttgggacctttgatactcccgtctcgcatccagatgctcatcatattcccggacaagccactattccgcctgaccagctgcatatggtatcacagcctacagaaataccaggaattggggactttggcgtgttgatacccagaggtcaagtcatcaacgagccactagtgcctggaggccaagtccacaatgttgccaatgatctcggaacgccagtcccagcccaaagacagccgcaacccccaggaccactcatgccgacggtcactcccacttacaatcccgtgcttgttcctgggagaaatgttacttctgcaggcggggttcaagggccggcaaggacgaaaactgatggaaccccagcgtgccatgcctgtcagcggactctctatcaacaccaaagaacggttgataattgtaattatagagacgcgggggactggtctgtcggctgtgttcgctgtcggaaaatcggtgttgtctgcgtcgtcaacggaatccccatcacgacaaatcccacagtcgagacactcaaggcagattttagtaaagcagagttcaagggctactctcgatgtctgaactgccacggtcgaggcgcaggtcaaatgtggaattgcgatagattgcgaccttgcatctcttgccaagtgaatcgagacatgtatcccaa

SEQ ID NO: 6026 - DNA, 651 bp, Muscodor strobelii
  misc_feature: SGI cDNA ID NO. 561739
  misc_feature: Encodes the peptide sequence at SEQ ID NO 6027
atggcttccaagcatctgcgcgagtacaaggtcgtcgtcgtcggcggaggtggtgtcggtaaatcatgcttgaccatccagatgacccaggaccatttcatcgacgagtacgacccgactatcgaagactcgtatcgcaaacagtgtgttattgacgacgaacttgcccttctcgatgttctcgacaccgccggccaagaagagtatgccgccatgcgggagcagtatatggtcaatggcgaggggttcatgctggtcttctccataacttcacaagagagtctcgatgagatccacgccctacaccgtcagatcctccgagtcaaggggaagcaggagggcgagcacttccctgtcgtgctggtgggcaacaagtgcgatctagaacatgagcgcgtcgtctcgagagagaaggccgagagaagcgcagccgagttccagtgcccatatatcgagacctcggccaagtcccggatcaatgtagaagctgccttcttcgacgtcgtccgcgagattcgcaactacgatcgcaacctgggtggcatgtctgctggcaacggcaggtcaggaggcatgaacggccccgacaagatggagatggacaatggcgaccaagaggccggctgctgtgcgaaatgtgtcatcctataa

SEQ ID NO: 6027 - protein, 216 aa, Muscodor strobelii
  misc_feature: SGI Peptide ID NO. 561739
  misc_feature (10)..(127): Pfam Id: PF08477 Pfam Desc: Miro-like protein
  misc_feature (10)..(174): Pfam Id: PF00071 Pfam Desc: Ras family
  misc_feature (1)..(216): NCBI GI: 3929359 Blast Desc: RASL_COLTR RecName: Full=Ras-like protein; AltName: Full=Ct-Ras; Flags: Precursor gi|2906025|gb|AAC03781.1| Ras homolog [Colletotrichum trifolii]
  misc_feature (3)..(216): NCBI GI: 256726961 Blast Desc: [Nectria haematococca mpVI 77-13-4]
  misc_feature (3)..(216): NCBI GI: 46136525 Blast Desc: RASL_COLTR Ras-like protein [Gibberella zeae PH-1]
  misc_feature (3)..(216): NCBI GI: 29467612 Blast Desc: ras protein [Fusarium oxysporum]
  misc_feature (3)..(216): NCBI GI: 145603276 Blast Desc: MGG_06154 [Magnaporthe grisea 70-15] gi|145011539|gb|EDJ96195.1| MGG_06154 [Magnaporthe grisea 70-15]
  misc_feature (1)..(216): NCBI GI: 121713610 Blast Desc: RAS small monomeric GTPase RasA [Aspergillus clavatus NRRL 1] gi|119402569|gb|EAW12990.1| RAS small monomeric GTPase RasA [Aspergillus clavatus NRRL 1]
  misc_feature (1)..(216): NCBI GI: 255953773 Blast Desc: Pc21g05940 [Penicillium chrysogenum Wisconsin 54-1255] gi|211589350|emb|CAP95491.1| Pc21g05940 [Penicillium chrysogenum Wisconsin 54-1255]
  misc_feature (1)..(216): NCBI GI: 70997565 Blast Desc: RAS small monomeric GTPase RasA [Aspergillus fumigatus Af293] gi|825440|gb|AAB07703.1| RAS [Aspergillus fumigatus] gi|37594596|gb|AAQ94235.1| ras GTPase [Aspergillus fumigatus] RAS
  misc_feature (1)..(216): NCBI GI: 119479087 Blast Desc: RAS small monomeric GTPase RasA [Neosartorya fischeri NRRL 181] gi|119407726|gb|EAW17675.1| RAS small monomeric GTPase RasA [Neosartorya fischeri NRRL 181]
  misc_feature (1)..(216): NCBI GI: 115401484 Blast Desc: protein ras-1 [Aspergillus terreus NIH2624] gi|114190271|gb|EAU31971.1| protein ras-1 [Aspergillus terreus NIH2624]
MASKHLREYKVVVVGGGGVGKSCLTIQMTQDHFIDEYDPTIEDSYRKQCVIDDELALLDVLDTAGQEEYAAMREQYMVNGEGFMLVFSITSQESLDEIHALHRQILRVKGKQEGEHFPVVLVGNKCDLEHERVVSREKAERSAAEFQCPYIETSAKSRINVEAAFFDVVREIRNYDRNLGGMSAGNGRSGGMNGPDKMEMDNGDQEAGCCAKCVIL

SEQ ID NO: 6028 - DNA, 1688 bp, Muscodor strobelii
  misc_feature: SGI EST ID NO. CUFF.15238.0
  misc_feature: Variant of the nucleotide sequence at SEQ ID NO 6026
ccccaatcgaaccacccccaacctacctctgacccctaagacacttacctagcctaactaagtaatttctagcctgagcaccggcaccttgctagtctagtccagtccaatccaatccaagcccaggccccatcgccgcctctgactgctcgactgctctgcttcaattcctgacatcaacaaaaccttgccgtcctaactctcctgctacccatctccctgaccactgacggcgacacctgttgatactctctgcgccaccacgacctcgttcctgcgtcttgtccagcctgctgccccgttctgccctgtcgccgtcgtcgccgtcgtcgcccactcttgcaacccggattgccgctttacatcctgagcaaccgtcgtgagaaatctgcataccgttccacaatggcttccaagcatctgcgcgagtacaaggtcgtcgtcgtcggcggaggtggtgtcggtaaatcatgcttgaccatccagatgacccaggaccatttcatcgacgagtacgacccgactatcgaagactcgtatcgcaaacagtgtgttattgacgacgaacttgcccttctcgatgttctcgacaccgccggccaagaagagtatgccgccatgcgggagcagtatatggtcaatggcgaggggttcatgctggtcttctccataacttcacaagagagtctcgatgagatccacgccctacaccgtcagatcctccgagtcaaggggaagcaggagggcgagcacttccctgtcgtgctggtgggcaacaagtgcgatctagaacatgagcgcgtcgtctcgagagagaaggccgagagaagcgcagccgagttccagtgcccatatatcgagacctcggccaagtcccggatcaatgtagaagctgccttcttcgacgtcgtccgcgagattcgcaactacgatcgcaacctgggtggcatgtctgctggcaacggcaggtcaggaggcatgaacggccccgacaagatggagatggacaatggcgaccaagaggccggctgctgtgcgaaatgtgtcatcctataattcttgccatcttgtccaatcgcaaatcacgcaagcaagcacacactcaccaactttgatatcaataatgagaagaagagacacgcagtctgtctgatcttcacacactactaccatgaacggctcttggcggctttccaagacgtatataagtcatgtcgacatgttctcgtcatgaaatacaaaaggagtctagagtctaacggatcgaatacgaccgggatctttcggggtggcgcattcaccagcatttggcagccaggggcatctatagcggtccaccacgatcatttagagagagatgtggtgttgccactgctgccgatcgcgtcaaacccgttgttggcggcacgacgcggtgttggggtgcaggcgatactatcgagagtttgagacgaggtcgtggtgatggatctcaactggtcttttcataacttttgtaatgttcttcactattcagttgcagtcttctagtggtccatagatttcaccacgggaccaagtcaagttcctaactacactcacctctatgcattgtggctctcgcctgcaccgtcatgttgaactcgccctttttcatttccacggtgattgattcatcaagagatatcttcaaatatgcactatttctc

SEQ ID NO: 6029 - DNA, 1047 bp, Muscodor strobelii
  misc_feature: SGI cDNA ID NO. 561740
  misc_feature: Encodes the peptide sequence at SEQ ID NO 6030
atgatctctagactttcacaactttcacgtcatctctctaagcccattccaaactttgcacatatctctgctgcctcgaactcccgatctggtgttagtggtgttgcatcgagaattatggcttccgcggacgagcgcaacaagcgcaccatccatacagctgcttgcctcatcattggagatgaggtgctgggcggcaaggcaaaccctttatcgcatttgactaatgatatctatagactgtggatacaaactctgcctttatggcaaaatggtgtttttctctgggcatgctctaatattcatcccaatcagagtctgaagcgggtagaagtgatagaagacgatgaggatgagatcattgcatccgttagaagcatgagcgatcgctatgattttgtcattacaagtggaggaatagggcctacccacgacgatattacttatcaatcaattgccaaggcatttggcttgcccttgaagcttcatgatgatgcttacgaacgaatgaagaaactcagcaaaccgcacaaatcgcagcctaactttagctgggatgtagattcaccggccaaaactgcacgcctgcgcatggtcgagttacccattgatgatagccgcgacttggctaaacaggttttatttcctcgggatgagctatgggttcccgtttcggtcgtcaatggcaatatccacatcctaccaggcgtccctagactgtttgaaagcttattggagggcctcaagccattcattgtcgaccgactttcagatcctgatggcaaaggtaattgccgagttattatctcgacacctatggccgagagctcggttgccggctatcttacagatttagctgcaagaatcgcgccgcagggtgtgaaagtcggaagttatcctcgatggggcaagaagcacaacacggtaactctagtaggacgagaccaagcctatcttgacagtctcgtcccagaggttattgccaatgtagatggaaagaggattaatgtcgaaggagaagatgatgagcccgagataccccagtag

SEQ ID NO: 6030 - protein, 348 aa, Muscodor strobelii
  misc_feature: SGI Peptide ID NO. 561740
  misc_feature (55)..(254): Pfam Id: PF00994 Pfam Desc: molybdopterin binding domain
  misc_feature (106)..(171): Pfam Id: PF00994 Pfam Desc: molybdopterin binding domain
  misc_feature (1)..(342): NCBI GI: 156032788 Blast Desc: SS1G_13799 [Sclerotinia sclerotiorum 1980] gi|154699202|gb|EDN98940.1| SS1G_13799 [Sclerotinia sclerotiorum 1980]
  misc_feature (40)..(339): NCBI GI: 39975841 Blast Desc: MGG_06153 [Magnaporthe grisea 70-15] gi|145011540|gb|EDJ96196.1| MGG_06153 [Magnaporthe grisea 70-15]
  misc_feature (1)..(345): NCBI GI: 212529692 Blast Desc: molybdopterin binding domain protein [Penicillium marneffei ATCC 18224] gi|210074401|gb|EEA28488.1| molybdopterin binding domain protein [Penicillium marneffei ATCC 18224]
  misc_feature (42)..(345): NCBI GI: 256726960 Blast Desc: NECHADRAFT_32515 [Nectria haematococca mpVI 77-13-4]
  misc_feature (40)..(342): NCBI GI: 189206269 Blast Desc: molybdopterin binding domain containing protein [Pyrenophora tritici-repentis Pt-1C-BFP] gi|187975562|gb|EDU42188.1| molybdopterin binding domain protein
  misc_feature (42)..(342): NCBI GI: 164423295 Blast Desc: NCU08824 [Neurospora crassa OR74A] gi|157070032|gb|EAA32799.2| conserved [Neurospora crassa OR74A]
  misc_feature (1)..(345): NCBI GI: 240274792 Blast Desc: molybdopterin binding domain-containing protein [Ajellomyces capsulatus H143]
  misc_feature (1)..(345): NCBI GI: 154286104 Blast Desc: molybdopterin binding domain protein [Ajellomyces capsulatus NAm1] gi|150407488|gb|EDN03029.1| molybdopterin binding domain protein [Ajellomyces capsulatus NAm1]
  misc_feature (40)..(342): NCBI GI: 169621538 Blast Desc: SNOG_13979 [Phaeosphaeria nodorum SN15] gi|160704279|gb|EAT78604.2| SNOG_13979 [Phaeosphaeria nodorum SN15]
  misc_feature (1)..(344): NCBI GI: 238496031 Blast Desc: molybdopterin binding domain protein [Aspergillus flavus NRRL3357] gi|220694131|gb|EED50475.1| molybdopterin binding domain protein [Aspergillus flavus NRRL3357]
  misc_feature (53)..(312): SWISSPROT Homolog: EC 2.7.7.2 FAD synthetase
MISRLSQLSRHLSKPIPNFAHISAASNSRSGVSGVASRIMASADERNKRTIHTAACLIIGDEVLGGKANPLSHLTNDIYRLWIQTLPLWQNGVFLWACSNIHPNQSLKRVEVIEDDEDEIIASVRSMSDRYDFVITSGGIGPTHDDITYQSIAKAFGLPLKLHDDAYERMKKLSKPHKSQPNFSWDVDSPAKTARLRMVELPIDDSRDLAKQVLFPRDELWVPVSVVNGNIHILPGVPRLFESLLEGLKPFIVDRLSDPDGKGNCRVIISTPMAESSVAGYLTDLAARIAPQGVKVGSYPRWGKKHNTVTLVGRDQAYLDSLVPEVIANVDGKRINVEGEDDEPEIPQ

SEQ ID NO: 6031 - DNA, 1651 bp, Muscodor strobelii
  misc_feature: SGI EST ID NO. CUFF.15229.0
  misc_feature: Variant of the nucleotide sequence at SEQ ID NO 6029
ggctgtggttccttcacgtacaaccaatattgcgcttgccttgcaacgactacctagatttcatgcttttgagtcatcacttgaacaattcatactggataatccataacagtttctcgcaattgtcatttccctctcgcaggtcaccgggcagtctggatacttgagaaatcataccacggaaaccctacatactccctatgatctctagactttcacaactttcacgtcatctctctaagcccattccaaactttgcacatatctctgctgcctcgaactcccgatctggtgttagtggtgttgcatcgagaattatggcttccgcggacgagcgcaacaagcgcaccatccatacagctgcttgcctcatcattggagatgaggtgctgggcggcaaggcaagtgacttttgagtcttaccaaattctgtctgaatgattgataccgtatcatttagaccctttatcgcatttgactaatgatatctatagactgtggatacaaactctgcctttatggcaaaatggtgtttttctctgggcatgagtctgaagcgggtagaagtgatagaagacgatgaggatgagatcattgcatccgttagaagcatgagcgatcgctatgattttgtcattacaagtggaggaatagggcctacccacgacgatattacttatcaatcaattgccaaggcatttggcttgcccttgaagcttcatgatgatgcttacgaacgaatgaagaaactcagcaaaccgcacaaatcgcagcctaactttagctgggatgtagattcaccggccaaaactgcacgcctgcgcatggtcgagttacccattgatgatagccgcgacttggctaaacaggttttatttcctcgggatgagctatgggttcccgtttcggtcgtcaatggcaatatccacatcctaccaggcgtccctagactgtttgaaagcttattggagggcctcaagccattcattgtcgaccgactttcagatcctgatggcaaaggtaattgccgagttattatctcgacacctatggccgagagctcggttgccggctatcttacagatttagctgcaagaatcgcgccgcagggtgtgaaagtcggaagttatcctcgatggggcaagaagcacaacacggtaactctagtaggacgagaccaagcctatcttgacagtctcgtcccagaggttattgccaatgtagatggaaagaggattaatgtcgaaggagaagatgatgagcccgagataccccagtagcagaagttacgtcggcgtcaaaaccatgcagcggatttgtggacttcgctgatatgtcctaagcggacaagcgacattggcattcggagctgcattttatctcttgatgtaagaggtctgttgacaacttcgcaattgtagtacccctaaatagcaatgtaatcagatatgtcaacgactataagctcttgtcagtcacgtcgtggctcacgcaatcaccgaacgtggcacccatataggcgcgtccctctcgcaacctgagatcatatctgctggtatcagtccatttgaccacgcaagaggtttacctttggcattctgtagcacgcatgcttgttttgagtacccgtagatgttgatatagggtaaca

SEQ ID NO: 6032 - DNA, 3228 bp, Muscodor strobelii
  misc_feature: SGI cDNA ID NO. 561741
  misc_feature: Encodes the peptide sequence at SEQ ID NO 6033
atggagacaatcgaaactccgctgacgacggcacctgaagtcgaccaagactttcgtgccctagatagatatcgtttcatcttctggcacttatatctccaacagaataagagcttaattacagtcaaggaagaggttgagaaaacatacggtctgcctgccagagataagaaggagtacgagacactgctacgcgtgtggggcttcgtgaaaaaagctcatatcgaggaatgggttaaagtccaaattcacattaagaagcgggaaagggacggaaaggatacagaggtttacataagccaggtcaagaagcgtcgcgagcatatcggcgagattctcagaaagaataagcaaagcggccgtttcagagcattactcgagcgagagggtagccctgagcttccatcgtatttccgtttgagtacgccaccaaatgatcaacccgccattcaatattgtttccctggaggcgcgaatgcatgggccgatcatcctcaaccgtcgcttgcgatttggagcacgttgtccaataacgaaaactcatccgcacagctttggattaatgtaccgacaagcagcctttggactaccgtcaagtcgaaagtcgggctatctgggcttcagcatggcacctactcaatcagttccggcgaagctgagagcgttgaaccagtgtcccgaagccaggcgatggcacctataacgcaaacatctctagacttcatcaagtggatcatgcatgtttgcacattacttgtaaatggctctaaggcagacgacctcacggaggttggcgatgtggcagaaggtctgtcgctgatcaaagtcgaacggaacatacccgcgctgaaagccttttcccaattggactctcccgctgtagagacgactttcagaggactcgtcaagctcatattgcgtttgaatgactgggaaacactccagattctttttgaaatctgttttactactcaagcggaggattggattcaagagcagggcaagactatactacggggtgccgcacgggctggattcgataagatgggtactctcttttcgaaactcttaaagacaggcgttttggaatcgctgcgagctcaagaaatgaatgatctattgttccgtgtcgcatgtcaattggatactagctccatggttgcattgacacgggctggggccttcttcaaagatttcgatggcgacatggaaagagactggtttagccaaaaggcgacccgtgaaacttggagcatgtctgaagcatgtcagctgagctctttactatctttggcaaaattcgatgtcgattgcgctctgactgatcgaattgacgtcttgatatttccgatgatagcatcgtctaagtggcagtttccagctttcaatcgtcattcacaaggagatgaagttgcgtacgggccatcgaatctattacatcgatatttcgtagatcgtctctggtatcaaggacaccatgctctgtatgagacaatggctactggaagtcagagagcgaagaagtgggtgaccgtacctggaacattcatcgctgccagcaatagcattgatcagctccacgtctatctcgattctaggtctgatgagcctcttctagaacgagagactgcgcttgaggccgctctgtcactggcggcgtttgagggcaatactgttgctattcagtcaatcatcgaaattggtactaacgccaacacaccgaaactccatgtcaagtattgtccttttatcatagcggcaagatgttcacgtatcggcgtcctcgatatcctcgtcgatgctgctgatttcacatggatcaatgattatttgccccattatcgagattggccggcagatagcatccaacgtttgatacggcaaggtgtgttgaggaacttcaacgtggactcattgatcgatgctataaacaaggaacctcgagatgaggaacttgctgacattatactcgagatgggtgtcggggccgacacaatggtagacggcgttaacttgatccagcacgcaattcaacttggctgtggtccggctgctgtaaaattcctccattcccgcaaggtggaagtccattctcggccttgtccgatacggggtactactatgcttcacgatgcagtcgggaaaagcgggcctatcttctatcgcacttatgacgacatgatcgagctcgcagaatttcttctagagaaaggcgcaagttgtaagtcggatgcagagagcggcggacctacgatactagagatgttagctcacacatgcgctgacgaagactacccgctacatctcttcgcctcgctcttggacagaggtgccgaactcaacgggccaaaccaacgtttcgaagactgtatgctatcggataagccagtgctgagtcggctcatgatatgcagtcaagcgccggaagaactcctgctacggacaatacgtgaaggggcagatatccactctaatagatgggatgatcacaccgctttgcagttggccattctatgtggtcggtacgaagttgcccgccaactagttttcacggcgcgcgcagatattaacgagccggcatttgaggatcatggacatacagcgctccaagctgcctgtaatccttggaacggcgacgcatcgctggggtttgtgcagtatctcattgacaatcgtgcagacgtgaacgcttcgggcgcgagtcgtggcggctacactgcacttcattcggccattgcgggtggatctgtcagcgttgtctgtcttctgattgacaccggagcagagatcaatgctgcagccacttgtaacctcgagcatgacgatacacagaaatattgtgcattagacgtggctgcacattatggtagaatggacatcatcgacatgctattaaaatccaaagcgaccagtcagaagcgaggcaatactccctatgacggtgcaattgagttagccgagatcagcgggcatgatagcattgctgacatgtttagagggaaatgtgcagagaaagcaaggcaaaatgcaatgctattgttcagtggacaagatagctccgagactgacgaaacccttcatcaggacctggatctcagcataaaccaaaccacttcctcgatgactggaatcatgcaatccgtagagccagacttgacagacccagataggttcgaagatgaaggaggggtcattcttgcgtctcttgacgcggaatttccgttgtag

SEQ ID NO: 6033 - protein, 1075 aa, Muscodor strobelii
  misc_feature: SGI Peptide ID NO. 561741
  misc_feature (903)..(935): Pfam Id: PF00023 Pfam Desc: Ankyrin repeat
  misc_feature (548)..(1004): NCBI GI: 242816359 Blast Desc: multiple ankyrin repeats single kh domain protein, [Talaromyces stipitatus ATCC 10500] gi|218715100|gb|EED14523.1| multiple ankyrin repeats single kh domain protein, [Talaromyces
  misc_feature (561)..(984): NCBI GI: 238843722 Blast Desc: ankyrin repeat protein [Microsporum canis CBS 113480]
  misc_feature (729)..(997): NCBI GI: 258565299 Blast Desc: [Uncinocarpus reesii 1704] gi|237907095|gb|EEP81496.1| [Uncinocarpus reesii 1704]
  misc_feature (728)..(974): NCBI GI: 189502738 Blast Desc: Aasi_1435 [Candidatus Amoebophilus asiaticus 5a2] gi|189498179|gb|ACE06726.1| Aasi_1435 [Candidatus Amoebophilus asiaticus 5a2]
  misc_feature (728)..(1004): NCBI GI: 242827177 Blast Desc: multiple ankyrin repeats single kh domain protein, [Talaromyces stipitatus ATCC 10500] gi|218712034|gb|EED11462.1| multiple ankyrin repeats single kh domain protein, [Talaromyces
  misc_feature (729)..(998): NCBI GI: 75910511 Blast Desc: ankyrin [Anabaena variabilis ATCC 29413] gi|75704236|gb|ABA23912.1| Ankyrin [Anabaena variabilis ATCC 29413]
  misc_feature (548)..(998): NCBI GI: 242760147 Blast Desc: Pfs, NACHT and Ankyrin domain protein [Talaromyces stipitatus ATCC 10500] gi|218723125|gb|EED22542.1| Pfs, NACHT and Ankyrin domain protein [Talaromyces stipitatus ATCC 10500]
  misc_feature (728)..(1004): NCBI GI: 242760147 Blast Desc: Pfs, NACHT and Ankyrin domain protein [Talaromyces stipitatus ATCC 10500] gi|218723125|gb|EED22542.1| Pfs, NACHT and Ankyrin domain protein [Talaromyces stipitatus ATCC 10500]
  misc_feature (723)..(1004): NCBI GI: 212532817 Blast Desc: multiple ankyrin repeats single kh domain protein, [Penicillium marneffei ATCC 18224] gi|210071929|gb|EEA26018.1| multiple ankyrin repeats single kh domain protein, [Penicillium
  misc_feature (723)..(1004): NCBI GI: 212532817 Blast Desc: multiple ankyrin repeats single kh domain protein, [Penicillium marneffei ATCC 18224] gi|210071929|gb|EEA26018.1| multiple ankyrin repeats single kh domain protein, [Penicillium
METIETPLTTAPEVDQDFRALDRYRFIFWHLYLQQNKSLITVKEEVEKTYGLPARDKKEYETLLRVWGFVKKAHIEEWVKVQIHIKKRERDGKDTEVYISQVKKRREHIGEILRKNKQSGRFRALLEREGSPELPSYFRLSTPPNDQPAIQYCFPGGANAWADHPQPSLAIWSTLSNNENSSAQLWINVPTSSLWTTVKSKVGLSGLQHGTYSISSGEAESVEPVSRSQAMAPITQTSLDFIKWIMHVCTLLVNGSKADDLTEVGDVAEGLSLIKVERNIPALKAFSQLDSPAVETTFRGLVKLILRLNDWETLQILFEICFTTQAEDWIQEQGKTILRGAARAGFDKMGTLFSKLLKTGVLESLRAQEMNDLLFRVACQLDTSSMVALTRAGAFFKDFDGDMERDWFSQKATRETWSMSEACQLSSLLSLAKFDVDCALTDRIDVLIFPMIASSKWQFPAFNRHSQGDEVAYGPSNLLHRYFVDRLWYQGHHALYETMATGSQRAKKWVTVPGTFIAASNSIDQLHVYLDSRSDEPLLERETALEAALSLAAFEGNTVAIQSIIEIGTNANTPKLHVKYCPFIIAARCSRIGVLDILVDAADFTWINDYLPHYRDWPADSIQRLIRQGVLRNFNVDSLIDAINKEPRDEELADIILEMGVGADTMVDGVNLIQHAIQLGCGPAAVKFLHSRKVEVHSRPCPIRGTTMLHDAVGKSGPIFYRTYDDMIELAEFLLEKGASCKSDAESGGPTILEMLAHTCADEDYPLHLFASLLDRGAELNGPNQRFEDCMLSDKPVLSRLMICSQAPEELLLRTIREGADIHSNRWDDHTALQLAILCGRYEVARQLVFTARADINEPAFEDHGHTALQAACNPWNGDASLGFVQYLIDNRADVNASGASRGGYTALHSAIAGGSVSVVCLLIDTGAEINAAATCNLEHDDTQKYCALDVAAHYGRMDIIDMLLKSKATSQKRGNTPYDGAIELAEISGHDSIADMFRGKCAEKARQNAMLLFSGQDSSETDETLHQDLDLSINQTTSSMTGIMQSVEPDLTDPDRFEDEGGVILASLDAEFPL

SEQ ID NO: 6034 - DNA, 1269 bp, Muscodor strobelii
  misc_feature: SGI EST ID NO. CUFF.15231.0
  misc_feature: Variant of the nucleotide sequence at SEQ ID NO 6032
aaaggatacagaggtttacataagccaggtcaagaagcgtcgcgagcatatcggcgagattctcagaaagaataagcaaagcggccgtttcagagcattactcgagcgagagggtagccctgagcttccatcgtatttccgtttgagtacgccaccaaatgatcaacccgccattcaatattgtttccctggaggcgcgaatgcatgggccgatcatcctcaaccgtcgcttgcgatttggagcacgttgtccaataacgaaaactcatccgcacagctttggattaatgtaccgacaagcagcctttggactaccgtcaagtcgaaagtcgggctatctgggcttcagcatggcacctactcaatcagttccggcgaagctgagagcgttgaaccagtgtcccgaagccaggcgatggcacctataacgcaaacatctctagacttcatcaagtggatcatgcatgtttgcacattacttgtaaatggctctaaggcagacgacctcacggaggttggcgatgtggcagaaggtctgtcgctgatcaaagtcgaacggaacatacccgcgctgaaagccttttcccaattggactctcccgctgtagagacgactttcagaggactcgtcaagctcatattgcgtttgaatgactgggaaacactccagattctttttgaaatctgttttactactcaagcggaggattggattcaagagcagggcaagactatactacggggtgccgcacgggctggattcgataagatgggtactctcttttcgaaactcttaaagacaggcgttttggaatcgctgcgagctcaagaaatgaatgatctattgttccgtgtcgcatgtcaattggatactagctccatggttgcattgacacgggctggggccttcttcaaagatttcgatggcgacatggaaagagactggtttagccaaaaggcgacccgtgaaacttggagcatgtctgaagcatgtcagctgagctctttactatctttggcaaaattcgatgtcgattgcgctctgactgatcgaattgacgtcttgatatttccgatgatagcatcgtctaagtggcagtttccagctttcaatcgtcattcacaaggagatgaagttgcgtacgggccatcgaatctattacatcgatatttcgtagatcgtctctggtatcaaggacaccatgctctgtatgagacaatggctactggaagtcagagagcgaagaagtgggtgaccgtacctggaac

SEQ ID NO: 6035 - DNA, 786 bp, Muscodor strobelii
  misc_feature: SGI cDNA ID NO. 561742
  misc_feature: Elevated expression when VOC is produced
  misc_feature: Encodes the peptide sequence at SEQ ID NO 6036
atgccgtcaatcctcatcgtgggcggcacacggggtctcggtgcctcactggcgaaccagtatgccggcgaatcatcaaatactgtctacgcgacgagtcgatcggattctgctcctgcctcggactcgggcttgcataaggatattaaatggctgtctggggtagatttgatgaagtccagcgtgggaagtgatcttgcggcgaagcttgagtggaagggtggtttggacgtcgtgatcatcagcgcaggcgcattcatgaccgaggacttcggcaaggagaaaggaccgaattgggacaatgaagtcacgatgtatactacgagttcgattgctcctgtgttcatcgtgcacgagctttttcatgccggtcttctgaaatcaggctctaaagtggtctttgtctcaagcgaagcgggtagcatcaccctacgacatgagaaagagggaggcggcaattacgcgcatcatgcttccaaggcggcgttgaacatggctgccaaactcctgagtattgatatgaaggatgatggggttgttgttagtattgtgcatccggggttcatgaggacggagatgaccaagaatgtcgggttcgataagcactgggatgagggcggagctgttactccggatgaggctgcggagagtttgcgggagtgggttaagaagctggacataagcaagtctggcgagtattgggctccgaggggacctagggatattgggatggcggagactgtgatgggcaagaatttaagcacgcctttgaagttgccttggtaa

SEQ ID NO: 6036 - protein, 261 aa, Muscodor strobelii
  misc_feature: SGI Peptide ID NO. 561742
  misc_feature (2)..(175): Pfam Id: PF00106 Pfam Desc: short chain dehydrogenase
  misc_feature (1)..(261): NCBI GI: 46128699 Blast Desc: FG08727.1 [Gibberella zeae PH-1]
  misc_feature (1)..(261): NCBI GI: 256733998 Blast Desc: NECHADRAFT_59006 [Nectria haematococca mpVI 77-13-4]
  misc_feature (1)..(261): NCBI GI: 261353321 Blast Desc: oxidoreductase [Verticillium albo-atrum VaMs.102]
  misc_feature (3)..(261): NCBI GI: 259485883 Blast Desc: TPA: oxidoreductase, short chain dehydrogenase/reductase family superfamily (AFU_orthologue; AFUA_3G13450) [Aspergillus nidulans FGSC A4]
  misc_feature (1)..(261): NCBI GI: 156061439 Blast Desc: SS1G_02864 [Sclerotinia sclerotiorum 1980] gi|154700266|gb|EDO00005.1| SS1G_02864 [Sclerotinia sclerotiorum 1980]
  misc_feature (1)..(261): NCBI GI: 154313849 Blast Desc: BC1G_05774 [Botryotinia fuckeliana B05.10] gi|150849356|gb|EDN24549.1| BC1G_05774 [Botryotinia fuckeliana B05.10]
  misc_feature (3)..(261): NCBI GI: 119490927 Blast Desc: oxidoreductase, short chain dehydrogenase/reductase family superfamily [Neosartorya fischeri NRRL 181] gi|119411284|gb|EAW21227.1| oxidoreductase, short chain family
  misc_feature (3)..(261): NCBI GI: 146323472 Blast Desc: oxidoreductase, short chain dehydrogenase/reductase family superfamily [Aspergillus fumigatus Af293] gi|129558273|gb|EAL92239.2| oxidoreductase, short chain family
  misc_feature (1)..(261): NCBI GI: 242808445 Blast Desc: oxidoreductase, short chain dehydrogenase/reductase family superfamily [Talaromyces stipitatus ATCC 10500] gi|218715789|gb|EED15211.1| oxidoreductase, short chain family
  misc_feature (1)..(261): NCBI GI: 212537705 Blast Desc: oxidoreductase, short chain dehydrogenase/reductase family superfamily [Penicillium marneffei ATCC 18224] gi|210068750|gb|EEA22841.1| oxidoreductase, short chain family
  misc_feature: Useful for introducing or modulating the production of volatile compounds
MPSILIVGGTRGLGASLANQYAGESSNTVYATSRSDSAPASDSGLHKDIKWLSGVDLMKSSVGSDLAAKLEWKGGLDVVIISAGAFMTEDFGKEKGPNWDNEVTMYTTSSIAPVFIVHELFHAGLLKSGSKVVFVSSEAGSITLRHEKEGGGNYAHHASKAALNMAAKLLSIDMKDDGVVVSIVHPGFMRTEMTKNVGFDKHWDEGGAVTPDEAAESLREWVKKLDISKSGEYWAPRGPRDIGMAETVMGKNLSTPLKLPW

SEQ ID NO: 6037 - DNA, 1596 bp, Muscodor strobelii
  misc_feature: SGI EST ID NO. CUFF.15241.0
  misc_feature: Variant of the nucleotide sequence at SEQ ID NO 6035
acgacattgacagcaagcagctatattatcaccaccgccagccgacgtcacatataaccctttcacattccactctaacctcatacctcatacctcactcatcttaaaattatacggtagtcacccaggcatcgctgagctcgttcatcccgcattacatccatcttcatcatgccgtcaatcctcatcgtgggcggcacacggggtctcggtgcctcactggcgaaccagtatgccggcgaatcatcaaatactgtctacgcgacgagtcgatcggattctgctcctgcctcggactcgggcttgcataaggatattaaatggctgtctggggtagatttgatgaagtccagcgtgggaagtgatcttgcggcgaagcttgagtggaagggtggtttggacgtcgtgatcatcagcgcaggcgcattcatgaccgaggacttcggcaaggagaaaggaccgaattgggacaatgaagtcacgatgtatactacgagttcgattgctcctgtgttcatcgtgcacgagctttttcatgccggtcttctgaaatcaggctctaaagtggtctttgtctcaagcgaagcgggtagcatcaccctacgacatgagaaagagggaggcggcaattacgcgcatcatgcttccaaggcggcgttgaacatggctgccaaactcctgagtattgatatgaaggatgatggggttgttgttagtattgtgcatccggggttcatgaggacggagatgaccaagaatgtcgggttcgataagcactgggatgagggcggagctgttactccggatgaggctgcggagagtttgcgggagtgggttaagaagctggacataagcaagtctggcgagtattgggctccgaggggacctagggatattgggatggcggagactgtgatgggcaagaatttaagcacgcctttgaagttgccttggtaagatgagagcgggcagttagacttgagtgtcctgaagatggaggtcttatatatcactacagctctacagtactacagattgatcgcaattcgttcaattcatcaacatgagccctttcgcgactatttctcgattcgttatgtcatctactcgtctactcgtccctcaaatttgagatcatctcgacacacttacgccatacaactacaacggaaattccgcgtcaagagacgcaagaatgacccctccttcatcttcgaacctatctgggtctgtcaagtctggctctacggattgcatgattccagtcatcgaggaagtggtttggtttatgctgagatccaggtcctgatgaagggtttcgtcagtctcggagctatcttgtccactgaacaatagcattgcattttgccttgctttctctgcacatttccctctaaacatgtcagcaatgctatcatgcccgctgatctcggctaactcaattgcaccgtcatagggagtattgcctcgcttctgactggtcgctttggattttaatagcatgtcgatgatgtccattctaccataatgtgcagccacgtctaatgcacaatatttctgtgtatcgtcatgctcgaggttacaagtggctgcagc

SEQ ID NO: 6038 - DNA, 1995 bp, Muscodor strobelii
  misc_feature: SGI cDNA ID NO. 561743
  misc_feature: Encodes the peptide sequence at SEQ ID NO 6039
atgggttcgacagcaactcccatcctgcccgaggccgggaagcgcaacatcctcatcaccagtgctttgccctatgtcaacaacattcctcatcttggcaacatcatcggttccgtcctctcagcagatgtcttcgctcgctactgccgcgctcgcggtctaacaaccctttatgtctgcggttccgaccagtatggcacggcgaccgagacgaaagcccttgaggagggcatgacccccgaagcactttgcgccaagtatcacgccgttcataaggagatctacgactggtttggcattgaattcgacgtatttggacgaaccccgactgctcagcatacccagatagtccaggacatcttctcccgcttgtgggagaacggtttcatcgaggaacgagagaccatccaaccttactgccccaagcacgacagtttccttgctgatcgcttcgttgagggtgaatgcagcatctgtcactacgaggacgccagaggtgatcagtgcgacaagtgcgggaacttgcttgacccgcttgagccagttgccgtagatggcagcgaggccaaaggtaccggtactggatggctgttgaagcctcggtgcaaactggacggtgaaacgcctgtgccacgaaaaacgaaacatttgtttttgaaacttgacgctttgagagacgacatcgtatcttggttcgagaagacaaataagcagtggagcgccaactgcattgccatcaccaagtcatggatagatagaggtcttcaggcgagaggtatcacgagagatttgaagtggggtgtaccgattccaaagggtcttaagggactttcggaggaagactacaaagacaaagtcttttacgtctggttcgatgcttgtatcggatatccatctatcacaaaaacatataccgatggcgacaacctagatggctccaagtgggagcaatggtggaagaacccggataacgtcacattgtaccaattcatgggcaaggataacgtaccgttccactccatcattttcccggggtctcagcttggtacccgcgagaagtggaccaaagtaggtagattctcaacaactgagtatctgaactatgagggtggaaaattcagcaaatcgaggaatatcggtgtctttggtaactctgccaaggatgctggtattcatcccgatgtttggaggttcttcttggtgtcccgacgccctgaagttggcgactcagagttcaagtgggacgagttcattgcagtgaacaacaacgaccttctcaagaacttgggcaacctgtgtcagcgtgtcatcaaattctgccatgccaagtttgatgctacgatacctaactacaaatcttacaccaacgaggcccttgatacgcacaaggcagagaccaatgcacttctgaaggaatacaacactgttctagaggagatcaaattacgacagggcctgtccaccgtcctccttatttcagctctcggcaacaagctgctccaggacaacaagcttagcaatcaactgttggctgaagaccccgagcgctgcgcaggtgttgtcgggcttgcactcaaccacatccaccttgtcgccaatcttctaagtcccttcatgcccggcatggcaaaatctatcctcacccaactcggcctgccaaaagagaagcaggtattctccattcccgacgtatggacaggcaccacccttgagcccggccaaaagctgggcgagccagagcttctgttctctcaaattccacccacgcgtcttgatgaatggcgcgatgcttacggtggtgatgaactcaagaaacagaagcagctcgctgctgagcaagctgcagctaagaaagccgagaaggagaggaagaaggcggagaaagctgccaagaaagccgctgctgctagtgaagccactgatgccgctgagactgcgggcgtcgaggcttccgcgaaggttgaggcacctgatgctgtgaaacctagtagctag

SEQ ID NO: 6039 - protein, 664 aa, Muscodor strobelii
  misc_feature: SGI Peptide ID NO. 561743
  misc_feature (17)..(437): Pfam Id: PF09334 Pfam Desc: tRNA synthetases class I (M)
  misc_feature (5)..(604): NCBI GI: 241956011 Blast Desc: methionyl-tRNA synthetase, cytoplasmic, [Candida dubliniensis CD36] gi|223644068|emb|CAX41811.1| methionyl-tRNA synthetase, cytoplasmic, [Candida dubliniensis CD36]
  misc_feature (8)..(630): NCBI GI: 238842554 Blast Desc: methionyl-tRNA synthetase [Microsporum canis CBS 113480]
  misc_feature (6)..(603): NCBI GI: 3924 Blast Desc: tRNA synthetase [Saccharomyces cerevisiae] gi|151943538|gb|EDN61849.1| methionyl-tRNA synthetase [Saccharomyces cerevisiae YJM789]
  misc_feature (6)..(603): NCBI GI: 256272650 Blast Desc: Mes1p [Saccharomyces cerevisiae JAY291]
  misc_feature (6)..(603): NCBI GI: 6321704 Blast Desc: Mes1p [Saccharomyces cerevisiae] gi|1711639|sp|P00958.4|SYMC_YEAST RecName: Full=Methionyl-tRNA synthetase, cytoplasmic; AltName: Full=Methionine--tRNA ligase;
  misc_feature (1)..(603): NCBI GI: 50302967 Blast Desc: protein product [Kluyveromyces lactis] gi|49640552|emb|CAH03009.1| KLLA0A09647p [Kluyveromyces lactis]
  misc_feature (1)..(609): NCBI GI: 39973615 Blast Desc: MGG_01046 [Magnaporthe grisea 70-15] gi|145018000|gb|EDK02279.1| MGG_01046 [Magnaporthe grisea 70-15]
  misc_feature (1)..(606): NCBI GI: 85114097 Blast Desc: NCU07451 [Neurospora crassa OR74A] gi|28926427|gb|EAA35402.1| NCU07451 [Neurospora crassa OR74A]
  misc_feature (1)..(605): NCBI GI: 171686138 Blast Desc: protein product [Podospora anserina] gi|170943030|emb|CAP68683.1| protein product [Podospora anserina]
  misc_feature (1)..(606): NCBI GI: 256733535 Blast Desc: [Nectria haematococca mpVI 77-13-4]
  misc_feature (6)..(600): SWISSPROT Homolog: EC 6.1.1.10 Methionine--tRNA ligase
MGSTATPILPEAGKRNILITSALPYVNNIPHLGNIIGSVLSADVFARYCRARGLTTLYVCGSDQYGTATETKALEEGMTPEALCAKYHAVHKEIYDWFGIEFDVFGRTPTAQHTQIVQDIFSRLWENGFIEERETIQPYCPKHDSFLADRFVEGECSICHYEDARGDQCDKCGNLLDPLEPVAVDGSEAKGTGTGWLLKPRCKLDGETPVPRKTKHLFLKLDALRDDIVSWFEKTNKQWSANCIAITKSWIDRGLQARGITRDLKWGVPIPKGLKGLSEEDYKDKVFYVWFDACIGYPSITKTYTDGDNLDGSKWEQWWKNPDNVTLYQFMGKDNVPFHSIIFPGSQLGTREKWTKVGRFSTTEYLNYEGGKFSKSRNIGVFGNSAKDAGIHPDVWRFFLVSRRPEVGDSEFKWDEFIAVNNNDLLKNLGNLCQRVIKFCHAKFDATIPNYKSYTNEALDTHKAETNALLKEYNTVLEEIKLRQGLSTVLLISALGNKLLQDNKLSNQLLAEDPERCAGVVGLALNHIHLVANLLSPFMPGMAKSILTQLGLPKEKQVFSIPDVWTGTTLEPGQKLGEPELLFSQIPPTRLDEWRDAYGGDELKKQKQLAAEQAAAKKAEKERKKAEKAAKKAAAASEATDAAETAGVEASAKVEAPDAVKPSS

SEQ ID NO: 6040 - DNA, 1786 bp, Muscodor strobelii
  misc_feature: SGI EST ID NO. CUFF.15436.0
  misc_feature: Variant of the nucleotide sequence at SEQ ID NO 6038
gcatctgtcactacgaggacgccagaggtgatcagtgcgacaagtgcgggaacttgcttgacccgcttgagccagttgccgtagatggcagcgaggccaaaggtaccggtactggatggctgttgaagcctcggtgcaaactggacggtgaaacgcctgtgccacgaaaaacgaaacatttgtttttgaaacttgacgctttgagagacgacatcgtatcttggttcgagaagacaaataagcagtggagcgccaactgcattgccatcaccaagtcatggatagatagaggtcttcaggcgagaggtatcacgagagatttgaagtggggtgtaccgattccaaagggtcttaagggactttcggaggaagactacaaagacaaagtcttttacgtctggttcgatgcttgtatcggatatccatctatcacaaaaacatataccgatggcgacaacctagatggctccaagtgggagcaatggtggaagaacccggataacgtcacattgtaccaattcatgggcaaggataacgtaccgttccactccatcattttcccggggtctcagcttggtacccgcgagaagtggaccaaagtaggtagattctcaacaactgagtatctgaactatgagggtggaaaattcagcaaatcgaggaatatcggtgtctttggtaactctgccaaggatgctggtattcatcccgatgtttggaggttcttcttggtgtcccgacgccctgaagttggcgactcagagttcaagtgggacgagttcattgcagtgaacaacaacgaccttctcaagaacttgggcaacctgtgtcagcgtgtcatcaaattctgccatgccaagtttgatgctacgatacctaactacaaatcttacaccaacgaggcccttgatacgcacaaggcagagaccaatgcacttctgaaggaatacaacactgttctagaggagatcaaattacgacagggcctgtccaccgtcctccttatttcagctctcggcaacaagctgctccaggacaacaagcttagcaatcaactgttggctgaagaccccgagcgctgcgcaggtgttgtcgggcttgcactcaaccacatccaccttgtcgccaatcttctaagtcccttcatgcccggcatggcaaaatctatcctcacccaactcggcctgccaaaagagaagcaggtattctccattcccgacgtatggacaggcaccacccttgagcccggccaaaagctgggcgagccagagcttctgttctctcaaattccacccacgcgtcttgatgaatggcgcgatgcttacggtggtgatgaactcaagaaacagaagcagctcgctgctgagcaagctgcagctaagaaagccgagaaggagaggaagaaggcggagaaagctgccaagaaagccgctgctgctagtgaagccactgatgccgctgagactgcgggcgtcgaggcttccgcgaaggttgaggcacctgatgctgtgaaacctagtagctaggtaaggagatgtaaatacccagcgcggcggcccggattatgcttagagtttagcgagcatagttgggaacttatattgctctttagtgagaaatttgggccatatggattgagtgggaaggagcgtgaaatgaaacattatgatatgcgagcaaatgccgttcgcttctatacgtcgtgccaccctcgctgtagcatcttcgtggaaagcagtgttgtaaccgtaaaagtgaaaattacgctcatatcatcaaattttac

SEQ ID NO: 6041 - DNA, 2004 bp, Muscodor strobelii
  misc_feature: SGI cDNA ID NO. 561744
  misc_feature: Elevated expression when VOC is produced
  misc_feature: Encodes the peptide sequence at SEQ ID NO 6042
atgagtcccttgccagaagagtacgatattattgtgtgcggtggtggtagttgtggttgcgtcgtggcaggccgtttggccaatctggaccataacctcaaggtcctcttgattgaggccggtgaaagtaatctgaacaacccatgggtcttccgccctggtatttaccccaggaacatgaaactggactcaaagacggcatctttctacgaatcccgtccgtccaaatggcttgctggccgaaaggcggtagtgccatgcgctcatattctgggaggtggttcatccattaacttcctcatgtacacgagagcttcggcctcggactacgatgacttccaggctaagggctggacgaccaaggagctactgccactgatgaagaagcatgagacatatcagcgggcatgtcacaacagggacattcacggctttgagggcccgatcaaagtgtccttcggcaactatacgtatcccatcaaagatgatttcttgcgagctgcagagtcgcaagatattccttttgtcgacgatctacaagacttgagcaccggacatggtgccgagcattggctaaaatggatcaaccgcgatactggccgtcgcagtgacagtgctcatgcctacattcattctactcgagcggttcacgataatctttacctcgcttgtaacaccaaggttgataaggttattattgagaatggccgtgctgttggcgtgcagactgttccgacgaagccgctccaccccagccaggcgaagacgcgcatcttcaaagctcgcaagcagattgtggtatctggcggtactctatcttcgcctctcatcctccaacgttccggcattggtgacccagaaaagctcaaagctgcaggagtagaacctattgtggatctgcctggcgttggtctcaatttccaagaccactatctcaccttcgcgacatatcgcgccaaaccagagactgaaagctttgacgactttgtgcgaggtgtccccgaggtacagaagaaggtcttcgaccaatggcaactggatggcaccggtccattagccacgaatggcatcgatgctggagtgaagattcggccgacagaggaggagctgaaggagttcgaaacgtggccgactcctcacttcggcgagggctggaagtcgtactttgctgagaaacctgacaagccggtgatgcactactcggtcattgctgggtggtttggcgaccatatgctcatgcccccgggcaacttcttcaccatgttccacttcctggagtacccattctctcgtggattcacgcacatcaagtcggcggatccgtacgcgacgcccgatttcgacacgggattcatgaacgacgagcgagacatggcgccgatggtgtggggctacatcaagtcgcgcgagacggcacggcgcatggacgcatatgcgggtgaggtgcaggcaatgcacccgttcttccaatacgactcgcctgcgcgtgccaacgacatggacttggagacaacgaagcggtatgctcttcccggcaacttgagcgcgggcttgcagcacggtagctggagcgtatttaacccgaagccggctcggacggcagaggcgaacatcctcaacagcaacaaagccgacattctagaggagctcaagtacagcaccgaagacatcaaggcgatcgaggaatggaccaaacgccacgtggagagcacttggcatagtctgggcacttgctcgatggctccgaaggagggcaatagcatcgtcaagcatggtgtgctggatgagcgcctcaacgtccacggcgtcgagggcctcaaggttgccgatctaagtatctgccccgacaacgtcggctgcaacacgtactctacggctctcctaattggcgagaagtgcgcgatgctggttgctgaggaccttggctactcgggcgaagcgctcgacatgaaggtgccgacctataatgcgcccaaggaagcagcccttccgtttcgcgtctaa

SEQ ID NO: 6042 - protein, 667 aa, Muscodor strobelii
  misc_feature: SGI Peptide ID NO. 561744
  misc_feature (421)..(633): Pfam Id: PF05199 Pfam Desc: GMC oxidoreductase
  misc_feature (8)..(325): Pfam Id: PF00732 Pfam Desc: GMC oxidoreductase
  misc_feature (4)..(662): NCBI GI: 156065659 Blast Desc: conserved [Sclerotinia sclerotiorum 1980] gi|154691699|gb|EDN91437.1| conserved [Sclerotinia sclerotiorum 1980]
  misc_feature (4)..(662): NCBI GI: 154320327 Blast Desc: BC1G_02144 [Botryotinia fuckeliana B05.10] gi|150854883|gb|EDN30075.1| BC1G_02144 [Botryotinia fuckeliana B05.10]
  misc_feature (1)..(667): NCBI GI: 116193945 Blast Desc: CHGG_06690 [Chaetomium globosum CBS 148.51] gi|88182603|gb|EAQ90071.1| CHGG_06690 [Chaetomium globosum CBS 148.51]
  misc_feature (4)..(623): NCBI GI: 46126305 Blast Desc: FG07530.1 [Gibberella zeae PH-1]
  misc_feature (4)..(662): NCBI GI: 13182929 Blast Desc: AF232903_1 alcohol oxidase p68 [Cochliobolus victoriae] gi|40748060|gb|AAR89538.1| alcohol oxidase p68 [Cochliobolus victoriae]
  misc_feature (4)..(660): NCBI GI: 169600391 Blast Desc: SNOG_03029 [Phaeosphaeria nodorum SN15] gi|111068640|gb|EAT89760.1| SNOG_03029 [Phaeosphaeria nodorum SN15]
  misc_feature (4)..(662): NCBI GI: 242762755 Blast Desc: choline dehydrogenase, [Talaromyces stipitatus ATCC 10500] gi|218723638|gb|EED23055.1| choline dehydrogenase, [Talaromyces stipitatus ATCC 10500]
  misc_feature (4)..(667): NCBI GI: 145255551 Blast Desc: An18g05480 [Aspergillus niger] gi|134084590|emb|CAK97466.1| protein product [Aspergillus niger]
  misc_feature (1)..(667): NCBI GI: 171683143 Blast Desc: protein product [Podospora anserina] gi|170941531|emb|CAP67183.1| protein product [Podospora anserina]
  misc_feature (4)..(662): NCBI GI: 238501422 Blast Desc: glucose-methanol-choline (gmc) oxidoreductase, [Aspergillus flavus NRRL3357] gi|220692182|gb|EED48529.1| glucose-methanol-choline (gmc) oxidoreductase, [Aspergillus
  misc_feature (4)..(655): SWISSPROT Homolog: EC 1.1.3.13 Alcohol oxidase
  misc_feature: Useful for introducing or modulating the production of volatile compounds
MSPLPEEYDIIVCGGGSCGCVVAGRLANLDHNLKVLLIEAGESNLNNPWVFRPGIYPRNMKLDSKTASFYESRPSKWLAGRKAVVPCAHILGGGSSINFLMYTRASASDYDDFQAKGWTTKELLPLMKKHETYQRACHNRDIHGFEGPIKVSFGNYTYPIKDDFLRAAESQDIPFVDDLQDLSTGHGAEHWLKWINRDTGRRSDSAHAYIHSTRAVHDNLYLACNTKVDKVIIENGRAVGVQTVPTKPLHPSQAKTRIFKARKQIVVSGGTLSSPLILQRSGIGDPEKLKAAGVEPIVDLPGVGLNFQDHYLTFATYRAKPETESFDDFVRGVPEVQKKVFDQWQLDGTGPLATNGIDAGVKIRPTEEELKEFETWPTPHFGEGWKSYFAEKPDKPVMHYSVIAGWFGDHMLMPPGNFFTMFHFLEYPFSRGFTHIKSADPYATPDFDTGFMNDERDMAPMVWGYIKSRETARRMDAYAGEVQAMHPFFQYDSPARANDMDLETTKRYALPGNLSAGLQHGSWSVFNPKPARTAEANILNSNKADILEELKYSTEDIKAIEEWTKRHVESTWHSLGTCSMAPKEGNSIVKHGVLDERLNVHGVEGLKVADLSICPDNVGCNTYSTALLIGEKCAMLVAEDLGYSGEALDMKVPTYNAPKEAALPFRV

SEQ ID NO: 6043 - DNA, 4205 bp, Muscodor strobelii
  misc_feature: SGI EST ID NO. CUFF.15771.0
  misc_feature: Variant of the nucleotide sequence at SEQ ID NO 6041
catgatttggggcttcccatctatacactattctcacctccgagactgatcaatcatgtctgctacgaccgccatttccatgtctcccacagcctggccatctgttggactcgtgtcacgtatcacaagcaccaattcgccgtcccaagccgacaggttcttaccagtctaccaggatctctcatcactacccactggacacaggcaagacttacgcaagggaaccctcgtatctgttcgagaaccattaaatcagatccacaagacataagtgagcacgggcaatttagaagacaaggtatgattaagcgagtctgagatgaggccacggctccaagaacatagccctctgggcattgcgcagcgcgaggccctccgcagggaacatgtgcgatccgggatgagtgttcacagattgtgtagcgatgcaatcccatgaatggtgagaactttgcggttcgcccagacgcgcatccatccggtacgactttgaacgtcacttctccaactacccctcgtctcgattctgtatgctacagtagttccatcgaatcaagagctcgtcgtttataccgagctgcacgagcattgtcacacttgtcggcaaattgtttcctttggtgtgcacaccctcttctgagctttacgatttgagttctgtcagaacatggcaacccgcgctattctggcacaaacagtaacgtattctccaaaacagctcaggcacagcatgagtggtattgtcaggttaccaccgataaagctttgttttgccggcgatattggaattggcagatcaccaattgagacagccctttcaagacaggtcattttggtgtagcaagtcgatcacccaagagggccttgctcgctcttccgctgctccggttgttccatgctcatcctcttccttgggtctattgtgcagggcagacaatcatgatttcgagaacatttcgatatatccgttgcggggaaaaccagggccaagattatgggatgtcataacaataacgctttcacgctgccggtatccacccccgcattttccaccaacgttaagcccctagtgggatacatgggaagtcatctagctgcatggcggcatccaatcgacttcactgccacgagtctcgtcttcctaacttagaaaacatgaacaaggatgagacagtcctcaagttgttggcctcaaactccgagcctcaccgagcccgacccctgtcaaatggcctgacttcagcggccttgggacaatttcatgtttgaaaggacgtatagtcttcatccattgcccaatcatcagctaccatcagctcttggaccactggcttgaactcggcagaaaggcatacgagggtaagtctctagcatgctgcgacaagttcgttgttgagctctaccccatcgccaaccaccatgtcagcaaatgcccagtgacaaatcccgctcgccatgaggacgcggtttacttatcccgcgctatccttctgaaagcatctagatcatcggttcatctagggagaagttgcagcgattatgttgcatccaaagtgtcagatgacaacaaccacaagcaggcatcatcctttcaaggaggggtctacagcgttcatgctgatgccaattggtctacccaaagtcgatgggtatgagcaccatcgtcattggcggcttcatacggaaaagacgggaagtggtgtttggaaactgcagctgggccagcttcccctctcgtttggatatttgtagatgcagcagacctgcaggttcgatggaacataagtaatcatgctttaccttcaaagctcccctcatttttttcaaaaatctttagttgagagcagcaaaaaccattagtcgacgatatgagtcccttgccagaagagtacgatattattgtgtgcggtggtggtagttgtggttgcgtcgtggcaggccgtttggccaatctggaccataacctcaaggtcctcttgattgaggccggtgaaagtaatctgaacaacccatgggtcttccgccctggtatttaccccaggaacatgaaactggactcaaagacggcatctttctacgaatcccgtccgtccaaatggcttgctggccgaaaggcggtagtgccatgcgctcatattctgggaggtggttcatccattaacttcctcatgtacacgagagcttcggcctcggactacgatgacttccaggctaagggctggacgaccaaggagctactgccactgatgaagaagcatgagacatatcagcgggcatgtcacaacagggacattcacggctttgagggcccgatcaaagtgtccttcggcaactatacgtatcccatcaaagatgatttcttgcgagctgcagagtcgcaagatattccttttgtcgacgatctacaagacttgagcaccggacatggtgccgagcattggctaaaatggatcaaccgcgatactggccgtcgcagtgacagtgctcatgcctacattcattctactcgagcggttcacgataatctttacctcgcttgtaacaccaaggttgataaggttattattgagaatggccgtgctgttggcgtgcagactgtgtatgttttcctcgcttgaacatgatcaaccctgtctaatagagaattagtccgacgaagccgctccaccccagccaggcgaagacgcgcatcttcaaagctcgcaagcagattgtggtatctggcggtactctatcttcgcctctcatcctccaacgttccggcattggtgacccagaaaagctcaaagctgcaggagtagaacctattgtggatctgcctggcgttggtctcaatttccaagaccactatctcaccttcgcgacatatcgcgccaaaccagagactgaaagctttgacgactttgtgcgaggtgtccccgaggtacagaagaaggtcttcgaccaatggcaactggatggcaccggtccattagccacgaatggcatcgatgctggagtgaagattcggccgacagaggaggagctgaaggagttcgaaacgtggccgactcctcacttcggcgagggctggaagtcgtactttgctgagaaacctgacaagccggtgatgcactactcggtcattgctgggtggtttggcgaccatatgctcatgcccccgggcaacttcttcaccatgttccacttcctggagtacccattctctcgtggattcacgcacatcaagtcggcggatccgtacgcgacgcccgatttcgacacgggattcatgaacgacgagcgagacatggcgccgatggtgtggggctacatcaagtcgcgcgagacggcacggcgcatggacgcatatgcgggtgaggtgcaggcaatgcacccgttcttccaatacgactcgcctgcgcgtgccaacgacatggacttggagacaacgaagcggtatgctcttcccggcaacttgagcgcgggcttgcagcacggtagctggagcgtatttaacccgaagccggctcggacggcagaggcgaacatcctcaacagcaacaaagccgacattctagaggagctcaagtacagcaccgaagacatcaaggcgatcgaggaatggaccaaacgccacgtggagagcacttggcatagtctgggcacttgctcgatggctccgaaggagggcaatagcatcgtcaagcatggtgtgctggatgagcgcctcaacgtccacggcgtcgagggcctcaaggttgccgatctaagtatctgccccgacaacgtcggctgcaacacgtactctacggctctcctaattggcgagaagtgcgcgatgctggttgctgaggaccttggctactcgggcgaagcgctcgacatgaaggtgccgacctataatgcgcccaaggaagcagcccttccgtttcgcgtctaaacccaaatggacaagggaatagcgagtccattcaaactcgaacatactgaatgttaggggaattttgagctgggatatctgattggcatatttataactttctaagccagattgttcacctcgagactgtttaatcatgtacttaatttgatgagatatgaacgaatcgctctttacttccctacctacctagtcaagatagtcgaacatccgtatcatcttcgtttgataattgcttgtaccgatgtcgcgacgcaaacccagcacataacttgatgcaagg

SEQ ID NO: 6044 - DNA, 1842 bp, Muscodor strobelii
  misc_feature: SGI cDNA ID NO. 561745
  misc_feature: Encodes the peptide sequence at SEQ ID NO 6045
atgagtgcgccagttaacgttgactttctcgtcgttggagcaggtccagcgggagcttctttagcggcgttcctcagtcaaaatggtacgaaaaaaaaggaagatatggtgcccgtagcaaatactgaatttattacaggtctcaaaggtcttgtaatcgcgcgtgcccctggaaccgccgacacaccaagagcacacgtgttcagtgcattcgcactagaaacgcttcgtgatatcggtctagagaaagacgccttgggacatgcgactcatagcgacatgtttcagtcatttcgttggtgccggagcatggttggagaagaatacggcaaagtgttggcgtggggagcccatcctgacagcaagcgcgatttggcgaaagcctctccttgcgaatatcttgacctaccacagtcctacctagaaccgattctagttcggtatgcgtcaagtaacggctttaaatttcgattctcaacgcaattggagaatattgaaacgattcctgggagcaatgactccctctgcactattcgcgatcgcatttcggacaatgtcttccaaatcagggccaaatatgtctttggcgcagatggcgcacgcagtaaagtagctgaagctctgggtctcaagttcattacagaaccgcgcgccggaactgctgtcaatgtcatcttgaaagcagaccttagccatctcattccgaaggagcgatatgcaggattgcacaacatcgtgcagccggatcgaaagatctttccccgaatggttcctatctttcgcttgatcagaccttggaatgaatggatactcgtctgcaactcgccaggcgagactgactacttcaaagatcttacgcccaaaagccaaaagctcatcgatctggtccatgaggccatcggtagtaaagacgtagatgttgagattctgagactcgacccctggatagtgcgcgaaagcgttgcggaaacatactcggttgaaggcaaaaatgttttcatattaggtgacgctgcacaccgccatccacctgctcatgcgaatggaagcaatacctgcgtgcaagatgcgtataacctcgcttggaaagtggcctatgtcgctaagggactagctggtccgaggttgctagagacatacagtatcgagcgacagcccacaggcgctatactcgtccgagaggcaaatgatcaaatgcgcgctcatttaagaacgtggtcagctctcggaggtttctctgacgccgaagaaggaatgaagcagattgctgagctttcggaagcatcggccgagggtgagaagcgccggcaagaactccacgatgctctggaaggaaaacggcgcgagtgcgaaaatgtcggtttcagttataatcaatggtacgagtcttcggctgtttatcttgatgacgaaccaagtccccggcctcccctcgttggggacccggtggtgaacatacggatcagcagctatcctggatgtcgtttgccgcatgcttggctcgatataccgacccgacgaaaattgatttccactcacgacttggccggtcatggcgctttctgtctgttcgtcgggcatggaggagatagatggcgaacagcggcagcgaagatctcggaagctactggtattccgataaacacatacggaatcgggcacggcctcgattacattgacgtatatcgggattggcacacaatacgcgaagttgaatatgacggctgcgtcttagtccgaccagaccgtttcgttgcctggcgttcggtgaaggtcgccgaggattgcgagggtaaactcaatcaagtttttaccaagatcctgtcgagagagaacatgtag

SEQ ID NO: 6045 - protein, 613 aa, Muscodor strobelii
  misc_feature: SGI Peptide ID NO. 561745
  misc_feature (6)..(395): Pfam Id: PF01494 Pfam Desc: FAD binding domain
  misc_feature (45)..(613): NCBI GI: 115385903 Blast Desc: conserved [Aspergillus terreus NIH2624] gi|114187945|gb|EAU29645.1| conserved [Aspergillus terreus NIH2624]
  misc_feature (45)..(613): NCBI GI: 39971377 Blast Desc: MGG_10709 [Magnaporthe grisea 70-15] gi|145009400|gb|EDJ94100.1| MGG_10709 [Magnaporthe grisea 70-15]
  misc_feature (5)..(610): NCBI GI: 171677380 Blast Desc: protein product [Podospora anserina] gi|170936758|emb|CAP61416.1| protein product [Podospora anserina]
  misc_feature (47)..(609): NCBI GI: 116178774 Blast Desc: CHGG_00015 [Chaetomium globosum CBS 148.51] gi|88184312|gb|EAQ91780.1| CHGG_00015 [Chaetomium globosum CBS 148.51]
  misc_feature (5)..(609): NCBI GI: 116200953 Blast Desc: CHGG_08361 [Chaetomium globosum CBS 148.51] gi|88176879|gb|EAQ84347.1| CHGG_08361 [Chaetomium globosum CBS 148.51]
  misc_feature (5)..(608): NCBI GI: 261205068 Blast Desc: FAD binding domain-containing protein [Ajellomyces dermatitidis SLH14081] gi|239592330|gb|EEQ74911.1| FAD binding domain-containing protein [Ajellomyces dermatitidis SLH14081] FAD
  misc_feature (5)..(612): NCBI GI: 119466969 Blast Desc: FAD binding domain protein [Neosartorya fischeri NRRL 181] gi|119405443|gb|EAW15394.1| FAD binding domain protein [Neosartorya fischeri NRRL 181]
  misc_feature (47)..(608): NCBI GI: 238504674 Blast Desc: 2,4-dichlorophenol 6-monooxygenase, [Aspergillus flavus NRRL3357] gi|220691039|gb|EED47388.1| 2,4-dichlorophenol 6-monooxygenase, [Aspergillus flavus NRRL3357]
  misc_feature (5)..(609): NCBI GI: 85090724 Blast Desc: NCU09050 [Neurospora crassa OR74A] gi|28919926|gb|EAA29318.1| conserved [Neurospora crassa OR74A]
  misc_feature (5)..(608): NCBI GI: 256731582 Blast Desc: NECHADRAFT_48727 [Nectria haematococca mpVI 77-13-4]
  misc_feature (5)..(609): SWISSPROT Homolog: EC 1.14.13.20 2,4-dichlorophenol 6-monooxygenase
MSAPVNVDFLVVGAGPAGASLAAFLSQNGTKKKEDMVPVANTEFITGLKGLVIARAPGTADTPRAHVFSAFALETLRDIGLEKDALGHATHSDMFQSFRWCRSMVGEEYGKVLAWGAHPDSKRDLAKASPCEYLDLPQSYLEPILVRYASSNGFKFRFSTQLENIETIPGSNDSLCTIRDRISDNVFQIRAKYVFGADGARSKVAEALGLKFITEPRAGTAVNVILKADLSHLIPKERYAGLHNIVQPDRKIFPRMVPIFRLIRPWNEWILVCNSPGETDYFKDLTPKSQKLIDLVHEAIGSKDVDVEILRLDPWIVRESVAETYSVEGKNVFILGDAAHRHPPAHANGSNTCVQDAYNLAWKVAYVAKGLAGPRLLETYSIERQPTGAILVREANDQMRAHLRTWSALGGFSDAEEGMKQIAELSEASAEGEKRRQELHDALEGKRRECENVGFSYNQWYESSAVYLDDEPSPRPPLVGDPVVNIRISSYPGCRLPHAWLDIPTRRKLISTHDLAGHGAFCLFVGHGGDRWRTAAAKISEATGIPINTYGIGHGLDYIDVYRDWHTIREVEYDGCVLVRPDRFVAWRSVKVAEDCEGKLNQVFTKILSRENM

SEQ ID NO: 6046 - DNA, 2918 bp, Muscodor strobelii
  misc_feature: SGI EST ID NO. CUFF.15249.0
  misc_feature: Variant of the nucleotide sequence at SEQ ID NO 6044
gtcaccaatcgccgccatgcaaaattaccaaattgttaggcatgatgagaaaagcaacgagacgctttcacgtcgggttgctgtgataagcatgaccatcctgcgcacatggtacgattggccaggtgtcacgttcgtgttggcagttttacataagaagaggcacagtcgcgtggtgcacattcccaacaagatagatcacagaagattagagtcgccctctcttctataatcaggacacttctcacgaaccgtgtagtacactacaagctgtgcccagaataacggcccgaacatgagtgcgccagttaacgttgactttctcgtcgttggagcaggtccagcgggagcttctttagcggcgttcctcagtcaaaatggtctcaaaggtcttgtaatcgcgcgtgcccctggaaccgccgacacaccaagagcacacgtgttcagtgcattcgcactagaaacgcttcgtgatatcggtctagagaaagacgccttgggacatgcgactcatagcgacatgtttcagtcatttcgttggtgccggagcatggttggagaagaatacggcaaagtgttggcgtggggagcccatcctgacagcaagcgcgatttggcgaaagcctctccttgcgaatatcttgacctaccacagtcctacctagaaccgattctagttcggtatgcgtcaagtaacggctttaaatttcgattctcaacgcaattggagaatattgaaacgattcctgggagcaatgactccctctgcactattcgcgatcgcatttcggacaatgtcttccaaatcagggccaaatatgtctttggcgcagatggcgcacgcagtaaagtagctgaagctctgggtctcaagttcattacagaaccgcgcgccggaactgctgtcaatgtcatcttgaaagcagaccttagccatctcattccgaaggagcgatatgcaggattgcacaacatcgtgcagccggatcgaaagatctttccccgaatggttcctatctttcgcttgatcagaccttggaatgaatggatactcgtctgcaactcgccaggcgagactgactacttcaaagatcttacgcccaaaagccaaaagctcatcgatctggtccatgaggccatcggtagtaaagacgtagatgttgagattctgagactcgacccctggatagtgcgcgaaagcgttgcggaaacatactcggttgaaggcaaaaatgttttcatattaggtgacgctgcacaccgccatccacctgctcatgcgaatggaagcaatacctgcgtgcaagatgcgtataacctcgcttggaaagtggcctatgtcgctaagggactagctggtccgaggttgctagagacatacagtatcgagcgacagcccacaggcgctatactcgtccgagaggcaaatgatcaaatgcgcgctcatttaagaacgtggtcagctctcggaggtttctctgacgccgaagaaggaatgaagcagattgctgagctttcggaagcatcggccgagggtgagaagcgccggcaagaactccacgatgctctggaaggaaaacggcgcgagtgcgaaaatgtcggtttcagttataatcaatggtacgagtcttcggctgtttatcttgatgacgaaccaagtccccggcctcccctcgttggggacccggtggtgaacatacggatcagcagctatcctggatgtcgtttgccgcatgcttggctcgatataccgacccgacgaaaattgatttccactcacgacttggccggtcatggcgctttctgtctgttcgtcgggcatggaggagatagatggcgaacagcggcagcgaagatctcggaagctactggtattccgataaacacatacggaatcgggcacggcctcgattacattgacgtatatcgggattggcacacaatacgcgaagttgaatatgacggctgcgtcttagtccgaccagaccgtttcgttgcctggcgttcggtgaaggtcgccgaggattgcgagggtaaactcaatcaagtttttaccaagatcctgtcgagagagaacatgtagactgcagtatgactgcatcatcgcatagaaaggatgtcataggactagattagtagatttattttagagcgaagctcccgaatgaggggttgatgtgaagtatctgctggcgagaagacatttaataagatgcttcctagcgggtaaaggcattttgtgcgatccttgcgaaatggcttccggatcctgtcctagattgaaagaaatccctttattgaaatttcaataatcctatcttccaactctatgttgatactaataaagtgacctacattcccagctctcaggtgaattcggatctcccgagatgaatttcgcctgcttggggtagacacataatggccgctggctttgtacaccaagccctgctgtatcgttcacaaactttgtagcgattagactgtcaggtgcctcatctttctcaacccatttcatcattgccaagataatatcatgctcagcatcttcatatccaggcaccgagtgtgtcgcacccttcagtgcttgtgacccagcagcgatgtaccaaggtcctgtggtcgacccgctgcagtgactcatgtcaggaatgaggaagaagcggtagaagtcatcaagatcgatccctttgggccgcagtgtttggagcactttcttatagaagtatatgctactaccagttgggatgagaggatccacaagcccatgatactttagtattttacctccacgctcatagaatggtgaaagatcaaagtccgtggctccggcatcgcctggattgatcttgtcagcaactagaacgtctttgtatgtgaactgagttgtgaagtcgtagctcgagtcattgtagaca

SEQ ID NO: 6047 - DNA, 1788 bp, Muscodor strobelii
  misc_feature: SGI cDNA ID NO. 561746
  misc_feature: Elevated expression when VOC is produced
  misc_feature: Encodes the peptide sequence at SEQ ID NO 6048
atgagtgcgccagttaacgttgactttctcgtcgttggagcaggtccagcgggagcttctttagcggcgttcctcagtcaaaatggtctcaaaggtcttgtaatcgcgcgtgcccctggaaccgccgacacaccaagagcacacgtgttcagtgcattcgcactagaaacgcttcgtgatatcggtctagagaaagacgccttgggacatgcgactcatagcgacatgtttcagtcatttcgttggtgccggagcatggttggagaagaatacggcaaagtgttggcgtggggagcccatcctgacagcaagcgcgatttggcgaaagcctctccttgcgaatatcttgacctaccacagtcctacctagaaccgattctagttcggtatgcgtcaagtaacggctttaaatttcgattctcaacgcaattggagaatattgaaacgattcctgggagcaatgactccctctgcactattcgcgatcgcatttcggacaatgtcttccaaatcagggccaaatatgtctttggcgcagatggcgcacgcagtaaagtagctgaagctctgggtctcaagttcattacagaaccgcgcgccggaactgctgtcaatgtcatcttgaaagcagaccttagccatctcattccgaaggagcgatatgcaggattgcacaacatcgtgcagccggatcgaaagatctttccccgaatggttcctatctttcgcttgatcagaccttggaatgaatggatactcgtctgcaactcgccaggcgagactgactacttcaaagatcttacgcccaaaagccaaaagctcatcgatctggtccatgaggccatcggtagtaaagacgtagatgttgagattctgagactcgacccctggatagtgcgcgaaagcgttgcggaaacatactcggttgaaggcaaaaatgttttcatattaggtgacgctgcacaccgccatccacctgctcatgcgaatggaagcaatacctgcgtgcaagatgcgtataacctcgcttggaaagtggcctatgtcgctaagggactagctggtccgaggttgctagagacatacagtatcgagcgacagcccacaggcgctatactcgtccgagaggcaaatgatcaaatgcgcgctcatttaagaacgtggtcagctctcggaggtttctctgacgccgaagaaggaatgaagcagattgctgagctttcggaagcatcggccgagggtgagaagcgccggcaagaactccacgatgctctggaaggaaaacggcgcgagtgcgaaaatgtcggtttcagttataatcaatggtacgagtcttcggctgtttatcttgatgacgaaccaagtccccggcctcccctcgttggggacccggtggtgaacatacggatcagcagctatcctggatgtcgtttgccgcatgcttggctcgatataccgacccgacgaaaattgatttccactcacgacttggccggtcatggcgctttctgtctgttcgtcgggcatggaggagatagatggcgaacagcggcagcgaagatctcggaagctactggtattccgataaacacatacggaatcgggcacggcctcgattacattgacgtatatcgggattggcacacaatacgcgaagttgaatatgacggctgcgtcttagtccgaccagaccgtttcgttgcctggcgttcggtgaaggtcgccgaggattgcgagggtaaactcaatcaagtttttaccaagatcctgtcgagagagaacatgtag

SEQ ID NO: 6048 - protein, 595 aa, Muscodor strobelii
  misc_feature: SGI Peptide ID NO. 561746
  misc_feature (6)..(377): Pfam Id: PF01494 Pfam Desc: FAD binding domain
  misc_feature (8)..(41): Pfam Id: PF00890 Pfam Desc: FAD binding domain
  misc_feature (8)..(31): Pfam Id: PF05834 Pfam Desc: Lycopene cyclase protein
  misc_feature (8)..(41): Pfam Id: PF07992 Pfam Desc: Pyridine nucleotide-disulphide oxidoreductase
  misc_feature (30)..(595): NCBI GI: 115385903 Blast Desc: conserved [Aspergillus terreus NIH2624] gi|114187945|gb|EAU29645.1| conserved [Aspergillus terreus NIH2624]
  misc_feature (29)..(595): NCBI GI: 39971377 Blast Desc: MGG_10709 [Magnaporthe grisea 70-15] gi|145009400|gb|EDJ94100.1| MGG_10709 [Magnaporthe grisea 70-15]
  misc_feature (5)..(592): NCBI GI: 171677380 Blast Desc: protein product [Podospora anserina] gi|170936758|emb|CAP61416.1| protein product [Podospora anserina]
  misc_feature (5)..(591): NCBI GI: 116178774 Blast Desc: CHGG_00015 [Chaetomium globosum CBS 148.51] gi|88184312|gb|EAQ91780.1| CHGG_00015 [Chaetomium globosum CBS 148.51]
  misc_feature (5)..(591): NCBI GI: 116200953 Blast Desc: CHGG_08361 [Chaetomium globosum CBS 148.51] gi|88176879|gb|EAQ84347.1| CHGG_08361 [Chaetomium globosum CBS 148.51]
  misc_feature (5)..(590): NCBI GI: 261205068 Blast Desc: FAD binding domain-containing protein [Ajellomyces dermatitidis SLH14081] gi|239592330|gb|EEQ74911.1| FAD binding domain-containing protein [Ajellomyces dermatitidis SLH14081] FAD
  misc_feature (5)..(594): NCBI GI: 119466969 Blast Desc: FAD binding domain protein [Neosartorya fischeri NRRL 181] gi|119405443|gb|EAW15394.1| FAD binding domain protein [Neosartorya fischeri NRRL 181]
  misc_feature (5)..(591): NCBI GI: 85090724 Blast Desc: NCU09050 [Neurospora crassa OR74A] gi|28919926|gb|EAA29318.1| conserved [Neurospora crassa OR74A]
  misc_feature (5)..(590): NCBI GI: 238504674 Blast Desc: 2,4-dichlorophenol 6-monooxygenase, [Aspergillus flavus NRRL3357] gi|220691039|gb|EED47388.1| 2,4-dichlorophenol 6-monooxygenase, [Aspergillus flavus NRRL3357]
  misc_feature (5)..(590): NCBI GI: 256731582 Blast Desc: NECHADRAFT_48727 [Nectria haematococca mpVI 77-13-4]
  misc_feature (5)..(591): SWISSPROT Homolog: EC 1.14.13.20 2,4-dichlorophenol 6-monooxygenase
  misc_feature: Useful for introducing or modulating the production of volatile compounds
MSAPVNVDFLVVGAGPAGASLAAFLSQNGLKGLVIARAPGTADTPRAHVFSAFALETLRDIGLEKDALGHATHSDMFQSFRWCRSMVGEEYGKVLAWGAHPDSKRDLAKASPCEYLDLPQSYLEPILVRYASSNGFKFRFSTQLENIETIPGSNDSLCTIRDRISDNVFQIRAKYVFGADGARSKVAEALGLKFITEPRAGTAVNVILKADLSHLIPKERYAGLHNIVQPDRKIFPRMVPIFRLIRPWNEWILVCNSPGETDYFKDLTPKSQKLIDLVHEAIGSKDVDVEILRLDPWIVRESVAETYSVEGKNVFILGDAAHRHPPAHANGSNTCVQDAYNLAWKVAYVAKGLAGPRLLETYSIERQPTGAILVREANDQMRAHLRTWSALGGFSDAEEGMKQIAELSEASAEGEKRRQELHDALEGKRRECENVGFSYNQWYESSAVYLDDEPSPRPPLVGDPVVNIRISSYPGCRLPHAWLDIPTRRKLISTHDLAGHGAFCLFVGHGGDRWRTAAAKISEATGIPINTYGIGHGLDYIDVYRDWHTIREVEYDGCVLVRPDRFVAWRSVKVAEDCEGKLNQVFTKILSRENM

SEQ ID NO: 6049 - DNA, 2918 bp, Muscodor strobelii; identical to SEQ ID NO: 6046
  misc_feature: SGI EST ID NO. CUFF.15249.0
  misc_feature: Variant of the nucleotide sequence at SEQ ID NO 6047

SEQ ID NO: 6050 - DNA, 1614 bp, Muscodor strobelii
  misc_feature: SGI cDNA ID NO. 561747
  misc_feature: Encodes the peptide sequence at SEQ ID NO 6051
atggatgagtttctctattcagccacactacttgggccgctagccagcttcgctctggcaaatgctcaatgcacaacagatacttttacaaagatcctagccagccaaagtgatgtatcgatcaatttcgtacaagcagtacctcagaatgggagctttggacaaggtcctgttgacattcctttcccgaacaacgccacagctcttccggcactctgcgccgtcggcatcaatgtgaaatcttcggaaaattcatcttataatttcgggctatttttgcctgactcaacatggaattcaagattcctgactacgggtaatggtggctatggtggtggcatcaactggccagacatgggtattttctcgcagtatggctttgccacaatgtctacagacactggacatagctcctcaccagctgacggcaaatgggcatatgatgctcccgaaaccatcattgattggggataccgcgcaatgcacggttcgatagtactctcgaaagagatcatccaggcctattatggaaattctagcgacatcaagtactcttactatgcgagttgctctactggcggtaggcaaggtctcaaagagattcagcttcacccagactcctttgacggcatttcggtgggcgctcctgcctggtactcgcctcatctagccggagcgacactgtggcagggtctttacaactacccaacaactgatccgaaacatatcgcgacctcactatttccaatgattgcgtcagcgatgaagaagcaatgcgatcctcaagacggtctggtagataatatcataggcgatccgtacggctgtaacttcgatttcgaggctttgttgtgcactggctcggaatcttcgagctgcctcacgcctgagcagatcaccaccctatataagttttataatgattgggtcgacacgaatcagacgtttgtttttcctggcttcacccttggtacagatgccacgttcttgatgagcgctatcaacacacttggatcggactatttccagtattttgtctacaatgactcgagctacgacttcacaactcagttcacatacaaagacgttctagttgctgacaagatcaatccaggcgatgccggagccacggactttgatctttcaccattctatgagcgtggaggtaaaatactaaagtatcatgggcttgtggatcctctcatcccaactggtagtagcatatacttctataagaaagtgctccaaacactgcggcccaaagggatcgatcttgatgacttctaccgcttcttcctcattcctgacatgagtcactgcagcgggtcgaccacaggaccttggtacatcgctgctgggtcacaagcactgaagggtgcgacacactcggtgcctggatatgaagatgctgagcatgatattatcttggcaatgatgaaatgggttgagaaagatgaggcacctgacagtctaatcgctacaaagtttgtgaacgatacagcagggcttggtgtacaaagccagcggccattatgtgtctaccccaagcaggcgaaattcatctcgggagatccgaattcacctgagagctgggaatgtaggtcactttattag

SEQ ID NO: 6051 - protein, 537 aa, Muscodor strobelii
  misc_feature: SGI Peptide ID NO. 561747
  misc_feature (73)..(535): Pfam Id: PF07519 Pfam Desc: Tannase and feruloyl esterase
  misc_feature (73)..(308): Pfam Id: PF07519 Pfam Desc: Tannase and feruloyl esterase
  misc_feature (375)..(535): Pfam Id: PF07519 Pfam Desc: Tannase and feruloyl esterase
  misc_feature (9)..(537): NCBI GI: 189210102 Blast Desc: feruloyl esterase B precursor [Pyrenophora tritici-repentis Pt-1C-BFP] gi|187977476|gb|EDU44102.1| feruloyl esterase B precursor [Pyrenophora tritici-repentis Pt-1C-BFP]
  misc_feature (23)..(537): NCBI GI: 154322593 Blast Desc: BC1G_00639 [Botryotinia fuckeliana B05.10] gi|150847973|gb|EDN23166.1| BC1G_00639 [Botryotinia fuckeliana B05.10]
  misc_feature (5)..(534): NCBI GI: 145257202 Blast Desc: An04g02780 [Aspergillus niger] gi|134058558|emb|CAK96445.1| protein product [Aspergillus niger]
  misc_feature (9)..(537): NCBI GI: 169621189 Blast Desc: SNOG_13802 [Phaeosphaeria nodorum SN15] gi|111057706|gb|EAT78826.1| SNOG_13802 [Phaeosphaeria nodorum SN15]
  misc_feature (37)..(534): NCBI GI: 238507123 Blast Desc: conserved [Aspergillus flavus NRRL3357] gi|220689476|gb|EED45827.1| conserved [Aspergillus flavus NRRL3357]
  misc_feature (10)..(469): NCBI GI: 212530880 Blast Desc: feruloyl esterase B precursor, [Penicillium marneffei ATCC 18224] gi|210074995|gb|EEA29082.1| feruloyl esterase B precursor, [Penicillium marneffei ATCC 18224]
  misc_feature (24)..(534): NCBI GI: 39942844 Blast Desc: MGG_03502 [Magnaporthe grisea 70-15] gi|145009941|gb|EDJ94597.1| MGG_03502 [Magnaporthe grisea 70-15]
  misc_feature (5)..(534): NCBI GI: 169786171 Blast Desc: [Aspergillus oryzae RIB40] gi|83776294|dbj|BAE66413.1| protein product [Aspergillus oryzae]
  misc_feature (10)..(537): NCBI GI: 145240565 Blast Desc: An08g08140 [Aspergillus niger] gi|134077452|emb|CAK40017.1| protein product [Aspergillus niger]
  misc_feature (3)..(537): NCBI GI: 145251089 Blast Desc: An15g05280 [Aspergillus niger] gi|134082586|emb|CAK42501.1| protein product [Aspergillus niger]
  misc_feature (37)..(533): SWISSPROT Homolog: EC 3.1.1.73 Feruloyl esterase
MDEFLYSATLLGPLASFALANAQCTTDTFTKILASQSDVSINFVQAVPQNGSFGQGPVDIPFPNNATALPALCAVGINVKSSENSSYNFGLFLPDSTWNSRFLTTGNGGYGGGINWPDMGIFSQYGFATMSTDTGHSSSPADGKWAYDAPETIIDWGYRAMHGSIVLSKEIIQAYYGNSSDIKYSYYASCSTGGRQGLKEIQLHPDSFDGISVGAPAWYSPHLAGATLWQGLYNYPTTDPKHIATSLFPMIASAMKKQCDPQDGLVDNIIGDPYGCNFDFEALLCTGSESSSCLTPEQITTLYKFYNDWVDTNQTFVFPGFTLGTDATFLMSAINTLGSDYFQYFVYNDSSYDFTTQFTYKDVLVADKINPGDAGATDFDLSPFYERGGKILKYHGLVDPLIPTGSSIYFYKKVLQTLRPKGIDLDDFYRFFLIPDMSHCSGSTTGPWYIAAGSQALKGATHSVPGYEDAEHDIILAMMKWVEKDEAPDSLIATKFVNDTAGLGVQSQRPLCVYPKQAKFISGDPNSPESWECRSLY

SEQ ID NO: 6052 - DNA, 501 bp, Muscodor strobelii
  misc_feature: SGI EST ID NO. CUFF.15253.0
  misc_feature: Variant of the nucleotide sequence at SEQ ID NO 6050
atgggtattttctcgcagtatggctttgccacaatgtctacagacactggacatagctcctcaccagctgacggcaaatgggcatatgatgctcccgaaaccatcattgattggggataccgcgcaatgcacggttcgatagtactctcgaaagagatcatccaggcctattatggaaattctagcgacatcaagtactcttactatgcgagttgctctactggcggtaggcaaggtctcaaagagattcagcttcacccagactcctttgacggcatttcggtgggcgctcctgcctggtactcgcctcatctagccggagcgacactgtggcagggtctttacaactacccaacaactgatccgaaacatatcgcgacctcactatttccaatgattgcgtcagcgatgaagaagcaatgcgatcctcaagacggtctggtagataatatcataggcgatccgtacggctgtaacttcgatttcgaggctttgttgtgc

SEQ ID NO: 6053 - DNA, 1608 bp, Muscodor strobelii
  misc_feature: SGI cDNA ID NO. 561748
  misc_feature: Encodes the peptide sequence at SEQ ID NO 6054
atgtctcgtctcctagccacactacttgggccgctagccagcttcgctctggcaaatgctcaatgcacaacagatacttttacaaagatcctagccagccaaagtgatgtatcgatcaatttcgtacaagcagtacctcagaatgggagctttggacaaggtcctgttgacattcctttcccgaacaacgccacagctcttccggcactctgcgccgtcggcatcaatgtgaaatcttcggaaaattcatcttataatttcgggctatttttgcctgactcaacatggaattcaagattcctgactacgggtaatggtggctatggtggtggcatcaactggccagacatgggtattttctcgcagtatggctttgccacaatgtctacagacactggacatagctcctcaccagctgacggcaaatgggcatatgatgctcccgaaaccatcattgattggggataccgcgcaatgcacggttcgatagtactctcgaaagagatcatccaggcctattatggaaattctagcgacatcaagtactcttactatgcgagttgctctactggcggtaggcaaggtctcaaagagattcagcttcacccagactcctttgacggcatttcggtgggcgctcctgcctggtactcgcctcatctagccggagcgacactgtggcagggtctttacaactacccaacaactgatccgaaacatatcgcgacctcactatttccaatgattgcgtcagcgatgaagaagcaatgcgatcctcaagacggtctggtagataatatcataggcgatccgtacggctgtaacttcgatttcgaggctttgttgtgcactggctcggaatcttcgagctgcctcacgcctgagcagatcaccaccctatataagttttataatgattgggtcgacacgaatcagacgtttgtttttcctggcttcacccttggtacagatgccacgttcttgatgagcgctatcaacacacttggatcggactatttccagtattttgtctacaatgactcgagctacgacttcacaactcagttcacatacaaagacgttctagttgctgacaagatcaatccaggcgatgccggagccacggactttgatctttcaccattctatgagcgtggaggtaaaatactaaagtatcatgggcttgtggatcctctcatcccaactggtagtagcatatacttctataagaaagtgctccaaacactgcggcccaaagggatcgatcttgatgacttctaccgcttcttcctcattcctgacatgagtcactgcagcgggtcgaccacaggaccttggtacatcgctgctgggtcacaagcactgaagggtgcgacacactcggtgcctggatatgaagatgctgagcatgatattatcttggcaatgatgaaatgggttgagaaagatgaggcacctgacagtctaatcgctacaaagtttgtgaacgatacagcagggcttggtgtacaaagccagcggccattatgtgtctaccccaagcaggcgaaattcatctcgggagatccgaattcacctgagagctgggaatgtaggtcactttattag

SEQ ID NO: 6054 - protein, 535 aa, Muscodor strobelii
  misc_feature: SGI Peptide ID NO. 561748
  misc_feature (71)..(533): Pfam Id: PF07519 Pfam Desc: Tannase and feruloyl esterase
  misc_feature (71)..(306): Pfam Id: PF07519 Pfam Desc: Tannase and feruloyl esterase
  misc_feature (373)..(533): Pfam Id: PF07519 Pfam Desc: Tannase and feruloyl esterase
  misc_feature (7)..(535): NCBI GI: 189210102 Blast Desc: feruloyl esterase B precursor [Pyrenophora tritici-repentis Pt-1C-BFP] gi|187977476|gb|EDU44102.1| feruloyl esterase B precursor [Pyrenophora tritici-repentis Pt-1C-BFP]
  misc_feature (21)..(535): NCBI GI: 154322593 Blast Desc: BC1G_00639 [Botryotinia fuckeliana B05.10] gi|150847973|gb|EDN23166.1| BC1G_00639 [Botryotinia fuckeliana B05.10]
  misc_feature (1)..(532): NCBI GI: 145257202 Blast Desc: An04g02780 [Aspergillus niger] gi|134058558|emb|CAK96445.1| protein product [Aspergillus niger]
  misc_feature (7)..(535): NCBI GI: 169621189 Blast Desc: SNOG_13802 [Phaeosphaeria nodorum SN15] gi|111057706|gb|EAT78826.1| SNOG_13802 [Phaeosphaeria nodorum SN15]
  misc_feature (35)..(532): NCBI GI: 238507123 Blast Desc: conserved [Aspergillus flavus NRRL3357] gi|220689476|gb|EED45827.1| conserved [Aspergillus flavus NRRL3357]
  misc_feature (1)..(467): NCBI GI: 212530880 Blast Desc: feruloyl esterase B precursor, [Penicillium marneffei ATCC 18224] gi|210074995|gb|EEA29082.1| feruloyl esterase B precursor, [Penicillium marneffei ATCC 18224]
  misc_feature (2)..(532): NCBI GI: 169786171 Blast Desc: [Aspergillus oryzae RIB40] gi|83776294|dbj|BAE66413.1| protein product [Aspergillus oryzae]
  misc_feature (1)..(532): NCBI GI: 39942844 Blast Desc: MGG_03502 [Magnaporthe grisea 70-15] gi|145009941|gb|EDJ94597.1| MGG_03502 [Magnaporthe grisea 70-15]
  misc_feature (8)..(535): NCBI GI: 145240565 Blast Desc: An08g08140 [Aspergillus niger] gi|134077452|emb|CAK40017.1| protein product [Aspergillus niger]
  misc_feature (5)..(535): NCBI GI: 145251089 Blast Desc: An15g05280 [Aspergillus niger] gi|134082586|emb|CAK42501.1| protein product [Aspergillus niger]
  misc_feature (35)..(531): SWISSPROT Homolog: EC 3.1.1.73 Feruloyl esterase
MSRLLATLLGPLASFALANAQCTTDTFTKILASQSDVSINFVQAVPQNGSFGQGPVDIPFPNNATALPALCAVGINVKSSENSSYNFGLFLPDSTWNSRFLTTGNGGYGGGINWPDMGIFSQYGFATMSTDTGHSSSPADGKWAYDAPETIIDWGYRAMHGSIVLSKEIIQAYYGNSSDIKYSYYASCSTGGRQGLKEIQLHPDSFDGISVGAPAWYSPHLAGATLWQGLYNYPTTDPKHIATSLFPMIASAMKKQCDPQDGLVDNIIGDPYGCNFDFEALLCTGSESSSCLTPEQITTLYKFYNDWVDTNQTFVFPGFTLGTDATFLMSAINTLGSDYFQYFVYNDSSYDFTTQFTYKDVLVADKINPGDAGATDFDLSPFYERGGKILKYHGLVDPLIPTGSSIYFYKKVLQTLRPKGIDLDDFYRFFLIPDMSHCSGSTTGPWYIAAGSQALKGATHSVPGYEDAEHDIILAMMKWVEKDEAPDSLIATKFVNDTAGLGVQSQRPLCVYPKQAKFISGDPNSPESWECRSLY

SEQ ID NO: 6055 - DNA, 501 bp, Muscodor strobelii; identical to SEQ ID NO: 6052
  misc_feature: SGI EST ID NO. CUFF.15253.0
  misc_feature: Variant of the nucleotide sequence at SEQ ID NO 6053

SEQ ID NO: 6056 - DNA, 1707 bp, Muscodor strobelii
  misc_feature: SGI cDNA ID NO. 561749
  misc_feature: Encodes the peptide sequence at SEQ ID NO 6057
atggcaaccgttatcccaagccaaatactgtcgaaggagcagctggtacatgctgttgagggcgatgtggagaaggatgaccgagttgattctatacctcctttaggcaaaccgcgccaggagaaaaaattctggtttcaacgaggcaaagagtacgacccgaccgcgatcgcgacacagcctagtgtatacgacatcccggacatcgctgcccaatacgagccgagaaatgactgggagaacatacatcgattcgatcctctcgaaagatggacatggggcgaagaatatcagctagtccgcaagatcgactggcacatcatgctctgggtcgcctttatgttcatggcgatggagctagatcgcgcgaatttgagccaagcagtggctgacaactttctcaaagatctgggcttcgatactaacgactataacctcggaaacagtgtgtatgctgtgtcattccttgctggcgagttcccttcacaattgcttgcgaaatgggtcggaccagatcgctggatccctgttcagataattctcttttcgatcgtttcggcgtcgcagtttgcgctcagcggaagagcatcatttctggcttctcgctccctgctagctttgttgcagggaggattcatcgccgagtgtgtcttgtatctttcgtacttctacaagcatcacgagctcactttacgtctgagtttcttctggactggcatgtttatggctgatatcgtggcatccattgttgcgtttggattactccacttgagaggagtcgggggttacgctggctggagatggctcttcttaatcgagggactcatcactggtgttgttgggctgctatcgttcataatgatgccagctggcccaacacaaacggcaggtagactgcgtggtagcgagggatggttcactgcgagagaggagtctatcatggtgaataggatcattcgggatgatcctagtaaaggcacgatgcacaatcgtgaacccatcaccttgaagctactatggcagagtttgaccgacgttgatctctggcctctatatgcaattgggttgacattcaatattccaaccttttcgccaagccaatacttcactatctctttacgaggtctgggatttactacatttcagacgaatttgctgtcgatcccatacctggtgttgaagacgatcaacatgttgcttctttctacactcgctgaacttaccgggcagttggctgcatgtgcttcagtatttcaattgtggtgcatcccatttttagtgtatttgagagtcgttgacacaactcatgcgtcaaaatggctgacatgggcgatgacctcgcttctcttggcggcgccacttgctcacccgatccaagtgggatggatatcacgaaacgcaaatacagtacgttcgcgagcagtcggcgcagttctctataacatgtttcttcaagccggcgttgtaatctcatcgaatatctaccgcgttgatgatgcgcctctctaccgacggggtaatagtgtgctgcttggactcgtgggtctcaacttgaccctctatgtgcttgcgaagagctattacgtttggcgcaatagatctagagagagaaaatggggtgccatgacacccgaggagcagcttgtctacctctctgatcacaaggacaaaggaaacaagagattggactttaggttggcatcctaa

SEQ ID NO: 6057 - protein, 568 aa, Muscodor strobelii
  misc_feature: SGI Peptide ID NO. 561749
  misc_feature (111)..(492): Pfam Id: PF07690 Pfam Desc: Major Facilitator Superfamily
  misc_feature (25)..(566): NCBI GI: 164424070 Blast Desc: NCU07609 [Neurospora crassa OR74A] gi|157070359|gb|EAA33607.2| NCU07609 [Neurospora crassa OR74A]
  misc_feature (7)..(567): NCBI GI: 169784514 Blast Desc: [Aspergillus oryzae RIB40] gi|83775465|dbj|BAE65585.1| protein product [Aspergillus oryzae]
  misc_feature (1)..(566): NCBI GI: 171688140 Blast Desc: protein product [Podospora anserina] gi|170944032|emb|CAP70142.1| protein product [Podospora anserina]
  misc_feature (41)..(567): NCBI GI: 256720673 Blast Desc: NECHADRAFT_49814 [Nectria haematococca mpVI 77-13-4]
  misc_feature (7)..(567): NCBI GI: 115491993 Blast Desc: conserved [Aspergillus terreus NIH2624] gi|114197484|gb|EAU39184.1| conserved [Aspergillus terreus NIH2624]
  misc_feature (80)..(568): NCBI GI: 170940345 Blast Desc: protein product [Podospora anserina]
  misc_feature (1)..(567): NCBI GI: 121701311 Blast Desc: MFS transporter, [Aspergillus clavatus NRRL 1] gi|119397063|gb|EAW07494.1| MFS transporter, [Aspergillus clavatus NRRL 1]
  misc_feature (44)..(567): NCBI GI: 171676603 Blast Desc: protein product [Podospora anserina] gi|170936368|emb|CAP61026.1| protein product [Podospora anserina]
  misc_feature (50)..(567): NCBI GI: 70995900 Blast Desc: MFS transporter [Aspergillus fumigatus Af293] gi|66850340|gb|EAL90667.1| MFS transporter, [Aspergillus fumigatus Af293] gi|159131460|gb|EDP56573.1| MFS transporter,
  misc_feature (50)..(567): NCBI GI: 119495271 Blast Desc: MFS transporter, [Neosartorya fischeri NRRL 181] gi|119412586|gb|EAW22527.1| MFS transporter, [Neosartorya fischeri NRRL 181]
MATVIPSQILSKEQLVHAVEGDVEKDDRVDSIPPLGKPRQEKKFWFQRGKEYDPTAIATQPSVYDIPDIAAQYEPRNDWENIHRFDPLERWTWGEEYQLVRKIDWHIMLWVAFMFMAMELDRANLSQAVADNFLKDLGFDTNDYNLGNSVYAVSFLAGEFPSQLLAKWVGPDRWIPVQIILFSIVSASQFALSGRASFLASRSLLALLQGGFIAECVLYLSYFYKHHELTLRLSFFWTGMFMADIVASIVAFGLLHLRGVGGYAGWRWLFLIEGLITGVVGLLSFIMMPAGPTQTAGRLRGSEGWFTAREESIMVNRIIRDDPSKGTMHNREPITLKLLWQSLTDVDLWPLYAIGLTFNIPTFSPSQYFTISLRGLGFTTFQTNLLSIPYLVLKTINMLLLSTLAELTGQLAACASVFQLWCIPFLVYLRVVDTTHASKWLTWAMTSLLLAAPLAHPIQVGWISRNANTVRSRAVGAVLYNMFLQAGVVISSNIYRVDDAPLYRRGNSVLLGLVGLNLTLYVLAKSYYVWRNRSRERKWGAMTPEEQLVYLSDHKDKGNKRLDFRLAS

SEQ ID NO: 6058 - DNA, 890 bp, Muscodor strobelii
  misc_feature: SGI EST ID NO. CUFF.15259.0
  misc_feature: Variant of the nucleotide sequence at SEQ ID NO 6056
ctgaacttaccgggcagttggctgcatgtgcttcagtatttcaattgtggtgcatcccatttttagtgtatttgagagtcgttgacacaactcatgcgtcaaaatggctgacatgggcgatgacctcgcttctcttggcggcgccacttgctcacccgatccaagtgggatggatatcacgaaacgcaaatacagtacgttcgcgagcagtcggcgcagttctctataacatgtttcttcaagccggcgttgtaatctcatcgaatatctaccgcgttgatgatgcgcctctctaccgacggggtaatagtgtgctgcttggactcgtgggtctcaacttgaccctctatgtgcttgcgaagagctattacgtttggcgcaatagatctagagagagaaaatggggtgccatgacacccgaggagcagcttgtctacctctctgatcacaaggacaaaggaaacaagagattggactttaggttggcatcctaaagatatgccgaatgcgaacgcgtcggaagtggagattgcagatcgcggttcgactatcagaaccggaatatgggcgcttgagaggaacagcttcggcctgcttgccgtctttgggcattctcaaggtaatgcaattccgaggcaaggaggctttgacaattcgcgatgaagattcgcgtctgttggtactggaaaaaggagtgtaaatgtaccgtgggtaactgccgaacgctcggtctcgatgtcactgtgctgttctgattctaggtcctgcatggagcctggagcgacagggataccagctccagtaggtcgcatcgtgccctacagttcattgtgccaatctttgggcggtagcatcacactgtagcgaatgttatgaatctaataggaaag

SEQ ID NO: 6059 - DNA, 1791 bp, Muscodor strobelii
  misc_feature: SGI cDNA ID NO. 561750
  misc_feature: Encodes the peptide sequence at SEQ ID NO 6060
atgcttggatatcaacagcttcttgtattggctacgttagctataagtatagatgccgcctggagcgatgcattctcggatttcaagcagaaagtccttgggggcgagcgacgtcagccgaacatcgttttcatcttgactgatgatcaagaccttcatatgcaatctttgaattacatgccatttgttaaaaagcatctcatcgatcacggcacttctttccagaagcactattgcactactgcgctctgttgtccctcaagagtaacgctgttcaccggcaaagccgctcataacacaaacgtcacgaacgtggtgccaccttatggcggttatccgaaattcgtcagtcaaggattgaacgaagactacctcccaatttggttacagaaagctgggtataatacttactatacgggcaaactcttcaatgcgcattctgtttggaactatgattctccgttcccggcaggatggacaagctctgactttttacttgacccttttacgtactggtatatgaacagtacatatcagcgcaatagggaaccgcctgtcagctatgagggacaaaatactgtggatgtgacagcaactaaagcactcggactcttggacgaggcccatgatgcgaagaagccgtttttccttggtgtcgcacctattgggcctcattgcgacatatggtcgccaaattacagagagggcaagtctgccggcagtttcgataatctttttttcggccctccagtaccagcagaaagacatgcgcacctcttcaaagatctcagagtgcccagaacctcaaacttcaatcccgataaaccttctggagcaagttgggttcgaaaattgccgcagcagagccctgaaactgtcgaatacaatgacaacttctatgcagcgcgattacgtacccttcagggaatagatgagctcgtagatagcctagtacagcgtctggagaagttaggtatcttagaaaatacgtatttgatttattcaacagataacggatatcatatcggtcaacaccgtctccagccatcaaaacaatgcagcttcgaagaggatatcaacattcccatgattattcgggggccaggcgtcccaaagaaagtcacgactgatatagtcacgactcataccgatcttgccccgacaatattacagatcgcggaggctccccttcgagacgatttcgatggacttgcgatccctctcacgggagatgggcttttgaaagcccaagacgaccgacatgagcatgtgactgtggagcattggggatttgcctcaaatgagggtcaagtttctaaagagtaccccgtactccacatgaacaacacttataaagcgttgcgcataataggaggaaactacaacctgctttacacggtgtggtgcaacaacgaacgtgagctttacgatgtcgcgacggacccaggtcagatgttcaatctgctacatcctgacgagcagaagccccagactttactgggtcagcccattgacaaggtagttggcagattggactctttgctcttcgtgctgaagacttgccgagcggatgcttgcgtccatccgtggaaagcctttcgcccgtctgggagtgtcgagacgttgcgcgatgctcttgcaccacgatttgatgttttctacgaggcagagacacagaaaatcaagttcgacaggtgtgagatgggttacatagcggatgcggaagggccgcagtttggccaagaaaccgagtggttgaaagtagacccgaattggcacgaatggacatga

SEQ ID NO: 6060 - protein, 596 aa, Muscodor strobelii
  misc_feature: SGI Peptide ID NO. 561750
  misc_feature (38)..(487): Pfam Id: PF00884 Pfam Desc: Sulfatase
  misc_feature (11)..(596): NCBI GI: 171680767 Blast Desc: protein product [Podospora anserina] gi|27764278|emb|CAD60558.1| protein product [Podospora anserina] gi|170940011|emb|CAP65237.1| protein product [Podospora anserina]
  misc_feature (38)..(596): NCBI GI: 171693357 Blast Desc: protein product [Podospora anserina] gi|170946627|emb|CAP73430.1| protein product [Podospora anserina]
  misc_feature (24)..(596): NCBI GI: 145251061 Blast Desc: An15g05130 [Aspergillus niger] gi|134082572|emb|CAK42487.1| protein product [Aspergillus niger]
  misc_feature (8)..(596): NCBI GI: 2873363 Blast Desc: arylsulfatase [Neurospora crassa]
  misc_feature (38)..(579): NCBI GI: 256724341 Blast Desc: NECHADRAFT_53397 [Nectria haematococca mpVI 77-13-4]
  misc_feature (19)..(596): NCBI GI: 256726163 Blast Desc: NECHADRAFT_94512 [Nectria haematococca mpVI 77-13-4]
  misc_feature (54)..(586): NCBI GI: 116200710 Blast Desc: CHGG_10900 [Chaetomium globosum CBS 148.51] gi|88175614|gb|EAQ83082.1| CHGG_10900 [Chaetomium globosum CBS 148.51]
  misc_feature (35)..(596): NCBI GI: 261354177 Blast Desc: arylsulfatase [Verticillium albo-atrum VaMs.102]
  misc_feature (8)..(579): NCBI GI: 164425630 Blast Desc: NCU06041 [Neurospora crassa OR74A] gi|157071002|gb|EAA30568.2| NCU06041 [Neurospora crassa OR74A]
  misc_feature (39)..(578): NCBI GI: 154293528 Blast Desc: BC1G_13903 [Botryotinia fuckeliana B05.10] gi|150845284|gb|EDN20477.1| BC1G_13903 [Botryotinia fuckeliana B05.10]
  misc_feature (38)..(566): SWISSPROT Homolog: EC 3.1.6.1 Arylsulfatase
MLGYQQLLVLATLAISIDAAWSDAFSDFKQKVLGGERRQPNIVFILTDDQDLHMQSLNYMPFVKKHLIDHGTSFQKHYCTTALCCPSRVTLFTGKAAHNTNVTNVVPPYGGYPKFVSQGLNEDYLPIWLQKAGYNTYYTGKLFNAHSVWNYDSPFPAGWTSSDFLLDPFTYWYMNSTYQRNREPPVSYEGQNTVDVTATKALGLLDEAHDAKKPFFLGVAPIGPHCDIWSPNYREGKSAGSFDNLFFGPPVPAERHAHLFKDLRVPRTSNFNPDKPSGASWVRKLPQQSPETVEYNDNFYAARLRTLQGIDELVDSLVQRLEKLGILENTYLIYSTDNGYHIGQHRLQPSKQCSFEEDINIPMIIRGPGVPKKVTTDIVTTHTDLAPTILQIAEAPLRDDFDGLAIPLTGDGLLKAQDDRHEHVTVEHWGFASNEGQVSKEYPVLHMNNTYKALRIIGGNYNLLYTVWCNNERELYDVATDPGQMFNLLHPDEQKPQTLLGQPIDKVVGRLDSLLFVLKTCRADACVHPWKAFRPSGSVETLRDALAPRFDVFYEAETQKIKFDRCEMGYIADAEGPQFGQETEWLKVDPNWHEWT

SEQ ID NO: 6061 - DNA, 276 bp, Muscodor strobelii
  misc_feature: SGI cDNA ID NO. 561751
  misc_feature: Encodes the peptide sequence at SEQ ID NO 6062
cacggatcaggcttcgcacagcttgcacagatcgggcaggtcttcgccgaccgcgcgcagagccaacaacctgctgccggcgtcgtgacggagatggacggcatgtggaacgacgcgagagcttcgcagtcctggcccgcggcctcagccaacgcgcccgccctgggctcttcgtcaccagggcccagtacagcgcgtggtggcagtggtctgttccacccgaccggacccagcaccgcttccatgcagggcaacgtcgaggacgacgaggcctga

SEQ ID NO: 6062 - protein, 91 aa, Muscodor strobelii
  misc_feature: SGI Peptide ID NO. 561751
HGSGFAQLAQIGQVFADRAQSQQPAAGVVTEMDGMWNDARASQSWPAASANAPALGSSSPGPSTARGGSGLFHPTGPSTASMQGNVEDDEA

SEQ ID NO: 6063 - DNA, 1151 bp, Muscodor strobelii
  misc_feature: SGI EST ID NO. CUFF.15276.0
  misc_feature: Variant of the nucleotide sequence at SEQ ID NO 6061
tcacggatcaggcttcgcacagcttgcacagatcgggcaggtcttcgccgaccgcgcgcagagccaacaacctgctgccggcgtcgtgacggagatggacggcatgtggaacgacgcgagagcttcgcagtcctggcccgcggcctcagccaacgcgcccgccctgggctcttcgtcaccagggcccagtacagcgcgtggtggcagtggtctgttccacccgaccggacccagcaccgcttccatgcagggcaacgtcgaggacgacgaggcctgaacatgctatcgattctccgcctgtttgattcacattatacccatgttgttcgattgcatagcaagcaccgccttttgccgcatatccaccaagaaagcgaaacgataccacacactacctctcgtccagagattcacattgtcgagacttttacataacaaacgggcttgccaaataccagttccctacgcagatctgggaagtatactggactgttcgttgcgatcatcgccttcgaactgttttaacctagttgcccaccgccgggcttctgacactgcgtcgtcagacatcgtggaactacccgccatttactgcgcttttccgggacgccaatgctggatggcttatggaatcagagtacaacagcgcatcgaatcgaggaactctttgcaacatagacaatctcgtgacgacgcgcccttggtatgccagtcactttgatgtggcgaaacatggaaaaggggcgatggttatgcgacgccaaagactgttgatgaactgatggcagtggtcactggtcttgggtaaagcatcaactgcacctgaagccacgattcgaatcaccatcggttgatagcatgttcgtggacacacatgttggaagcccaaattgcattgtcaagagcaaatatgctttgagaagcgccgttagtattatgaaggctcacgaagctcacgaaacacgctgattacgaagagaggaaggaagctcgaagttcagcttctggggatgtatcgcttgtttgtagactgcagagctgcgtatcgacgaggcaggccgaggaagagatggttgctttaaggctgtaggaatatgcaaaatacaccgaggcgatgaattcatgacttttatcttctctttgcaatcttg

SEQ ID NO: 6064 - DNA, 1350 bp, Muscodor strobelii
  misc_feature: SGI cDNA ID NO. 561752
  misc_feature: Reduced expression when VOC is produced
  misc_feature: Encodes the peptide sequence at SEQ ID NO 6065
atggtgcaccaacacggtgacgaacatgacattcccgacgagcacaaagtccatcgccacggcggctggctccccgccgaccaccgggtgcagcacgactggatggcgaaacaagtcgagcacgtcgacaagcacggggaacaaaaactgatcccagtgctccaagaattcaaagaattcatcgaggggaatccacgaatctacatgtacttcaaccagatgtggaccgaggtccctctgaagaagccatactacaacgatcctaccggcaaaaaacagatcagggactatcgacatatgctcgccatgttgaatcatatcttcactcaggcgccgcagtggaatgatgccgcgtttggtgtgggtatggtgggagtgcctatggtgtctatttttgattatgttatggctacgcccagtggttttgcggcattcctcgacccggacgtgaacaagatgatgaaaaagatcttgaacgaatggggcaaattcttgtcgtctccgaaatccgccgacgtacttgcacaccatcaacaaggctggttctcaagtcacggtctcaaggatctcatggaagtagccaacaaacctctgggcactgcacacaacttcgaggacatgtacatatgtgatccgaaggacaagcactacgggtataaatcctgggatgacttcttcacccgccaactccgtgaaaacgtacgccccgtcgctagtcccgacgacaactcagtaatagccaatgcctgtgaatccaggccctataacctatcgcacgactgcaagctgcgagacaaattctggatcaaaaaacaaccctactccatcctcgacatgcttgcacacgatccgctttccgtgcaattcgaccaatgcaccacttatcaagcattcctctccgctctctcctaccatcgatggcactcgcccgtcagcggaaagatcgtccgtgcattcgtgcaagacgggacatacttctccgaaccgctcttcgaaggcgtcggcgatccaaacgtcaaggagattaacgtccagggtatctcggtcgcgcagggctatctgacagccctggccacgcgcgcagttgtgttcatacaggctgatagtcccgcgatcggtctcatggcattcattggcgtgggcatggacgaagtatctacctgcgagatcaccgtgaaagagggccagagcgtaaagaagggagaggaattgggcatgttccactttggcggtagtagtcattgtcttctgtttaggaaggatgtcaaggtggagtttgatggtcatgtgaagattggtcaggatcataatgtgccggttaggagtaaggtcgctgttgttaaggggtaa

SEQ ID NO: 6065 - protein, 449 aa, Muscodor strobelii
  misc_feature: SGI Peptide ID NO. 561752
  misc_feature (224)..(438): Pfam Id: PF02666 Pfam Desc: Phosphatidylserine decarboxylase
  misc_feature (224)..(327): Pfam Id: PF02666 Pfam Desc: Phosphatidylserine decarboxylase
  misc_feature (388)..(418): Pfam Id: PF02666 Pfam Desc: Phosphatidylserine decarboxylase
  misc_feature (1)..(448): NCBI GI: 46110238 Blast Desc: FG02001.1 [Gibberella zeae PH-1]
  misc_feature (1)..(448): NCBI GI: 256728712 Blast Desc: [Nectria haematococca mpVI 77-13-4]
  misc_feature (1)..(448): NCBI GI: 171679681 Blast Desc: protein product [Podospora anserina] gi|170939466|emb|CAP64694.1| protein product [Podospora anserina]
  misc_feature (1)..(448): NCBI GI: 164427011 Blast Desc: NCU02302 [Neurospora crassa OR74A] gi|157071567|gb|EAA30710.2| NCU02302 [Neurospora crassa OR74A]
  misc_feature (1)..(447): NCBI GI: 116203429 Blast Desc: CHGG_09598 [Chaetomium globosum CBS 148.51] gi|88175726|gb|EAQ83194.1| CHGG_09598 [Chaetomium globosum CBS 148.51]
  misc_feature (8)..(448): NCBI GI: 119488936 Blast Desc: phosphatidylserine decarboxylase family protein [Neosartorya fischeri NRRL 181] gi|119410968|gb|EAW20913.1| phosphatidylserine decarboxylase family protein [Neosartorya NRRL
  misc_feature (11)..(448): NCBI GI: 115385250 Blast Desc: ATEG_01807 [Aspergillus terreus NIH2624] gi|114196864|gb|EAU38564.1| ATEG_01807 [Aspergillus terreus NIH2624]
  misc_feature (1)..(447): NCBI GI: 238498818 Blast Desc: phosphatidylserine decarboxylase family protein [Aspergillus flavus NRRL3357] gi|220693918|gb|EED50263.1| phosphatidylserine decarboxylase family protein [Aspergillus
  misc_feature (14)..(447): NCBI GI: 255955157 Blast Desc: Pc21g13070 [Penicillium chrysogenum Wisconsin 54-1255] gi|211590042|emb|CAP96204.1| Pc21g13070 [Penicillium chrysogenum Wisconsin 54-1255]
  misc_feature (24)..(448): NCBI GI: 70982462 Blast Desc: phosphatidylserine decarboxylase family protein [Aspergillus fumigatus Af293] gi|66844383|gb|EAL84721.1| phosphatidylserine decarboxylase family protein [Aspergillus
  misc_feature: Useful for introducing or modulating the production of volatile compounds
MVHQHGDEHDIPDEHKVHRHGGWLPADHRVQHDWMAKQVEHVDKHGEQKLIPVLQEFKEFIEGNPRIYMYFNQMWTEVPLKKPYYNDPTGKKQIRDYRHMLAMLNHIFTQAPQWNDAAFGVGMVGVPMVSIFDYVMATPSGFAAFLDPDVNKMMKKILNEWGKFLSSPKSADVLAHHQQGWFSSHGLKDLMEVANKPLGTAHNFEDMYICDPKDKHYGYKSWDDFFTRQLRENVRPVASPDDNSVIANACESRPYNLSHDCKLRDKFWIKKQPYSILDMLAHDPLSVQFDQCTTYQAFLSALSYHRWHSPVSGKIVRAFVQDGTYFSEPLFEGVGDPNVKEINVQGISVAQGYLTALATRAVVFIQADSPAIGLMAFIGVGMDEVSTCEITVKEGQSVKKGEELGMFHFGGSSHCLLFRKDVKVEFDGHVKIGQDHNVPVRSKVAVVKG

SEQ ID NO: 6066 - DNA, 2021 bp, Muscodor strobelii
  misc_feature: SGI EST ID NO. CUFF.15694.0
  misc_feature: Variant of the nucleotide sequence at SEQ ID NO 6064
cgcagcgcaatcattacatcacgaccacaacaaagacacgaaactctttcgtctgccatggcacttttagctcccgtctactccgtaccccgcaatactgtagtatatgaagccaaggaaattcgcgtagcttggcgcagtacatcgactttttgttatatttggagtcgtattgagtcctgctgctgccaagcaaaatctacaaattgttgaacgacgaccaaacacattattctccgattgactgatatcaccttacccatttgccaagatggtgcaccaacacggtgacgaacatgacattcccgacgagcacaaagtccatcgccacggcggctggctccccgccgaccaccgggtgcaggtaagcattcggagtctgtcttttccccacgggctgagtcttaggagtcgattgctttgatcctctcccgagacagtcaaaagtggacattcaaaagtggatgtttaatcccttaaatatccctaagaaagtagtaactcactccgattgtattttagcacgactggatggcgaaacaagtcgagcacgtcgacaagcacggggaacaaaaactgatcccagtgctccaagaattcaaagaattcatcgaggggaatccacgaatctacatgtacttcaaccagatgtggaccgaggtccctctgaagaagccatactacaacgatcctaccggcaaaaaacagatcagggactatcgacatatgctcgccatgttgaatcatatcttcactcaggcgccgcagtggaatgatgccgcgtttggtgtgggtatggtgggagtgcctatggtgtctatttttgattatgttatggctacgcccagtggttttgcggcattcctcgacccggacgtgaacaagatgatgaaaaagatcttgaacgaatggggcaaattcttgtcgtctccgaaatccgccgacgtacttgcacaccatcaacaaggctggttctcaagtcacggtctcaaggatctcatggaagtagccaacaaacctctgggcactgcacacaacttcgaggacatgtacatatgtgatccgaaggacaagcactacgggtataaatcctgggatgacttcttcacccgccaactccgtgaaaacgtacgccccgtcgctagtcccgacgacaactcagtaatagccaatgcctgtgaatccaggccctataacctatcgcacgactgcaagctgcgagacaaattctggatcaaaaaacaaccctactccatcctcgacatgcttgcacacgatccgctttccgtgcaattcgaccaatgcaccacttatcaagcattcctctccgctctctcctaccatcgatggcactcgcccgtcagcggaaagatcgtccgtgcattcgtgcaagacgggacatacttctccgaaccgctcttcgaaggcgtcggcgatccaaacgtcaaggagattaacgtccagggtatctcggtcgcgcagggctatctgacagccctggccacgcgcgcagttgtgttcatacaggctgatagtcccgcgatcggtctcatggcattcattggcgtgggcatggacgaagtatctacctgcgagatcaccgtgaaagagggccagagcgtaaagaagggagaggaattgggcatgttccactttggcggtagtagtcattgtcttctgtttaggaaggatgtcaaggtggagtttgatggtcatgtgaagattggtcaggatcataatgtgccggttaggagtaaggtcgctgttgttaaggggtaaatggggaggaataagaatgttggtgtgggttgagtagtgtttgacgttttgaggttgccacagacgtttgatttgttgtcctgtgtttggcttggctggttataattaaaagttacacttcggcatgctttccacttcactgttacgtgttttttccatttcaactattttcgccgtcgtttctatgctctacctaagctttgcattattccgtttcgcagttaataatacatgtcatggct

SEQ ID NO: 6067 - DNA, 1200 bp, Muscodor strobelii
  misc_feature: SGI cDNA ID NO. 561753
  misc_feature: Encodes the peptide sequence at SEQ ID NO 6068
atgagcatgacgccgccacagagatctaaccctgtccgtagacctcacgcgaagtctcgtacaggctgtcgggtctgcaagtcaaggagagtgaaatgtgacgagactcggccctcgtgtagaaggtgtataacacatggtgcccaatgcgactttttactcgaggctgaggccaacactccgcgatcgtacgatgaagcgtctactagagaggcgctgagtatccatcagctgacttcgccgtccacgcctccagagatcatccagcagtcaccgtcagcatggtacagtgctggggacatcgagttgatgcatcatttcactacgtcaacgtgcctgaccctggcgagcgatccgaacgttcggaatttttggagagtgaatgtgccgcaaattggattcgcatatccgtacgtattgaaaggtattctcgccctttcagctctccatctgtcacgacttcgaccgcaccaacgagacgctctcgtaaaacaagcaatggtgcatcataatgcatcaacatccatggtaatgccaattcttggcgagaatgtgataggacacgatgaattcacacccgtattctgttactccatgctcacaactacgattacgtttgcacggccgcggacaacagatgattttctactagtctctaacggcatattaccggagtggctgctcatctcacgtggagtgacacatctcatcgaggcgcagggcgagcacatcttcagcatctccagcatggacgcgctattccattctggcaaggacttcactgctgcgtggttacaacatggtgatatagagcacgagggtctcagggagctcgaagtcaacatcaggcatgacgtcgtcgacaccgaaaccttgacgggtctcgaagaggggatagtggccctcaagcggtcattcggactctatgcagttatggggcatgatgaagagaagaggttacggagtgtcttggtttgggtcatcatgcttccagagagcttcattactctgctcaggagtcattgttgcgaagccctgtgtgtgttggcgtactattgtgtcctactgaagcggatggagcatgtgtggtgggttgagggatgggcgtttcatctaatagagcgaatttattctgcgcttgacgagaggcatcggctttggataagatggccgcttgaggagataggctgggctccttga

SEQ ID NO: 6068 - protein, 399 aa, Muscodor strobelii
  misc_feature: SGI Peptide ID NO. 561753
  misc_feature (21)..(60): Pfam Id: PF00172 Pfam Desc: Fungal Zn(2)-Cys(6) binuclear cluster domain
  misc_feature (21)..(50): Pfam Id: PF00172 Pfam Desc: Fungal Zn(2)-Cys(6) binuclear cluster domain
  misc_feature (1)..(399): NCBI GI: 159128204 Blast Desc: C6 transcription factor, [Aspergillus fumigatus A1163]
  misc_feature (1)..(399): NCBI GI: 146323225 Blast Desc: C6 transcription factor [Aspergillus fumigatus Af293] gi|129556527|gb|EAL86613.2| C6 transcription factor, [Aspergillus fumigatus Af293]
  misc_feature (1)..(399): NCBI GI: 119474417 Blast Desc: NFIA_005490 [Neosartorya fischeri NRRL 181] gi|119407237|gb|EAW17187.1| conserved [Neosartorya fischeri NRRL 181]
  misc_feature (13)..(399): NCBI GI: 145233111 Blast Desc: An02g07950 [Aspergillus niger] gi|134056853|emb|CAK37758.1| protein product [Aspergillus niger]
  misc_feature (13)..(399): NCBI GI: 154320642 Blast Desc: BC1G_01793 [Botryotinia fuckeliana B05.10] gi|150853482|gb|EDN28674.1| BC1G_01793 [Botryotinia fuckeliana B05.10]
  misc_feature (11)..(396): NCBI GI: 255933159 Blast Desc: Pc12g12360 [Penicillium chrysogenum Wisconsin 54-1255] gi|211582669|emb|CAP80863.1| Pc12g12360 [Penicillium chrysogenum Wisconsin 54-1255]
  misc_feature (8)..(399): NCBI GI: 46140093 Blast Desc: FG11561.1 [Gibberella zeae PH-1] gi|117572682|gb|ABK40525.1| C6 zinc finger protein [Gibberella zeae]
  misc_feature (13)..(399): NCBI GI: 212533327 Blast Desc: C6 transcription factor, [Penicillium marneffei ATCC 18224] gi|210072184|gb|EEA26273.1| C6 transcription factor, [Penicillium marneffei ATCC 18224]
  misc_feature (76)..(399): NCBI GI: 154295657 Blast Desc: BC1G_13099 [Botryotinia fuckeliana B05.10] gi|150843979|gb|EDN19172.1| BC1G_13099 [Botryotinia fuckeliana B05.10]
  misc_feature (4)..(393): NCBI GI: 70997838 Blast Desc: C6 finger domain protein [Aspergillus fumigatus Af293] gi|66851287|gb|EAL91613.1| C6 finger domain protein, [Aspergillus fumigatus Af293]
MSMTPPQRSNPVRRPHAKSRTGCRVCKSRRVKCDETRPSCRRCITHGAQCDFLLEAEANTPRSYDEASTREALSIHQLTSPSTPPEIIQQSPSAWYSAGDIELMHHFTTSTCLTLASDPNVRNFWRVNVPQIGFAYPYVLKGILALSALHLSRLRPHQRDALVKQAMVHHNASTSMVMPILGENVIGHDEFTPVFCYSMLTTTITFARPRTTDDFLLVSNGILPEWLLISRGVTHLIEAQGEHIFSISSMDALFHSGKDFTAAWLQHGDIEHEGLRELEVNIRHDVVDTETLTGLEEGIVALKRSFGLYAVMGHDEEKRLRSVLVWVIMLPESFITLLRSHCCEALCVLAYYCVLLKRMEHVWWVEGWAFHLIERIYSALDERHRLWIRWPLEEIGWAP

SEQ ID NO: 6069 - DNA, 1663 bp, Muscodor strobelii
  misc_feature: SGI EST ID NO. CUFF.15724.1
  misc_feature: Variant of the nucleotide sequence at SEQ ID NO 6067
ctcttcgttccgatccatcgcgcacctatggacaagcttcgagtcccagctatgctatgagcatgacgccgccacagagatctaaccctgtccgtagacctcacgcgaagtctcgtacaggctgtcgggtctgcaagtcaaggagagtgaaatgtgacgagactcggccctcgtgtagaaggtgtataacacatggtgcccaatgcgactttttactcgaggctgaggccaacactccgcgatcgtacgatgaagcgtctactagagaggcgctgagtatccatcagctgacttcgccgtccacgcctccagagatcatccagcagtcaccgtcagcatggtacagtgctggggacatcgagttgatgcatcatttcactacgtcaacgtgcctgaccctggcgagcgatccgaacgttcggaatttttggagagtgaatgtgccgcaaattggattcgcatatccgtacgtattgaaaggtattctcgccctttcagctctccatctgtcacgacttcgaccgcaccaacgagacgctctcgtaaaacaagcaatggtgcatcataatgcatcaacatccatggtaatgccaattcttggcgagaatgtgataggacacgatgaattcacacccgtattctgttactccatgctcacaactacgattacgtttgcacggccgcggacaacagatgattttctactagtctctaacggcatattaccggagtggctgctcatctcacgtggagtgacacatctcatcgaggcgcagggcgagcacatcttcagcatctccagcatggacgcgctattccattctggcaaggacttcactgctgcgtggttacaacatggtgatatagagcacgagggtctcagggagctcgaagtcaacatcaggcatgacgtcgtcgacaccgaaaccttgacgggtctcgaagaggggatagtggccctcaagcggtcattcggactctatgcagttatggggcatgatgaagagaagaggttacggagtgtcttggtttgggtcatcatgcttccagagagcttcattactctgctcaggagtcattgttgcgaagccctgtgtgtgttggcgtactattgtgtcctactgaagcggatggagcatgtgtggtgggttgagggatgggcgtttcatctaatagagcgaatttattctgcgcttgacgagaggcatcggctttggataagatggccgcttgaggagataggctgggctccttgatgccggacctcttttcgttcagaatccctccgtcccagctagaaagaagttggacgaggcagtgttccattgtcacgacaccgtctacatcatctcacctgtttctctcagcacattctaatccaccatataatggtcgatagtaccagcgcgtgcatctaatctaatggactatttttagcgagatataacaccaagtaaatgcagacatcaaactctctgcaacaaatttccactctctctgcggtctaagcagtccactgtgacgctgaccttcaatcacgcattttgaatctgatcccgacagtggtggacgaactcagagtcttgtaggattcaagcgtcgaaagcaatctaaacctgaacaaacattaatagctaaatatttgattgctatggtgttacgc

SEQ ID NO: 6070 - DNA, 669 bp, Muscodor strobelii
  misc_feature: SGI cDNA ID NO. 561754
  misc_feature: Encodes the peptide sequence at SEQ ID NO 6071
atgccaattcttggcgagaatgtgataggacacgatgaattcacacccgtattctgttactccatgctcacaactacgattacgtttgcacggccgcggacaacagatgattttctactagtctctaacggcatattaccggagtggctgctcatctcacgtggagtgacacatctcatcgaggcgcagggcgagcacatcttcagcatctccagcatggacgcgctattccattctggcaaggacttcactgctgcgtggttacaacatggtgatatagagcacgagggtctcagggagctcgaagtcaacatcaggcatgacgtcgtcgacaccgaaaccttgacgggtctcgaagaggggatagtggccctcaagcggtcattcggactctatgcagttatggggcatgatgaagagaagaggttacggagtgtcttggtttgggtcatcatgcttccagagagcttcattactctgctcaggagtcattgttgcgaagccctgtgtgtgttggcgtactattgtgtcctactgaagcggatggagcatgtgtggtgggttgagggatgggcgtttcatctaatagagcgaatttattctgcgcttgacgagaggcatcggctttggataagatggccgcttgaggagataggctgggctccttga

SEQ ID NO: 6071 - protein, 222 aa, Muscodor strobelii
  misc_feature: SGI Peptide ID NO. 561754
  misc_feature (11)..(222): NCBI GI: 159128204 Blast Desc: C6 transcription factor, [Aspergillus fumigatus A1163]
  misc_feature (11)..(222): NCBI GI: 146323225 Blast Desc: C6 transcription factor [Aspergillus fumigatus Af293] gi|129556527|gb|EAL86613.2| C6 transcription factor, [Aspergillus fumigatus Af293]
  misc_feature (11)..(222): NCBI GI: 119474417 Blast Desc: NFIA_005490 [Neosartorya fischeri NRRL 181] gi|119407237|gb|EAW17187.1| conserved [Neosartorya fischeri NRRL 181]
  misc_feature (9)..(222): NCBI GI: 169786053 Blast Desc: [Aspergillus oryzae RIB40] gi|238506989|ref|XP_002384696.1| C6 transcription factor, [Aspergillus flavus NRRL3357] gi|83776235|dbj|BAE66354.1| protein
  misc_feature (15)..(222): NCBI GI: 154320642 Blast Desc: BC1G_01793 [Botryotinia fuckeliana B05.10] gi|150853482|gb|EDN28674.1| BC1G_01793 [Botryotinia fuckeliana B05.10]
  misc_feature (32)..(222): NCBI GI: 116193911 Blast Desc: CHGG_06673 [Chaetomium globosum CBS 148.51] gi|88182586|gb|EAQ90054.1| CHGG_06673 [Chaetomium globosum CBS 148.51]
  misc_feature (1)..(222): NCBI GI: 154295657 Blast Desc: BC1G_13099 [Botryotinia fuckeliana B05.10] gi|150843979|gb|EDN19172.1| BC1G_13099 [Botryotinia fuckeliana B05.10]
  misc_feature (17)..(222): NCBI GI: 46140093 Blast Desc: FG11561.1 [Gibberella zeae PH-1] gi|117572682|gb|ABK40525.1| C6 zinc finger protein [Gibberella zeae]
  misc_feature (9)..(222): NCBI GI: 156053936 Blast Desc: SS1G_05816 [Sclerotinia sclerotiorum 1980] gi|154703596|gb|EDO03335.1| SS1G_05816 [Sclerotinia sclerotiorum 1980]
  misc_feature (17)..(222): NCBI GI: 212533327 Blast Desc: C6 transcription factor, [Penicillium marneffei ATCC 18224] gi|210072184|gb|EEA26273.1| C6 transcription factor, [Penicillium marneffei ATCC 18224]
MPILGENVIGHDEFTPVFCYSMLTTTITFARPRTTDDFLLVSNGILPEWLLISRGVTHLIEAQGEHIFSISSMDALFHSGKDFTAAWLQHGDIEHEGLRELEVNIRHDVVDTETLTGLEEGIVALKRSFGLYAVMGHDEEKRLRSVLVWVIMLPESFITLLRSHCCEALCVLAYYCVLLKRMEHVWWVEGWAFHLIERIYSALDERHRLWIRWPLEEIGWAP

SEQ ID NO: 6072 - DNA, 1663 bp, Muscodor strobelii; identical to SEQ ID NO: 6069
  misc_feature: SGI EST ID NO. CUFF.15724.1
  misc_feature: Variant of the nucleotide sequence at SEQ ID NO 6070
